United States Patent Application Publication US 2011/0296543 A1 - sequence listing, part 14

SEQ ID NO: 59601 - DNA, 783 bp, Unknown
  Obtained from environmental sample
  misc_feature (1)..(783): n is a, c, g, or t
atgagcgtccttttcggcctttatcaggcggaaaaaggcataattaaaaaaaacgggaaaaaggttaatattactgggcctaacgacgccagaaggcttggaatcgggatggttcaccagcattttaaactggtgcataattttaccgttcttgaaaatattattcttggcgtggaaacagtcaaacacggcgtcttgaattttgaaaacccccgcaataatgtaatggaattgtccggacgctataaacttgatattgatccggacgctttaatttccgatattaccgtaggaatgcagcaacgggttgaaattcttaaaatgctctaccgcgagaacgaaatattaatctttgacgagccgaccgcggttcttactccgcaggagattgaggagttaatgaacataatgaaaaatctggctgcggaaggcaaatctattctttttattacgcataaactggacgaaatcaaatcggctgcggaccgctgtactgtgttgcgcaaggggaaatccacgggaactgtggacgtcgcgtctgtttccaaggaagaactttccgaaatgatggtaggcagaaaagtaaatcttttggttgaaaaaaccgaaaaacagccgggagatgttattctaaaagtagaaaatcttaccgttaccggcaatacatccgatatagctcttgtgaacaacgcgagttttgaggtgcgcgagggcgagattgtctgcattgccggaattgacggcaacggccaacaggaactgtatacgctcttgccggcatga

SEQ ID NO: 59602 - protein, 260 aa, Unknown
  Obtained from environmental sample
  DOMAIN (1)...(170): ABC transporter
  misc_feature (1)..(260): Xaa is any amino acid
MSVLFGLYQAEKGIIKKNGKKVNITGPNDARRLGIGMVHQHFKLVHNFTVLENIILGVETVKHGVLNFENPRNNVMELSGRYKLDIDPDALISDITVGMQQRVEILKMLYRENEILIFDEPTAVLTPQEIEELMNIMKNLAAEGKSILFITHKLDEIKSAADRCTVLRKGKSTGTVDVASVSKEELSEMMVGRKVNLLVEKTEKQPGDVILKVENLTVTGNTSDIALVNNASFEVREGEIVCIAGIDGNGQQELYTLLPA

SEQ ID NO: 59603 - DNA, 747 bp, Unknown
  Obtained from environmental sample
  misc_feature (1)..(747): n is a, c, g, or t
gtgatgggtacgacggttttattcaagcctacggcggtgcagagaaaagcccttgcgatgttgaagggcggggctaaacacattttgctttttggcggaagccgaagcggaaaaactacggtgctggtgatggcgattatctacagggctttgaagtatgccggaagccgccatttgatttgccgttacagggctaaggacgctcgatcatcggtactgcgggaaacgctgatgccgtggctggataacactgtcgggaaaagcgggtacacctaccttgcccatgaaagcatgatcactctttttaattcgtctgaaatttggattggcggtttgggagaccgtgaacaagctgacaaaatacttggacacgaatacaacacgatttattttaacgagataagccagctttcctatgccgccgttacaactgcttattcacggctggctatgcgtgtggaaggctgccggaacctgttttactacgactgcaatccgggcagccccctgcattgggcttacaagatttttgttttgaagcggacatttcttactggcgatccattggagaagccggagctatatcaagcaatgctccttaatccagaggataacaaagccaacctgccggaagattacatttctgacattctcgatacccttccagaaaaacaaaaagctcgtttccgagacggcttatgggttaaggctgagggcgttatatatgaccgcttgacgagacaatga

SEQ ID NO: 59604 - protein, 248 aa, Unknown
  Obtained from environmental sample
  misc_feature (1)..(248): Xaa is any amino acid
MMGTTVLFKPTAVQRKALAMLKGGAKHILLFGGSRSGKTTVLVMAIIYRALKYAGSRHLICRYRAKDARSSVLRETLMPWLDNTVGKSGYTYLAHESMITLFNSSEIWIGGLGDREQADKILGHEYNTIYFNEISQLSYAAVTTAYSRLAMRVEGCRNLFYYDCNPGSPLHWAYKIFVLKRTFLTGDPLEKPELYQAMLLNPEDNKANLPEDYISDILDTLPEKQKARFRDGLWVKAEGVIYDRLTRQ

SEQ ID NO: 59605 - DNA, 513 bp, Unknown
  Obtained from environmental sample
  misc_feature (1)..(513): n is a, c, g, or t
ttggtttttcacgaggattcctattttgacatgattcgcccgggtatttttctttacggttattctccttcggactggcttgtaaaaacagggcaggccgattctttggataattatctatccgccgaaccgctgatggagctgcggagcgccgtggtttcagttaaaaagatgaaaaaaggggagaccgtatcgtacggcagaatctggacagcgcctgaagacacctatgtaggcatagttccggcaggctacgccgacggctttcgccggagcctttccaacgatcattcaatgcttatcggcggaaagacctatcctttggccggcagaatatgtatggatcagtgcatggtcaaccttggccccgaaccagtcgtaaaacgctgggacgaagctgttgtcttcgggccaggctttattaccgccgccgatatagccgtaaaagctaaaacgattccttacgaaattacctgcggcattggcaagcgggtacccagagaatatatttag

SEQ ID NO: 59606 - protein, 170 aa, Unknown
  Obtained from environmental sample
  DOMAIN (45)...(170): Alanine racemase, C-terminal domain
  misc_feature (1)..(170): Xaa is any amino acid
MVFHEDSYFDMIRPGIFLYGYSPSDWLVKTGQADSLDNYLSAEPLMELRSAVVSVKKMKKGETVSYGRIWTAPEDTYVGIVPAGYADGFRRSLSNDHSMLIGGKTYPLAGRICMDQCMVNLGPEPVVKRWDEAVVFGPGFITAADIAVKAKTIPYEITCGIGKRVPREYI

SEQ ID NO: 59607 - DNA, 585 bp, Unknown
  Obtained from environmental sample
  misc_feature (1)..(585): n is a, c, g, or t
gtggaagaagaagaaagggaagatgcagaagcaaagcaggaaacgcatgatccgcttataaccaggatgttaaaaacccggacgataatgctctccggcgaaataaacaaggatctgggcgaaaaaaccatcagacagctgattctccttgaggatatgggagaagagcccattcgcatatttattgattcccccggaggggacgcggatgccggatacgcaatctttgacatgatccgctttgtcaaaccaaaggtttggttaattggcatggggcttgtcgcaagcgccgcggcgattattcagcttgcaagtcccagggagttacgcatcggtcttcccaacagccactacctaatccatcagcctttgtcgggaattcgcggagtagccaccgacatagaaatccacgcaagggaactggaaaagctacgcgcaaaaatcaacaagctgatctccgatgaaaccggaattccctttgagcaggtagaaaaagacaccgaccgcgatttttggatgaatgccgaggaagctgtaaaatacggccttataagccggatagtcgccaggcgggaagacttatag

SEQ ID NO: 59608 - protein, 194 aa, Unknown
  Obtained from environmental sample
  DOMAIN (11)...(191): Clp protease
  misc_feature (1)..(194): Xaa is any amino acid
MEEEEREDAEAKQETHDPLITRMLKTRTIMLSGEINKDLGEKTIRQLILLEDMGEEPIRIFIDSPGGDADAGYAIFDMIRFVKPKVWLIGMGLVASAAAIIQLASPRELRIGLPNSHYLIHQPLSGIRGVATDIEIHARELEKLRAKINKLISDETGIPFEQVEKDTDRDFWMNAEEAVKYGLISRIVARREDL

SEQ ID NO: 59609 - DNA, 504 bp, Unknown
  Obtained from environmental sample
  misc_feature (1)..(504): n is a, c, g, or t
atgattcaacttgtggcgttcctgggtaatcccgggaaggaatattcccataaccgtcataacgcgggttttttacttgccgaaaagccaaagataaattccgaactcaagtggcaaaaaaaattcaagggattttacgccgtttttggcggacgcgttcattttatcaagcccttgactttcatgaacctttccggggagtccgtatcccaggccgtttcgtttttcaaaataaaaccggacgccatcatcgttgttcacgacgagttggaactgccccttggagttgtctcgcttaaattcagcggaggcctaggcggccataacgggcttcgttccatgaagcgtcgcttggcagcgcggatttctggcgcgtcagaatcggtatcggaaggcccgttcctgatagcaaggccgttatcgactgggtgctttcagacttcgacgccgctgaaaaggaaattctggacaaggttctggaagccgccgccgagctgctcatga

SEQ ID NO: 59610 - protein, 167 aa, Unknown
  Obtained from environmental sample
  DOMAIN (4)...(160): Peptidyl-tRNA hydrolase
  misc_feature (1)..(167): Xaa is any amino acid
MIQLVAFLGNPGKEYSHNRHNAGFLLAEKPKINSELKWQKKFKGFYAVFGGRVHFIKPLTFMNLSGESVSQAVSFFKIKPDAIIVVHDELELPLGVVSLKFSGGLGGHNGLRSMKRRLAARISGASESVSEGPFLIARPLSTGCFQTSTPLKRKFWTRFWKPPPSCS

SEQ ID NO: 59611 - DNA, 375 bp, Unknown
  Obtained from environmental sample
  misc_feature (1)..(375): n is a, c, g, or t
atgaaatttttaatgtcacagactactagtgtcctgttgaaagaagggcttgcgaaattaggcattgaagaaagcggagggcgaatacttccgctgcttgagcgctacatcgaagagatagagctttttaatcccgcttatggccttgttaaggtaaaagatcgccgggaattgatagtgaagcacatactggattccctggccccaataaaaatcattcgtgatctctctaaaaacagcataagtctcaagatcgctgacgttggctccggtgccggcttgccgggtatacccctggctgtttgcctgccaaacgcagcttttaccctgattgagcggatgggaaggcgcgccggcttcctagagacgccgtag

SEQ ID NO: 59612 - protein, 124 aa, Unknown
  Obtained from environmental sample
  DOMAIN (29)...(124): Glucose inhibited division protein
  misc_feature (1)..(124): Xaa is any amino acid
MKFLMSQTTSVLLKEGLAKLGIEESGGRILPLLERYIEEIELFNPAYGLVKVKDRRELIVKHILDSLAPIKIIRDLSKNSISLKIADVGSGAGLPGIPLAVCLPNAAFTLIERMGRRAGFLETP

SEQ ID NO: 59613 - DNA, 306 bp, Unknown
  Obtained from environmental sample
  misc_feature (1)..(306): n is a, c, g, or t
gtgcttggcctgccgaatgttatcattgaagaagcggatgtggatgagcttgcccttgctgccgatgaccgctatgactttattgttttcagggctttcaagcctttggacagcgctatcctaagggggctgtttgccattttaaagccgtctgggttccttgccgcgtacaagggcagaaggcaggcaataggggaagagatgggcggtttacaaaaccagtcctgggaagcaatacaactggaagtgccttttttggacgaagagcggcatctggtgttgataagacagccaggtgctacctaa

SEQ ID NO: 59614 - protein, 101 aa, Unknown
  Obtained from environmental sample
  misc_feature (1)..(101): Xaa is any amino acid
MLGLPNVIIEEADVDELALAADDRYDFIVFRAFKPLDSAILRGLFAILKPSGFLAAYKGRRQAIGEEMGGLQNQSWEAIQLEVPFLDEERHLVLIRQPGAT

SEQ ID NO: 59615 - DNA, 507 bp, Unknown
  Obtained from environmental sample
  misc_feature (1)..(507): n is a, c, g, or t
atgcacccattaattgaaagccgccgcagtgtcagaaaatttcaggccgataaacccgtcacaagggaacagcttaacaggctgttggaagcggcaatgtttgcgccgtcggcctgtaattcacgaccatgggaatttattgcaatcacgaaacgggaaacccttaacgctattgccgctgtgcatccttacgccaaaatgtgcgaaaccgctacagcggctattattgtggtggcgattccccaaactggtactatgcctgaaggctatttcccgcaagattgtgccgctacaacacagaacattctactggaagccgcctctatggggcttggcacttgctggtgcggcgtataccccaaggaagaacgtataggctcaatccgcgatctcttaaaaatccccgaaccgaaaattccctttaatgtcatcgcaatcggagcgccggatgaatcccctgtcaaaagaggtttttacgaggaagcaaaagtaacgtatatcgattag

SEQ ID NO: 59616 - protein, 168 aa, Unknown
  Obtained from environmental sample
  DOMAIN (5)...(148): Nitroreductase family
  misc_feature (1)..(168): Xaa is any amino acid
MHPLIESRRSVRKFQADKPVTREQLNRLLEAAMFAPSACNSRPWEFIAITKRETLNAIAAVHPYAKMCETATAAIIVVAIPQTGTMPEGYFPQDCAATTQNILLEAASMGLGTCWCGVYPKEERIGSIRDLLKIPEPKIPFNVIAIGAPDESPVKRGFYEEAKVTYID

SEQ ID NO: 59617 - DNA, 2541 bp, Unknown
  Obtained from environmental sample
  misc_feature (1)..(2541): n is a, c, g, or t
gtgtttaagtgccagtcgtgcgaaaacttctgctctattcaagtgttaaatgtaaacaacagcaagtatatgttcggcgggagatgcaacaaatacaccaatatgcgcaaaaaggtcgcggatgtgcctgtttttgattatgtcgaaaaaaggcagaaaatgctttttgaggaatatgccgcgcctaagacttcggcctccggctactccaaaaatttttccgtaggcataccgcgcgctctttccacccatacgctttatccgctttattcatggtttttccacgaacttggaattaaaacgtatctttctaccgaggtcgcccatgagggagtcgcccgcgccgaatcaacttactgcttcccggcggaaatcgctcacggcgcagttcaggactgtcttgataaaaatgtcgattatgtgcttttgccgcacttcagagatatgcccagttatgaggaaaaagtgcacgcgaacttctgcccgattacgcaggggcttccttattacatagaaaaagctttcccggatatcgataaaaaccgctggcttcctttggttgtaagttttaagtacggcgagggaaaggcgctggaacttttccgtgaaatgacaaaacggcttgacattagcgaaaacgagacaaaagccgcttttgacaaggcgtgggcaaaacaacaggaatatttttccgccgtgcaaaanatgggagtagaggcgctggaagaggcgcgcaaggcaagccgccctattatttgcaccttaggccgtccgtacaacgcgttcacgcctgaggcgaacatgggtattccgcgcaagtttacaacacgcggctattcaatcgttccgtttgacattttgccgttccgcgacgaagttatcttcccgaatatgtactggttctacggtcaacaggacttaaaagcggcgaagctcctcaaaaaagaagacaacatttatcttacatttgtttcaaacttttcatgcgcgccggattcgttcattctccattatgtgaaatggatgatggggcaaaaacccttcctcgtgcttgaattggattcccattccgccgacgccggagtcgatacccgtgttgaagcgttcctcgacatcatcgacggttaccgcgcgaagaaaaatcagtttgaagacgagcgttacgacaacggaatgaggtttgtctgcgaaaaaatgtattcgggcgaattcgatttgcgcatagacaatataaaaacaggagagagaattcccgttatagacaataagagggtaaaagttctgctctccaacatgggaaatatttccaccgagtatatgggagccgccattcgcagtttgggtattaacgcggaagcgatgcctgtggcgacggcaaaaacaattcaggcggcgagagctcacgcgtccggtaaggaatgcgtaccaagccatttagttttgggcagcgcattggaatttttcttcagcgacaaataccgcaaagacgagttgtatcttctctttgtgccgataacgacaggtccctgccgtacggggcagtattatgtcttctacgaaaatcttttccgtgatttgcgtcttgaaaacgtagtggtttttatcctctccgcggataattcatacacggagcttggacccagtttcgcaaaagagatgtggaaagggatagtgttatccgactacttaaaagacattcaatgttctctcttggcggcggcggttgatcccgtaaaggcggaaaaagattttgaacattcatggcgcaaagttatgcacgccgtagaacacaaccccaaagcgctgtggaaagaattaaaacatgtcgcaacagatgtaaaaaagataccgctaaaaagaaaaataacggattgcccgcgcgtattaattgtaggcgagatttatgtgcgccgtgatgattttgccgtgggcgaattaatcgaacttatgagcgagaggggtattgttgtaaaagtcgccggcataagcgagtggattcactaccttgattttgttcgcgagtacgctcttaaaaaacttattaaactgcaaaaaccgggtacaagacttttctccaaaccgtctaaagacctaaaaaaacttcagattgaagaatggtggaaacatcatatcgagaaaaaagtccttgccattttggaaccgacaggtttaattcccgaaactccgcacgatatgcgccatatcatgaaatacacgcaggaacattttgttaaccttgaactcaattcggaaatcgcagtttcttcgggttccgcggcggcggcgatggacgaaggatattcgggtatcgtgaacataagcccgtttgcctgtcttattgggcgtgtaattgaaggcttgttcactccctgggcgagagaacgcaactacccgatactttccgttgaggtagacggcaaccttctgccgccgaatatcgtcaacaagttaaatattttcatggttaacgtattgcgcttcaaaggcggcaatgatctttcaacgttagttgacaaagccgataggggagagtctgcgtga

SEQ ID NO: 59618 - protein, 846 aa, Unknown
  Obtained from environmental sample
  misc_feature (1)..(846): Xaa is any amino acid
MFKCQSCENFCSIQVLNVNNSKYMFGGRCNKYTNMRKKVADVPVFDYVEKRQKMLFEEYAAPKTSASGYSKNFSVGIPRALSTHTLYPLYSWFFHELGIKTYLSTEVAHEGVARAESTYCFPAEIAHGAVQDCLDKNVDYVLLPHFRDMPSYEEKVHANFCPITQGLPYYIEKAFPDIDKNRWLPLVVSFKYGEGKALELFREMTKRLDISENETKAAFDKAWAKQQEYFSAVQXMGVEALEEARKASRPIICTLGRPYNAFTPEANMGIPRKFTTRGYSIVPFDILPFRDEVIFPNMYWFYGQQDLKAAKLLKKEDNIYLTFVSNFSCAPDSFILHYVKWMMGQKPFLVLELDSHSADAGVDTRVEAFLDIIDGYRAKKNQFEDERYDNGMRFVCEKMYSGEFDLRIDNIKTGERIPVIDNKRVKVLLSNMGNISTEYMGAAIRSLGINAEAMPVATAKTIQAARAHASGKECVPSHLVLGSALEFFFSDKYRKDELYLLFVPITTGPCRTGQYYVFYENLFRDLRLENVVVFILSADNSYTELGPSFAKEMWKGIVLSDYLKDIQCSLLAAAVDPVKAEKDFEHSWRKVMHAVEHNPKALWKELKHVATDVKKIPLKRKITDCPRVLIVGEIYVRRDDFAVGELIELMSERGIVVKVAGISEWIHYLDFVREYALKKLIKLQKPGTRLFSKPSKDLKKLQIEEWWKHHIEKKVLAILEPTGLIPETPHDMRHIMKYTQEHFVNLELNSEIAVSSGSAAAAMDEGYSGIVNISPFACLIGRVIEGLFTPWARERNYPILSVEVDGNLLPPNIVNKLNIFMVNVLRFKGGNDLSTLVDKADRGESA

SEQ ID NO: 59619 - DNA, 852 bp, Unknown
  Obtained from environmental sample
  misc_feature (1)..(852): n is a, c, g, or t
gtgacacgaaccgaaaaaagcgtaaattctctgcttgaaaattacgaagcttacggcatggttaatcattcgggcgtaatgaatcttccgggaagagaaagcgttcaaagcatagtgcgtgatattgaagacctgatttttcccggttttctggaaaacgtccgcaccgacagagaatctttgcggaaaaacacggcgaaaaaagtaaaaaaaatatcttggcttaaggagcgaggtagaaaaaagtatgtcttttccgtgcggagcgagactttaaattgcaagcatgaaacttgcagggcggcagccgcgcttgttgttgaagaattttttgaagaacttccgaaaatcagagtagttttagaaagggatttggaagccgcggtgcgcggagaccccgcggcaaagagcgccaacgaagtgattctttcctatcccggttttcaggcgattaccgttaacagaatggcgcattttttatggacgcggcaggttcccataatcccgcgaatgatgagcgaacttgttcacggacggacaggcatcgacattcatccgggcgcgcaaatagacgaatcattttttattgatcacggaaccggcgttgtaatcggagagactacggtaatagggaaaaatgtgaaaatttatcagggtgtaactcttggcgctctttccgtaagaaaagaagaaagcgaccataaacgccacccaactatagaagacgatgtaacaatctacgctaacgccacaattctgggcggcgaaaccgtaataggcagcggaagcgttatcggcggcagtgtgtggataacacaatccgtgccgccgggaagcaaaatctacaagtaa

SEQ ID NO: 59620 - protein, 283 aa, Unknown
  Obtained from environmental sample
  DOMAIN (59)...(153): Serine acetyltransferase, N-terminal
  misc_feature (1)..(283): Xaa is any amino acid
MTRTEKSVNSLLENYEAYGMVNHSGVMNLPGRESVQSIVRDIEDLIFPGFLENVRTDRESLRKNTAKKVKKISWLKERGRKKYVFSVRSETLNCKHETCRAAAALVVEEFFEELPKIRVVLERDLEAAVRGDPAAKSANEVILSYPGFQAITVNRMAHFLWTRQVPIIPRMMSELVHGRTGIDIHPGAQIDESFFIDHGTGVVIGETTVIGKNVKIYQGVTLGALSVRKEESDHKRHPTIEDDVTIYANATILGGETVIGSGSVIGGSVWITQSVPPGSKIYK

SEQ ID NO: 59621 - DNA, 2187 bp, Unknown
  Obtained from environmental sample
  misc_feature (1)..(2187): n is a, c, g, or t
atgaaatttaaacttaaatcaaacatcttgatgacagcaattatgacgcttatggtaacgggagttgccgcgtttttgttacagcgggcttccaaaataactatggaatccaatctacgtgacctaaggtatttagctcaggagcaagccacattctggcaaggacgggaagacggtcatttaaagcagttaaggggaatagcggatgtaatgggcgaatatgaaaccttgcccgccggagcccggcgtgacacttatgacaatatactgctggctaccctgaacaataatccaaacttcgtcagaatatattccgtttggaaaccaaatgccatggacggcatggatgcccgttataaagaccgtccggggtcaacctcgacggggcagtacgcgatggtctacaccagggaaaacggcaagattgaggtaacgaaagacctggaccttgatgaagttaacaagtggataaacggacccgacgcgcttaaagacaaagttgatcatcccattcctttaaaagtaaacagaaaagacacttatgttttcaaagtgggcgttcccataaccagaaggactacaaacgaagtagtcggacatctggctgttttaatggacattgtgccaatacaggaattagtaaacaaaactctccatgattacgaagaaatatcccagatggctgtttactcaggcaacggtttaattataggaaacctgcggcctgagcgggtaggaaaatttctgcccgaagtggaagctttatacggcgtttatcagaaagacgcanatcaggctgtacttgacggcaggccgttcagctgttcaagctattcgaattcgttaaaaacgaacgtgaaaattgaaatggcgcctttccggataggtaattcagacaatacatggagcgtaatgatcgcgtccagagagacatatattatgagaaatgtcatcgcaataagaaactttgtcattgttatggcatcggttgcgattatggcggcggttgtaatcatatatctcgttttgaacagagctatcaaaccaattaataacaacccaaaaacaatccggggattattttcatacacgataatcctgctcatcatacttgcgttcgcgctgatggttacgctaagttccgtctttatgtccaacatagtcagccgtcagttggcggacaatgcgtatgcggccattaactatctggaaagcaatataacaatagacctcaaagagccaaggacactgctgggcggcgcgtctgataccatacgccaaatgatcctgaacggcgaaaacgaaaaaaaagtgcacgcttatctgaatgaaataaccacgtttttactgagtgatgatgagcagcttacggactttgacgggcttttcggttattttaacgtattcggcggagcgttgctcgacggacaggatcgctcgccgcctgaaaattataatcctcttgaacgcccttggtacaaagaagcggttgcggcgggcggcaaaatagcgtttatacagccccatctcagcgtaatgtcaaagagaccgacgtctatcattgcatacgggcgggccatatttgacaatgacggaaacctgctcggcgtagtcgccttgaacatgaattttgaaagggtcaaaacatatatcatccaggcgaatttaggcaaagtgtggtttggagtcttattaaacgaaaattttgacattattttccacagagaccacacactggaaggcacaaattatgcggacatcaacgtcactaccgcaagacttctggaattgttgaaatcgggaaataacaatgtttccgaatttagaatgatgaactatcagaatatcccctcaatcacatttttcaggaaactggaaaacggctggtatctgggcattgtaacgcccaaagaagagtattttacggaagtcacaagggtaaggtttatcctcatattgcttggaaccgtactgtcgataatattcagcgtcatactggcccggataataaaggaaaaacaaaaaactgacgcaaagacaaacgaagctgaaaaggctatagtcgccaaccgcgttaaaaccaatttcctcgcgaagatgagccatgaaatacgctctcccatgaacgtgattttgggcattgtcgaaatgcagcttcctaaacagatctgccgccggatacaatga

SEQ ID NO: 59622 - protein, 728 aa, Unknown
  Obtained from environmental sample
  SIGNAL (1)...(24)
  DOMAIN (505)...(587): Cache domain
  misc_feature (1)..(728): Xaa is any amino acid
MKFKLKSNILMTAIMTLMVTGVAAFLLQRASKITMESNLRDLRYLAQEQATFWQGREDGHLKQLRGIADVMGEYETLPAGARRDTYDNILLATLNNNPNFVRIYSVWKPNAMDGMDARYKDRPGSTSTGQYAMVYTRENGKIEVTKDLDLDEVNKWINGPDALKDKVDHPIPLKVNRKDTYVFKVGVPITRRTTNEVVGHLAVLMDIVPIQELVNKTLHDYEEISQMAVYSGNGLIIGNLRPERVGKFLPEVEALYGVYQKDAXQAVLDGRPFSCSSYSNSLKTNVKIEMAPFRIGNSDNTWSVMIASRETYIMRNVIAIRNFVIVMASVAIMAAVVIIYLVLNRAIKPINNNPKTIRGLFSYTIILLIILAFALMVTLSSVFMSNIVSRQLADNAYAAINYLESNITIDLKEPRTLLGGASDTIRQMILNGENEKKVHAYLNEITTFLLSDDEQLTDFDGLFGYFNVFGGALLDGQDRSPPENYNPLERPWYKEAVAAGGKIAFIQPHLSVMSKRPTSIIAYGRAIFDNDGNLLGVVALNMNFERVKTYIIQANLGKVWFGVLLNENFDIIFHRDHTLEGTNYADINVTTARLLELLKSGNNNVSEFRMMNYQNIPSITFFRKLENGWYLGIVTPKEEYFTEVTRVRFILILLGTVLSIIFSVILARIIKEKQKTDAKTNEAEKAIVANRVKTNFLAKMSHEIRSPMNVILGIVEMQLPKQICRRIQ

SEQ ID NO: 59623 - DNA, 909 bp, Unknown
  Obtained from environmental sample
  misc_feature (1)..(909): n is a, c, g, or t
atgaaagatgntatcttactttgctcatggctgattagctgcgttttaaaacaggaagcgccgatgcggctggaacgggtaattaacaccaaaaaaaaacggctttttcgttcatacttgatagtcctgattatcataccggcgtttgccgcagcctgtaccgcgccctctaacatggtactcatacaaggcggaaccttcagcatgggaagcccggcggatgaggctgatcgcgatgatgatgaagtccggcacagtgtaacggtaagctccttttacatgggaaagactgaggtaacccagaaggaatacagagaagtgatggggaccaatccgagcagtttcaagggagacaatatgccggtggagggggtaagttggtataacgcggtagagttctgcaaccgcctgagccaacagaaggggctgacccccgcgtatacggtgaagggaacaaacgtaacgtgggatcggagcgccaacggctaccgtctgcccaccgaggcggaatgggagtacgcctgccgcgccgggacacagtcgccttttagcacggggaacaacattaccgtaaaacaggcgaattacgatggtttcccttacaacaacaacgcgaaagggacgttccggaacaggacggtgaaggcgaagagtttcgcgccgaatgcatggggtttgtataacatgcacggaaacgtatgggaatggtgctgggatttgtatggggagtacgagggcggcgcgcagaccgaccctgtgggcgcatcctcgggctctgtccgcgttatacgcggcgggagttggcgccttcacgcgcagtatcttcgttccgcgaacaggtacgaaaacgtcgctccgtctcacgcaagcaacgctcttggcttccggctggctctgcccataaattaa

SEQ ID NO: 59624 - protein, 302 aa, Unknown
  Obtained from environmental sample
  SIGNAL (1)...(17)
  DOMAIN (55)...(299): Domain of unknown function (DUF323)
  misc_feature (1)..(302): Xaa is any amino acid
MKDXILLCSWLISCVLKQEAPMRLERVINTKKKRLFRSYLIVLIIIPAFAAACTAPSNMVLIQGGTFSMGSPADEADRDDDEVRHSVTVSSFYMGKTEVTQKEYREVMGTNPSSFKGDNMPVEGVSWYNAVEFCNRLSQQKGLTPAYTVKGTNVTWDRSANGYRLPTEAEWEYACRAGTQSPFSTGNNITVKQANYDGFPYNNNAKGTFRNRTVKAKSFAPNAWGLYNMHGNVWEWCWDLYGEYEGGAQTDPVGASSGSVRVIRGGSWRLHAQYLRSANRYENVAPSHASNALGFRLALPIN

SEQ ID NO: 59625 - DNA, 456 bp, Unknown
  Obtained from environmental sample
  misc_feature (1)..(456): n is a, c, g, or t
ttggatttaacgatagacggagccgacgaggtagacccgcaaaaccgtcttatcaagggcggcggcggcgctcatttaattgaaaaaatagccgcgtatgcttccgccgaatacgctatcactgtggacgaatcaaaactgacggagcgcctgggaggcggtttccccgttcccgtagaagttgttcccgaagcaagaacgcaggtaacaaaagcgcttgaaaaattaggtgcaaatgttataatcagggaagcggtaaaaaaagcgggacctgtaataacagaacacggaaacctgattttagatatccgctttaattctccgatagacccgcaattaatggaaacagaaataaacaacatcccaggcgttgtagaaaacgggttttttacaagaaagccgcctgtcgtattcattgcccgttcaaacggaacggtagaaaaaagaggaaaatga

SEQ ID NO: 59626 - protein, 151 aa, Unknown
  Obtained from environmental sample
  DOMAIN (1)...(146): Ribose 5-phosphate isomerase A (phosphoriboisomerase A)
  misc_feature (1)..(151): Xaa is any amino acid
MDLTIDGADEVDPQNRLIKGGGGAHLIEKIAAYASAEYAITVDESKLTERLGGGFPVPVEVVPEARTQVTKALEKLGANVIIREAVKKAGPVITEHGNLILDIRFNSPIDPQLMETEINNIPGVVENGFFTRKPPVVFIARSNGTVEKRGK

SEQ ID NO: 59627 - DNA, 1218 bp, Unknown
  Obtained from environmental sample
  misc_feature (1)..(1218): n is a, c, g, or t
gtgccgagccttgaagaagctgcgcgcacgttcggaacaagaattatacgctcatgccacgatttagaaggaactcttaccgaccttcccgcaaaaatgaaatcaatgaaacacgcgggagacgaaataataaaaatagcggtcgccgtaaaatccacacgcgatgtgttaaatgttttcagcgcttccggttctttttccaatcaggataaaattcttatatgcatgggacactacggagtttattcaagaattcttgcggaaaaattcggttcttttttaacttactcaagcgcgttatctgaaagcgtcattcccggcgctcccggtcagttggatgtaaaagaactttctgaattgtaccatttccgcaaaataacaaaaaaaacaaaagtatacggcgttattggcaacccgttaaaatccagcgtaagcccatggttttttaacactatttttaatcttgaagacgtagatgccgtgtatgccccatttccggtaacagatgtcggtgattttatggaacttgcgaaagaaatagatatacaggggctttcggtcacagtacctttcaaggaaactgttcttccgtatcttggagaaaagtcggcgattgtacaatcaattgaagcgtgcaataccttataccgcaaagatgatatatgggtcggcgacaataccgattacgccggattttcatcatcgctcttaaattttttagacagaaaaaatttaaaacgcttaaaagtaactattctgggcgcgggaggcgtgtcgcgtgccgtagcggcggaagtatttaacatgggcggtaaagccctgattttaaatcgcaccgctaataaagcaaaagaaatcgcagaactgtataaattccgctggggcggactggacaatagcggcgcaaatcttatgtccaaatacaacgatataataattcaaaccacttccgtcggcatggaaggttataatgaatcagatccggcggaattctacacgttcacgggaaaagaagcggtaatggatttaatttatactcccgcccaaactcctcttttaaaaagagccgccgcggcaggatgcagaacgctcaacggttacgacatggtaatacgtcaggcttgttttcaatatattaatttctttggaaaagaaataccaaaaaaacatatagactcattaggggaaaataaatggaacaagataacgcaaagttaa

SEQ ID NO: 59628 - protein, 405 aa, Unknown
  Obtained from environmental sample
  DOMAIN (1)...(120): Type I 3-dehydroquinase
  misc_feature (1)..(405): Xaa is any amino acid
MPSLEEAARTFGTRIIRSCHDLEGTLTDLPAKMKSMKHAGDEIIKIAVAVKSTRDVLNVFSASGSFSNQDKILICMGHYGVYSRILAEKFGSFLTYSSALSESVIPGAPGQLDVKELSELYHFRKITKKTKVYGVIGNPLKSSVSPWFFNTIFNLEDVDAVYAPFPVTDVGDFMELAKEIDIQGLSVTVPFKETVLPYLGEKSAIVQSIEACNTLYRKDDIWVGDNTDYAGFSSSLLNFLDRKNLKRLKVTILGAGGVSRAVAAEVFNMGGKALILNRTANKAKEIAELYKFRWGGLDNSGANLMSKYNDIIIQTTSVGMEGYNESDPAEFYTFTGKEAVMDLIYTPAQTPLLKRAAAAGCRTLNGYDMVIRQACFQYINFFGKEIPKKHIDSLGENKWNKITQS

SEQ ID NO: 59629 - DNA, 432 bp, Unknown
  Obtained from environmental sample
  misc_feature (1)..(432): n is a, c, g, or t
atgaaccttttcaagatattcctcgcggcgttgttgattgacaatgtcgtgttaatgcgttttatcgcgctctgcccttttatcggcatgagctccgatgaggacaaatccgtcgggatgggacttgccgttgtttttgtgacggttatcgccaccgccgtaacctggccgatttaccgttttatccttgaaccgctggggcttgtgttccttcaattgctggtcttcattctggtaatagcctcactcgtccagcttgtggagtattttcttaaaaaatccgtacccggcctgtacaagggcatgggcatctacctcgccctgattacgactaactgcgccattctcgccgttaccctggacgtgataaacaataactgcgtttttaccggcaaaccttataccttcattgaatccattgttacgctatag

SEQ ID NO: 59630 - protein, 143 aa, Unknown
  Obtained from environmental sample
  DOMAIN (2)...(143): Rnf-Nqr subunit, membrane protein
  misc_feature (1)..(143): Xaa is any amino acid
MNLFKIFLAALLIDNVVLMRFIALCPFIGMSSDEDKSVGMGLAVVFVTVIATAVTWPIYRFILEPLGLVFLQLLVFILVIASLVQLVEYFLKKSVPGLYKGMGIYLALITTNCAILAVTLDVINNNCVFTGKPYTFIESIVTL

SEQ ID NO: 59631 - DNA, 405 bp, Unknown
  Obtained from environmental sample
  misc_feature (1)..(405): n is a, c, g, or t
atgggggtcttcatcccgctgattgttgttaattgtataatcatgggccgcgtggaaggcttcgcctcaaaacgcccgttaagcgattgtttggccgattccttaggcatgggtctgggctatacctgggtgcttgccggcatcgccntgatccgcgagcttttgggcaacggcacgattttgaattttcaagtgatgcccttaaactacaagccggtgcttttctttatactgccgcccggaggcttctttgttttcgccctgtttatcgcccttaatctctacattaagtcgcggcttaaagaccctgccgcctctgatgacggcggcgaaggttttggctgctgtaagcccgataattgcgccgcctgtggcgcggatgcaggcatggagggtaaggaatga

SEQ ID NO: 59632 - protein, 134 aa, Unknown
  Obtained from environmental sample
  DOMAIN (2)...(91): Rnf-Nqr subunit, membrane protein
  misc_feature (1)..(134): Xaa is any amino acid
MGVFIPLIVVNCIIMGRVEGFASKRPLSDCLADSLGMGLGYTWVLAGIAXIRELLGNGTILNFQVMPLNYKPVLFFILPPGGFFVFALFIALNLYIKSRLKDPAASDDGGEGFGCCKPDNCAACGADAGMEGKE

SEQ ID NO: 59633 - DNA, 360 bp, Unknown
  Obtained from environmental sample
  misc_feature (1)..(360): n is a, c, g, or t
atggctttctaccggaggttcaaaatgagcgaaaagaaggaatcgttattcaaaatttttgctaacggtattatccgcgaaaaccccctcctgatgttgatgataggactttgttccagcctggcggtgacaacctcggttgacaacgggataggcatgggcctttccatgacctttgtccttttaatgtcggaactggtgatcagcgcgttccgaaggctgatccccgactcgatacgcattcccattttcattattgttatcgccgcgtttaccacggttattgactatgtgttaaaagccctggttcccaggcctgtcaaaggcgatgggggtcttcatcccgctgattgttgttaa

SEQ ID NO: 59634 - protein, 119 aa, Unknown
  Obtained from environmental sample
  DOMAIN (13)...(115): Rnf-Nqr subunit, membrane protein
  misc_feature (1)..(119): Xaa is any amino acid
MAFYRRFKMSEKKESLFKIFANGIIRENPLLMLMIGLCSSLAVTTSVDNGIGMGLSMTFVLLMSELVISAFRRLIPDSIRIPIFIIVIAAFTTVIDYVLKALVPRPVKGDGGLHPADCC

SEQ ID NO: 59635 - DNA, 375 bp, Unknown
  Obtained from environmental sample
  misc_feature (1)..(375): n is a, c, g, or t
atgtcgcggcaaagaaagacggggacagtagccggcatggcgcttaaattgtcccgcgcgagctattcaggcgccgtcgtgctgttggccggggtcagcgttgacaaacgcataacaggcgtaaaaattatggaacattctgatactccggggctgggggcaaacgccgcctcgccgtcgtattttgtcgaccgggcaaaagggattactttttacggccagttcgcggggaaaagcgtaaacgatccgtttacggtaaaggccgatgttgccgctattaccgcgtccaccattaccagcaaggccgtcacggcggcggttaaggccgcgggccaggccgcgaccgcatggctttctaccggaggttcaaaatga

SEQ ID NO: 59636 - protein, 124 aa, Unknown
  Obtained from environmental sample
  SIGNAL (1)...(25)
  DOMAIN (21)...(114): FMN-binding domain
  misc_feature (1)..(124): Xaa is any amino acid
MSRQRKTGTVAGMALKLSRASYSGAVVLLAGVSVDKRITGVKIMEHSDTPGLGANAASPSYFVDRAKGITFYGQFAGKSVNDPFTVKADVAAITASTITSKAVTAAVKAAGQAATAWLSTGGSK

SEQ ID NO: 59637 - DNA, 1005 bp, Unknown
  Obtained from environmental sample
  misc_feature (1)..(1005): n is a, c, g, or t
atggcagatactaaaaccggcgttcaaagaaaaccaattcttcccctgctgggatcaagcccccatatcgcctcgcccgtaaattcacggatgatgatgggcaatatgcttatcgcgtttttttttgtttccgttttcagcgttataaacttcgggctgccttctctgttcaatatcatagtcgccgcggccgccgcggccggcggcgaagtccttttcaggctcgcgacgcgcaaggacatacgcgcgaaggacctttccgccggggctacagggcttttgctcgcgctggtaattccgccctcattgtccttgaggatgaccgcgcttggttcgatatttgccataatagttgcgaaggaatttttcggcggtctgggcgcaaacgtatttaacccggcccttgcaggcagggctttcctcctgatgagtttcccttccgcgatgacgacatggcatataccccgggagcgcttcccccttgccctgacagacgcgaccagcggggcttcctatttgggcttgctcaagtccggcgccgaacctgctccggatatactaagggaaatgttttttggctaccagtcgggcagcgcgggcgagacttcggccctcttgatactggcggcgtttatataccttcttgtcacaagaaccattgactggcgtgcgcccgtatcgatgattctcaccgctttcgccgccgcttttctgcttggctttgatcccctgcccgcggttctttcgggcgggctgctcttcggcgcggtatatatgacaacggattatgtgacaacgccgctttttccctggggcaaggttatcttcggggcgggagcgggtcttatcaccatactgatacggaaattcggcacctatccggaaggggtgtgttattcgatactgataatgaactgcgccgttcccttccttaataaactgctgccgcgcaaatacggttatgtgccaaagaaagcgcccgataacaaaggaggcggtaaatga

SEQ ID NO: 59638 - protein, 334 aa, Unknown
  Obtained from environmental sample
  DOMAIN (14)...(322): NQR2, RnfD, RnfE family
  misc_feature (1)..(334): Xaa is any amino acid
MADTKTGVQRKPILPLLGSSPHIASPVNSRMMMGNMLIAFFFVSVFSVINFGLPSLFNIIVAAAAAAGGEVLFRLATRKDIRAKDLSAGATGLLLALVIPPSLSLRMTALGSIFAIIVAKEFFGGLGANVFNPALAGRAFLLMSFPSAMTTWHIPRERFPLALTDATSGASYLGLLKSGAEPAPDILREMFFGYQSGSAGETSALLILAAFIYLLVTRTIDWRAPVSMILTAFAAAFLLGFDPLPAVLSGGLLFGAVYMTTDYVTTPLFPWGKVIFGAGAGLITILIRKFGTYPEGVCYSILIMNCAVPFLNKLLPRKYGYVPKKAPDNKGGGK

SEQ ID NO: 59639 - DNA, 399 bp, Unknown
  Obtained from environmental sample
  misc_feature (1)..(399): n is a, c, g, or t
ttgggtcgtgccgcgtgtgcacaagggtttcaggtcatctatatgaggctaagcgatttcttccgcttcacttccgccactcatgcccatggtcagattcacttcggcgacaagtgcgcaaaagtccctctgctcatcttcgatgactggggcctcaaaaagttttctctggaagaaaccgcggaactctctgacatttttgaacggcgctatggccgggcctcaacaataatttcaagccagattccatctcctgcctggcatgacttgttcccagacccgacacaagctgatgcaatccttgaccggatagtccataacgcatatgcctataatatctcaggcgaatccatgcggaaaaccatcggaaaccgcagccttgaaagtccggattcttag

SEQ ID NO: 59640 - protein, 132 aa, Unknown
  Obtained from environmental sample
  DOMAIN (1)...(111): IstB-like ATP binding protein
  misc_feature (1)..(132): Xaa is any amino acid
MGRAACAQGFQVIYMRLSDFFRFTSATHAHGQIHFGDKCAKVPLLIFDDWGLKKFSLEETAELSDIFERRYGRASTIISSQIPSPAWHDLFPDPTQADAILDRIVHNAYAYNISGESMRKTIGNRSLESPDS

SEQ ID NO: 59641 - DNA, 480 bp, Unknown
  Obtained from environmental sample
  misc_feature (1)..(480): n is a, c, g, or t
gtgatgctatgtattgaaaaatacaaagacagcggtgcggaaaacgcactttatgacgcccctggacgaggccgcaaccctgaaataacggatgatgagaaggcatggataataaacatcgcgtgccagaggccttatgaattaggctgcgcggaagaaaaatggacatatacgcggcttgcgtcatatataaacaaaaatgctgaggcttcaggctacacaaggctttccagtataagccgctccagcataaaaaacatactggatcacgctgatgcgtattccgatttacttgaacacccaatgcggaaacacttgaacagaagtgtggaatacttgaacacttttccacaaatattgagaacccccatgcatcaaaaatctgcacgcatgggggaggatagttttagcgtggttttgctaagaatccggactttcaaggctgcggtttccgatggttttccgcatggattcgcctga

SEQ ID NO: 59642 - protein, 159 aa, Unknown
  Obtained from environmental sample
  misc_feature (1)..(159): Xaa is any amino acid
MMLCIEKYKDSGAENALYDAPGRGRNPEITDDEKAWIINIACQRPYELGCAEEKWTYTRLASYINKNAEASGYTRLSSISRSSIKNILDHADAYSDLLEHPMRKHLNRSVEYLNTFPQILRTPMHQKSARMGEDSFSVVLLRIRTFKAAVSDGFPHGFA

SEQ ID NO: 59643 - DNA, 1245 bp, Unknown
  Obtained from environmental sample
  misc_feature (1)..(1245): n is a, c, g, or t
atggcattcaccatggcggaaaaaaacaaaatcaaaacggaatttgccaggcggtacaggaaggcaaacaaaaatgaaaaaacaaaaatacttgacgagtaccttaaactcctcggcggcggcaaccggaagtacgccatcttttcactcaacagggaagggaagaaacagctccgcctcattgacggcaaatatgtcaatgtcgaaatctcaagcaaggctcgccgaaaacgaacctacaagccttactacgacgatgaggtagcccaggctctcatcaagctctggaagttttttcgctatatttgcggagaacggctggttccgcttctgcgggaaaaccttgacaccataagcaggaaaagacgcttccgcatgagcgccgaggtgaaacagaaactgaaaaccataagccgcgctacagtggaaaggctactttcaggagaacgaaaaaggcataagcttaaaggaaaaagcaccaccaggaagggaaccctcctaaaaaaccagataccggtacgcgttttttgggactgggacgagaaaaagccgggcttttgtgagatagacacggtttcccatgacggagggggcgaaataaccccctattgcgcctggaccgtcaccgtaaccgacgtggccctgggctggactgaggttagggcgctcaagaacaaggcccaaagctggacgcttaaggccgcaagcgatatttacgatgcctttcccgtccccatacgcggtattgacagcgacgggggcagcgagttcatcaaccagtattttaagaaatggtgcgatgagcgcagcatcacttttaccaggggaagatcccaccattccaatgacaactgttttgtggagcaaaagaatggcgacgtggtcaggaagactgtcggctatgcccgctttgagggggacgaagccctgtccgccctccagaatgtttactcatgccttaacccactaatcaattatttttaccctaccaaaaagctcgtcgccaaagataaactgcctaacgggaaaatcaaaaaggtttatgagaagcagctaaaaactccctgccaaaggctccttgaacacaatgatgtttctgatacactaaaagaacgggcaaggctaatcaagaaaaacctggacatagtccatctccaggagagccttgaaaaagcctgcgaagagcttgaccgggtagtaaataaaaactgcgtcgctccttctttgggagggcacaatggttag

SEQ ID NO: 59644 - protein, 414 aa, Unknown
  Obtained from environmental sample
  DOMAIN (179)...(360): Integrase core domain
  misc_feature (1)..(414): Xaa is any amino acid
MAFTMAEKNKIKTEFARRYRKANKNEKTKILDEYLKLLGGGNRKYAIFSLNREGKKQLRLIDGKYVNVEISSKARRKRTYKPYYDDEVAQALIKLWKFFRYICGERLVPLLRENLDTISRKRRFRMSAEVKQKLKTISRATVERLLSGERKRHKLKGKSTTRKGTLLKNQIPVRVFWDWDEKKPGFCEIDTVSHDGGGEITPYCAWTVTVTDVALGWTEVRALKNKAQSWTLKAASDIYDAFPVPIRGIDSDGGSEFINQYFKKWCDERSITFTRGRSHHSNDNCFVEQKNGDVVRKTVGYARFEGDEALSALQNVYSCLNPLINYFYPTKKLVAKDKLPNGKIKKVYEKQLKTPCQRLLEHNDVSDTLKERARLIKKNLDIVHLQESLEKACEELDRVVNKNCVAPSLGGHNG

SEQ ID NO: 59645 - DNA, 711 bp, Unknown
  Obtained from environmental sample
  misc_feature (1)..(711): n is a, c, g, or t
atgacagggaaaaccgcaaaaatagagttattagccccggcaggctcccccgaggcgctggacgcggcggtcggagaaggggcggacgcggtatatctggggctgaagagctttaatgcccggttgaggagcgccaattttacgtatccgcagtttgaaggtgcacttcgttccatgcgtcggatggggaaaaaagtctacgttactgtgaatacggtttttgaacagcgcgaagccgaccgtatgtaccaattgctcaagtaccttgccgctttggggcctgacgcgcttatcgtgcaggatttcggggtggttgccatggcccgctcccagtttccttcgctgcgcctgcacgcctcaacccagatgaacatagcctcaggccggggagctaacgcactctccaaatgcggcgtctcgcgcgtggttcttgcgagggaattgagccttggcgagctgcgggatgtcaggcaggaaaccaacctggaactggaggtttttgtgcatggcgcgctgtgcgtcagcgtttccggcttgtgccttttttccagctatctgggaggcaagtccgcgaatcgcggtttatgtacccaggcttgccggaggcttttttcccgcgaagaccgtccagggcaaagcggctactatttcagccccgcggatctgcggcttttggaatgccttccagatctcgccgctgccgggggttaa

SEQ ID NO: 59646 - protein, 236 aa, Unknown
  Obtained from environmental sample
  DOMAIN (79)...(236): Peptidase family U32
  misc_feature (1)..(236): Xaa is any amino acid
MTGKTAKIELLAPAGSPEALDAAVGEGADAVYLGLKSFNARLRSANFTYPQFEGALRSMRRMGKKVYVTVNTVFEQREADRMYQLLKYLAALGPDALIVQDFGVVAMARSQFPSLRLHASTQMNIASGRGANALSKCGVSRVVLARELSLGELRDVRQETNLELEVFVHGALCVSVSGLCLFSSYLGGKSANRGLCTQACRRLFSREDRPGQSGYYFSPADLRLLECLPDLAAAGG

SEQ ID NO: 59647 - DNA, 1092 bp, Unknown
  Obtained from environmental sample
  misc_feature (1)..(1092): n is a, c, g, or t
gtgctgggcaacggcgggccgggtaccggctacggggtcgtggtgctgccctgcggctcgggcaaaaccatcgtcggtatgataatcatggccctcctgaaaaccaacaccctgatactcacgacaaatgtggcggcggttcatcaatggatggaagagctgctggacaagaccgacttgaaaagcgaggaaattgccgagtacacagggaattccaaatccgtcgccccggttaccgtggctacctatcagatcatcacatggcgccccgacagggattcggattttccgcattttaagcttttcagagaacgcgcatgggggctgatcatatatgatgaagtccaccttctgccggcgccggtgtttcgcgtaacggcggaactgcaggcggtaaggcggctcgggcttaccgccacgctggtcagggaagacggcgaagaggacgcggttttcagccttgtggggcccaagcgctacgacgtgccgtggaaggatctggaagacaagggttggatcgcaggggctttctgcaccgaagttcgcatcgatatgccggagaatctaaaaattccctacgcagtggctacccgccgcgagaagtaccgcatcgcgagcgagaacccgctgaaaaacgaagcggtcgtccaattaatcgaaaaccacctggacgatcagattcttgtaataggccagtacttaagccagcttgaaaagcttgcaaggctcctaaaagcgccgctgataaccggcaaagcgcctaacgccgaaagggaacgcatttatagcgcgtttaaaaaaggagaagtgagggtcattgtcgtaagcaaggtggccaattttgccatcgatctgccggacgcttcaatggcgattcaggtttccggttccttcggctcgcggcaggaagaggcccagcgtctggggcgcatcctccggccaaaagacaaagacgccaaacaccgtaacgcgctgttttttacccttgtctcgcgttacacggtagaggaagatttcgcggcaaaccggcataaatttctggcagagcaggggtacaaatattctattcaacactggaatacaacaaaatga

SEQ ID NO: 59648 - protein, 363 aa, Unknown
  Obtained from environmental sample
  DOMAIN (9)...(149): DEAD/DEAH box helicase
  misc_feature (1)..(363): Xaa is any amino acid
MLGNGGPGTGYGVVVLPCGSGKTIVGMIIMALLKTNTLILTTNVAAVHQWMEELLDKTDLKSEEIAEYTGNSKSVAPVTVATYQIITWRPDRDSDFPHFKLFRERAWGLIIYDEVHLLPAPVFRVTAELQAVRRLGLTATLVREDGEEDAVFSLVGPKRYDVPWKDLEDKGWIAGAFCTEVRIDMPENLKIPYAVATRREKYRIASENPLKNEAVVQLIENHLDDQILVIGQYLSQLEKLARLLKAPLITGKAPNAERERIYSAFKKGEVRVIVVSKVANFAIDLPDASMAIQVSGSFGSRQEEAQRLGRILRPKDKDAKHRNALFFTLVSRYTVEEDFAANRHKFLAEQGYKYSIQHWNTTK

SEQ ID NO: 59649 - DNA, 2088 bp, Unknown
  Obtained from environmental sample
  misc_feature (1)..(2088): n is a, c, g, or t
atgaaaaagaatatatttcgttcagttgaattctggaaggcgtcaataatgcctcttcctgaccacgctttctttgaattgttgaggaccgttttcggaaaaataaaaactccctttaacaaacaaaatctggtcgatgatcttgaaaaattccttaaaaacaatgatattcaaaaaaatattacggcttacattgacaataatgacgcgcgtattattaccgccgtagcggtactgaatgaacccactgtcgcggaactggatgctttttttgacggagacttagaccatacggaattgcaggatatagttatcaatctggaggaacgttttattcttttccgttttttggagcacgaaagccgcctcgcgctcaatccggtactggaagcggtattgtcgccatatacagatgacatatcttcattgcttccttcaatccataataaaaaacttaacaaaacgggcaaacaaaatttacctttctttgacgaccgtattctggccgccctgctttcctttgtttcccaaaatgaggcgttttttatcaaagagggtaaaatacgccaaaaagtcctgaatatggcggctagtctgttccccgcgctgcggctggaacctgttataggcggcttacaggttttggggctgtttttcgccaacggtgatacgctgcatcctgattttgcccgttttgccgctcttggaaaactcgataagctggaaagaatggaatactgcgcggcgggcattttatgttattacgactcaccggcgggcgaactgtcaccgtggctattccgctcaaagctccgcaagtatgcggcgtttattcataatttttatgcttcactcgatccaaaacaacagtaccctcttgtaacgctgcgaaggcttgtcttcatacttaataatgaaattaattgtgataagcttatcaaagcgatggagcagacgggactcttaatttccgattcaaacaagcgctggcagaagttacctcagtcttcggaagatccaacgacaaaaaaaactccgtcgggagacgcggccgtcgtcgcggtagattcgccgttcacgctgttgatgtaccccgagattgcgtataacgacgcggtggaactcgcctctatttcccatgttaccggaaccggattgaatatcagctttgaaataaacaaagacgccgcggtctcggcgtttaaccgcggcatttccgcagacgcggccatagaaattctgcagaggctgtcaggaaaccgaatcgatgaaaacacggcctttaccctgcgcgactgggaaaaacgccacaaggaagtaagcctgtgtaaagggctggtattgagcctttctcccgaacgccgctatcttgccgaaacaaaaccgctgtcaaagtatattatctcaaaacttgcgccgggaatatatatgatccccgaaaacatggaagaaaaggtatatacagccctgaaaaaagccggcatcaccattttcgcaaaaccggacagcgccggcgcgcctaacttccagaccgacgacggcgacgcattgaccgcggattcccgcgtttatttcccgcgtatatccacaccccatgctgaaaaattacggcaattcaggacggagaaaaaagaggacggaagcaattcggcgtctgatccgccgtcatccgttccggcttcgtccgccttaattgagggatttcattcgataataaacaaaatgcgccttgggaccgaacagcgggacgaactgacggcgcgtgttaaccgccggctggtgctgtgcgaagcgcagttaaaagacgccgttgtccgttatgagaaacttgaggcgcgcggtttggattataacggcaaaatcatgatcgcgaaacaggcgatagccaggaggacgccggtggaagtaagctggccgggacgccaaaaacaggaaagcgttattggaattccaaaagcgctggaaaaaaaaggtgacgaaagcgttctggtcattgaatcgccggaagggaatattatccgtattccattagggaaggtcagccttttacggcggatcaaaaaatccatttttgaaaataataactag

SEQ ID NO: 59650 - protein, 695 aa, Unknown
  Obtained from environmental sample
  misc_feature (1)..(695): Xaa is any amino acid
MKKNIFRSVEFWKASIMPLPDHAFFELLRTVFGKIKTPFNKQNLVDDLEKFLKNNDIQKNITAYIDNNDARIITAVAVLNEPTVAELDAFFDGDLDHTELQDIVINLEERFILFRFLEHESRLALNPVLEAVLSPYTDDISSLLPSIHNKKLNKTGKQNLPFFDDRILAALLSFVSQNEAFFIKEGKIRQKVLNMAASLFPALRLEPVIGGLQVLGLFFANGDTLHPDFARFAALGKLDKLERMEYCAAGILCYYDSPAGELSPWLFRSKLRKYAAFIHNFYASLDPKQQYPLVTLRRLVFILNNEINCDKLIKAMEQTGLLISDSNKRWQKLPQSSEDPTTKKTPSGDAAVVAVDSPFTLLMYPEIAYNDAVELASISHVTGTGLNISFEINKDAAVSAFNRGISADAAIEILQRLSGNRIDENTAFTLRDWEKRHKEVSLCKGLVLSLSPERRYLAETKPLSKYIISKLAPGIYMIPENMEEKVYTALKKAGITIFAKPDSAGAPNFQTDDGDALTADSRVYFPRISTPHAEKLRQFRTEKKEDGSNSASDPPSSVPASSALIEGFHSIINKMRLGTEQRDELTARVNRRLVLCEAQLKDAVVRYEKLEARGLDYNGKIMIAKQAIARRTPVEVSWPGRQKQESVIGIPKALEKKGDESVLVIESPEGNIIRIPLGKVSLLRRIKKSIFENNN

SEQ ID NO: 59651 - DNA, 1266 bp, Unknown
  Obtained from environmental sample
  misc_feature (1)..(1266): n is a, c, g, or t
ttgaagccaaaatacctaccccgcatagcggataaagtcctaaatacagcgcttgaagcctccggagcggtacttattgaagggccaaaatggtgcggaaaaaccagaactgccgaggaaaaagccgccagtactctttatatgcaagacccggatcacactgcttcctatctgcaagcggctgaaattaagccttccttattattaaatggtgatactccccggcttattgacgaatggcagatggctcctgttctttgggatgcggttcggtttgctgtggatcaacgaagagaaaaaggccaattcattttaacaggttctgccgtgccaaaagacaatgctgttcaacatacaggaaccggtcgtttttcgcggatgttaatgcgtccaatgtctttgtttgaatcgctggaatcgaatgggactatttcattaaaagccttatttgacggagttactgacggagagtgcgcctcttccctgacaattgaagctttggcgtttgctttgacccgcggcggttggcctgcttcagtaaatcaaaaagagcctgttgctttacaacgcgtatatgactatgtggatgccgtaattaatatcgacgtgtccagagttgatgatgttgaaaaaaatccggcgcgtattcgcgcattaatgcgttcattggctcgtaatgtttctacagcggcgagtattgcgacaattcgggaagatattgcgggaaatgaaggaactatttctgaaaaaacaatttctacataccttaacgctctgcgtcgaatatttgtagtggaagatttacccgcatggaatcccgctatgcgttcaaaaactgttttaaggacttcgcctaaacgacactttgtcgacccttctatcgccgctgcggtgttacgcgccggtccggacaatttattgcaggactttaacacatttggatttttatttgagtctctgtgtgtcagggacttgcgtgtttatgccgaggcaattgacggagaagtatttcattactgtgataagaacgggttggaatccgacgcaatcgttcatctgaaagatggacgatggggcgctgttgaagtaaaaatgggcgcaaaagaaatagaaaccgccgcagagaatttaaaaaaattgcgaaataaaattaatacggaaaaaatgagagagccgtcttttttaatggtactgacaggcacggactatggttacaaacgtgatgacggagtatatattataccaatcggctgtttgcgtgattga

SEQ ID NO: 59652 - protein, 421 aa, Unknown
  Obtained from environmental sample
  misc_feature (1)..(421): Xaa is any amino acid
MKPKYLPRIADKVLNTALEASGAVLIEGPKWCGKTRTAEEKAASTLYMQDPDHTASYLQAAEIKPSLLLNGDTPRLIDEWQMAPVLWDAVRFAVDQRREKGQFILTGSAVPKDNAVQHTGTGRFSRMLMRPMSLFESLESNGTISLKALFDGVTDGECASSLTIEALAFALTRGGWPASVNQKEPVALQRVYDYVDAVINIDVSRVDDVEKNPARIRALMRSLARNVSTAASIATIREDIAGNEGTISEKTISTYLNALRRIFVVEDLPAWNPAMRSKTVLRTSPKRHFVDPSIAAAVLRAGPDNLLQDFNTFGFLFESLCVRDLRVYAEAIDGEVFHYCDKNGLESDAIVHLKDGRWGAVEVKMGAKEIETAAENLKKLRNKINTEKMREPSFLMVLTGTDYGYKRDDGVYIIPIGCLRD

SEQ ID NO: 59653 - DNA, 864 bp, Unknown
  Obtained from environmental sample
  misc_feature (1)..(864): n is a, c, g, or t
ttgacgcaacgtatgaagctgcagcccttcaggggtcgaggnnaanangganacngganaagagcccctttaagaggcgcnaggnaaannaangaaacaaaaacgacgnaanaaagccgagaacacaagccgacgcggcaangactatccgagaaaggaaaacccacccacaaacgcacgcaacaggcgcggaaaaaaaccaccccgggagcacgccgggcgcaccaaaagacaggcgggacacgcaaaanaaacagagaaagagcggcnggcagcaaagcagcgggagnnagcccaggacgtagccccgcgagaacgcaaaacggacgacagcgccgcaagggaaggcgaaggacccggcacagcgggaacncattttttttgggacgagcgcgagcacctactatcgatgtggccactgatgtcgttgttggcgaaatcatagggcttccttatgaacacaaccccgttttaatggcggcaaagagacgtgaattattgcacaacatagaagatgtaaatctaattggcgaagatctttccaatttaaaaatccccgattataagtttccaacaaccggaagaggctttagcagaactgtagaaaaaaacaccgttataagaaacttgttactgtcaactttgagcaaatatcccgtagtatcaaaagaaaaatgcataggttgcggcatgtgcgcgacagcctgtccgcaaaaaatgattacaataattccgtacaaaaaaaagaaagtagccgtaataaacctaaaagactgcattcgctgttattgctgccacgaattatgtccgcataaggcgattgacatgaagagtaagttaattacgaaggtattgaaggcttag

SEQ ID NO: 59654 - protein, 287 aa, Unknown
  Obtained from environmental sample
  DOMAIN (252)...(275): 4Fe-4S binding domain
  misc_feature (1)..(287): Xaa is any amino acid
MTQRMKLQPFRGRGXXGXXXRAPLRGARXXXETKTTXXSREHKPTRQXLSEKGKPTHKRTQQARKKTTPGARRAHQKTGGTRKXNRERAAGSKAAGXSPGRSPARTQNGRQRRKGRRRTRHSGNXFFLGRARAPTIDVATDVVVGEIIGLPYEHNPVLMAAKRRELLHNIEDVNLIGEDLSNLKIPDYKFPTTGRGFSRTVEKNTVIRNLLLSTLSKYPVVSKEKCIGCGMCATACPQKMITIIPYKKKKVAVINLKDCIRCYCCHELCPHKAIDMKSKLITKVLKA

SEQ ID NO: 59655 - DNA, 627 bp, Unknown
  Obtained from environmental sample
  misc_feature (1)..(627): n is a, c, g, or t
atggaaattaaacgggctgcagaatttggagacaatattagagaaaaactaggtgaattatacgttaatgcgttttttgatgacgtattaaaatatttctcaaaaaataaaactaaactaataaaaatatttgcctgcgcttttttgcttgactgtttctatgtagcaataatagataatgaaattaccggaatggttgcctgtatgggtaaagatgaagtttgtattaaattagatttaaaaacaattgttaaatatatagggctattcgggggattaattataaatttttggctaanacagtttttaaaagtatctccaaaactcgacgaaaaaacggcattaattgaatatctggctattgatacaaaacatctaagaaaaggcattgcttcaacgcttcttaaatcattatttacattaaccgaatatgaaaattatttattagaagtaatgggaacaaatacaaaagctattaaattgtataccaaattaggttttaaaattgcatatataataccatattttccaagaatatatttaggcatgaaatatacaaaagaagaaaataatattatacgtgcaaacttcgctcacctccagaacgttaaaggccatttgccttaa

SEQ ID NO: 59656 - protein, 208 aa, Unknown
  Obtained from environmental sample
  DOMAIN (54)...(168): Acetyltransferase (GNAT) family
  misc_feature (1)..(208): Xaa is any amino acid
MEIKRAAEFGDNIREKLGELYVNAFFDDVLKYFSKNKTKLIKIFACAFLLDCFYVAIIDNEITGMVACMGKDEVCIKLDLKTIVKYIGLFGGLIINFWLXQFLKVSPKLDEKTALIEYLAIDTKHLRKGIASTLLKSLFTLTEYENYLLEVMGTNTKAIKLYTKLGFKIAYIIPYFPRIYLGMKYTKEENNIIRANFAHLQNVKGHLP

SEQ ID NO: 59657 - DNA, 357 bp, Unknown
  Obtained from environmental sample
  misc_feature (1)..(357): n is a, c, g, or t
atggcgatgatttttatttcccatgacatgaccgttgtagagtacttctgcgacagggttgcggttatgtatctgggcaaaataatggagttgattcccgcgtctgaattgtcaaataacgcaatgcatccttatacccgttccctaagggcaagcgcgccgaggcttgatgtttttaaggactccgtcaaagaaatggaagttccgcaaattagcggagaaacgccaaatccacaggcgattattaaaggctgtccttttgccccacgctgtccgcaggcaacaccccaatgcgctgaagctttaccggaacttagggaagtttcagatggacattgggtaagatgccatttataa

SEQ ID NO: 59658 - protein, 118 aa, Unknown
  Obtained from environmental sample
  DOMAIN (29)...(98): Oligopeptide/dipeptide transporter, C-terminal region
  misc_feature (1)..(118): Xaa is any amino acid
MAMIFISHDMTVVEYFCDRVAVMYLGKIMELIPASELSNNAMHPYTRSLRASAPRLDVFKDSVKEMEVPQISGETPNPQAIIKGCPFAPRCPQATPQCAEALPELREVSDGHWVRCHL

SEQ ID NO: 59659 - DNA, 621 bp, Unknown
  Obtained from environmental sample
  misc_feature (1)..(621): n is a, c, g, or t
atgctgtcatcattatggagacgcatcatgttagaagtaagagacttaaagaaatattttgagttaagcgacggtcggcggattcgggcggtagacggggtatcctttcaagtacaggagaatgaagtcttaggtgtagtcggggagtccggctgcggaaaatctacactgggcaggcttatccttagactgattgagccggactcaggacaagtgtatttcgacggcgaagaaatcacttccttcaaccggaacgctttacgtctcaaacgcagagcgatgcagatggtttttcaaaatcctttttcttcttttaacgccaagatcagcatcggcggagcacttatggaagtgtgccgtttttatggcatgagtattcccgaaagccgcgaaaaaattgagcggctgttaagtgatattggcctatccaatgacatgcttaaccgctggccgcgtgaactttcgggcggacaacttcaacgccttgccatcgcaagggctatcatggagagccttccctgcttattgccgatgaacctctgtccgccctggacgtatcagttcaagcccagcttctcaatctgcttgatgatattcgctccagccgttccatggcgatga

SEQ ID NO: 59660 - protein, 206 aa, Unknown
  Obtained from environmental sample
  DOMAIN (41)...(191): ABC transporter
  misc_feature (1)..(206): Xaa is any amino acid
MLSSLWRRIMLEVRDLKKYFELSDGRRIRAVDGVSFQVQENEVLGVVGESGCGKSTLGRLILRLIEPDSGQVYFDGEEITSFNRNALRLKRRAMQMVFQNPFSSFNAKISIGGALMEVCRFYGMSIPESREKIERLLSDIGLSNDMLNRWPRELSGGQLQRLAIARAIMESLPCLLPMNLCPPWTYQFKPSFSICLMIFAPAVPWR

SEQ ID NO: 59661 - DNA, 987 bp, Unknown
  Obtained from environmental sample
  misc_feature (1)..(987): n is a, c, g, or t
gtgaaatcaatggaaactgattgtctctccatagaaaacctttcctgcgatttccttaccattgaagggattgtgtatgctttaagcggggtaaatctgcaattaaagcgcggagagattcacggtcttgtcggagagtcgggatgtggaaagagcgttacatcccgcgccattcttggtcttgttgataaaaaacatacccgcatgaggggactaatccgctttgacgaaaaaaatcttttgtctctgccggaaagggaaatgcgcttcatacgcgggaaacgtatttccatgattttccaagacccgctcaattccctttcgccactggagactgttggcagtcagattgaggaagccatgaccaatcatttagatttagatcgggcaaaactgcgccaccgtaccgcttttcttttggaaaaagtaggacttcatcccgatacaagccggcagtacccatttgaactttccggcggaatgcagcaacgggtaatgatcgcccaggcgataagttgcaaccctgaactgcttatcgccgatgagccgactaccgcccttgaccttaccattcaggcgcaggtgttggagcttcttaaaagtttgcaaaaagaacttgctcttaccgtactgcttatcacgcacaatttcgcactggttacggaaaactgcgatagggcgtcggtaatgtacgcagggcatattgtcgagacagcgccggcaagaagcctgattgaatcagccgcccatccttacacaaacgcgttgatcaactgcataccccgatcaaataccgcagggaaccgtcgggaaaaacttccggtaatttcaggttctcctccaagactctacgctccgcttgatgggtgtccatttgttcctcgttgccccagagcggataaggcttgcgcacggatgccggcggttacggatcttggtgagggaagatcggtatgctgtcatcattatggagacgcatcatgttag

SEQ ID NO: 59662 - protein, 328 aa, Unknown
  Obtained from environmental sample
  DOMAIN (236)...(303): Oligopeptide/dipeptide transporter, C-terminal region
  misc_feature (1)..(328): Xaa is any amino acid
MKSMETDCLSIENLSCDFLTIEGIVYALSGVNLQLKRGEIHGLVGESGCGKSVTSRAILGLVDKKHTRMRGLIRFDEKNLLSLPEREMRFIRGKRISMIFQDPLNSLSPLETVGSQIEEAMTNHLDLDRAKLRHRTAFLLEKVGLHPDTSRQYPFELSGGMQQRVMIAQAISCNPELLIADEPTTALDLTIQAQVLELLKSLQKELALTVLLITHNFALVTENCDRASVMYAGHIVETAPARSLIESAAHPYTNALINCIPRSNTAGNRREKLPVISGSPPRLYAPLDGCPFVPRCPRADKACARMPAVTDLGEGRSVCCHHYGDASC

SEQ ID NO: 59663 - DNA, 897 bp, Unknown
  Obtained from environmental sample
  misc_feature (1)..(897): n is a, c, g, or t
gtggttaaaatgcttaaaccgtatgatttgctcgaaaatatactactggatattgaaaacggcgtcaagaacaatataaatttgtctattctctccaaaaaatacgatttctcggaaggtcatttgcgcagattattcagatttgccttcaaacaatctatcgccgcttatatacgttcccgtatattagcggcaagcctaaacgatatactagagactaataccaacattgttgatattgcggttgaatacggttttgaatatgaacagtcgtatatcaggactttcaagcgtgaatttggaataacccccggcgacttgcgtaaaacagggaaaattataaaaatcaagccgccttttcatcttttcgataaaaaaaaggtggataacggagttttatttggacccgattttgtaatggttccgcggtttcatattataggtaaaagccaccgtttatcatttaaagatttatgtacggaaccgttactgtcaaagcaatttttggaaaatgaacgcaagcaaataaagaaaactgtaaatgccaatgtatttatcggcttaacctgtaacattaatatggaagaaggatgttttgattatataccttcggtacaggttgcaaatttaaaaaatatatcctatggactttgcggcaatactttcgagacttcaatatgcgccagattccgttatattggtcaacatcattattatgatactaatgaaaatgtcgtgtctatgatatataacgttattagtaattttgcacaaaatgaacaaacgagatatgttttatcaaatgataaaatctactttgtgatgatagacacaaggctttatgacggaacttattgtcaaatagaatggtatactcctgtctctgaaaaacggtaa

SEQ ID NO: 59664 - protein, 298 aa, Unknown
  Obtained from environmental sample
  DOMAIN (65)...(109): Bacterial regulatory helix-turn-helix proteins, AraC family
  misc_feature (1)..(298): Xaa is any amino acid
MVKMLKPYDLLENILLDIENGVKNNINLSILSKKYDFSEGHLRRLFRFAFKQSIAAYIRSRILAASLNDILETNTNIVDIAVEYGFEYEQSYIRTFKREFGITPGDLRKTGKIIKIKPPFHLFDKKKVDNGVLFGPDFVMVPRFHIIGKSHRLSFKDLCTEPLLSKQFLENERKQIKKTVNANVFIGLTCNINMEEGCFDYIPSVQVANLKNISYGLCGNTFETSICARFRYIGQHHYYDTNENVVSMIYNVISNFAQNEQTRYVLSNDKIYFVMIDTRLYDGTYCQIEWYTPVSEKR

SEQ ID NO: 59665 - DNA, 1197 bp, Unknown
  Obtained from environmental sample
  misc_feature (1)..(1197): n is a, c, g, or t
atgcttgataatatcgatttccgagggctaccccaggacgaggttgttgggcaaggcggcctgataaagcagctgacaggaaggatacttcagaaggccctggaagcggaaatgacggagcatctcgggtatgagaagaattccaacgccggggacaacagcgggaacagcaggaacgggcatacggaaaagacagtcctgctggagaaccaaagcgcgacgatagaagtcccgcgagacaggaacggcacgttcgagccaatcatagtccccaagcacgaaaagaggctgccgctgttcaacgaccaaatcatctcgatgtattcgtttgggatgaccgacagggacataaaatcccaccttgaaaaaatatacaacgtcgaagtgtcgccggatctgataagccgcgtaacgaacgcggtattggaagacgtaagggaatggcaaagtcggcctttggaaaaatcgtacgcgatagtgtacttggacgcgctgagggtaaaaggcaaaacggacgggaaaagctgccagaagagcgtttatacggccctggcggtcaatttcgagggaaaaaaggaggtattggggctttggatagcggaaagcgaaggggcgaagttttggatgggcgtgctggccgagcttaaaaaccgcggcctccaggacatcctcatagcctgcatggacgggctcacaggcttccccgaggcggtgcgggcggtgtaccccgacacccgcgtgcagctgtgcatcgtccacatggtccgcaattctaccaagttcgtttcgtacaaggaccttagaaaagtatgcgcggatttgaaaacggtctattccgccccgaccgaggaatcaggccgcgcggccctggaagaatttagaaaaacgtgggacggcaaataccctatgatttaccagtcgtgggatcataggtgggatgacttgagcgagttttttaaatatcccgacgagatccgccgggctatttatacgactaacgctattgaatcgctaaattaccagctgcggaaagtaacaaaaaaccgttcgacattttcgacagacgatgctatatttaaaatactgtatttggcggttcggaatgcgtctgagaaatggacgatgccgataagggactgggggcaggcattaaaccagtttgccgttgagtttggaaaagagcgggttccgttctaa

SEQ ID NO: 59666 - protein, 398 aa, Unknown
  Obtained from environmental sample
  DOMAIN (1)...(376): Transposase, Mutator family
  misc_feature (1)..(398): Xaa is any amino acid
MLDNIDFRGLPQDEVVGQGGLIKQLTGRILQKALEAEMTEHLGYEKNSNAGDNSGNSRNGHTEKTVLLENQSATIEVPRDRNGTFEPIIVPKHEKRLPLFNDQIISMYSFGMTDRDIKSHLEKIYNVEVSPDLISRVTNAVLEDVREWQSRPLEKSYAIVYLDALRVKGKTDGKSCQKSVYTALAVNFEGKKEVLGLWIAESEGAKFWMGVLAELKNRGLQDILIACMDGLTGFPEAVRAVYPDTRVQLCIVHMVRNSTKFVSYKDLRKVCADLKTVYSAPTEESGRAALEEFRKTWDGKYPMIYQSWDHRWDDLSEFFKYPDEIRRAIYTTNAIESLNYQLRKVTKNRSTFSTDDAIFKILYLAVRNASEKWTMPIRDWGQALNQFAVEFGKERVPF

SEQ ID NO: 59667 - DNA, 732 bp, Unknown
  Obtained from environmental sample
  misc_feature (1)..(732): n is a, c, g, or t
gtggacgatgcacagctgcacgcgggtgtcggggtacaccgcccgcaccgcctcggggaagcctgtgagcccgtccatgcaggctatgaggatgtcctggaggccgcggtttttaagctcggccagcacgcccatccaaaacttcgccccttcgctttccgctatccaaagccccaatacctccttttttccctcgaaattgaccgccagggccgtataaacgctcttctggcagcttttcccgtccgttttgccttttaccctcagcgcgtccaagtacactatcgcgtacgatttttccaaaggccgactttgccattcccttacgtcttccaataccgcgttcgttacgcggcttatcagatccggcgacacttcgacgttgtatattttttcaaggtgggattttatgtccctgtcggtcatcccaaacgaatacatcgagatgatttggtcgttgaacagcggcagcctcttttcgtgcttggggactatgattggctcgaacgtgccgttcctgtctcgcgggacttctatcgtcgcgctttggttctccagcaggactgtcttttccgtatgcccgttcctgctgttcccgctgttgtccccggcgttggaattcttctcatacccgagatgctccgtcatttccgcttccagggccttctgaagtatccttcctgtcagctgctttatcaggccgccttgcccaacaacctcgtcctggggtag

SEQ ID NO: 59668 - protein, 243 aa, Unknown
  Obtained from environmental sample
  misc_feature (1)..(243): Xaa is any amino acid
MDDAQLHAGVGVHRPHRLGEACEPVHAGYEDVLEAAVFKLGQHAHPKLRPFAFRYPKPQYLLFSLEIDRQGRINALLAAFPVRFAFYPQRVQVHYRVRFFQRPTLPFPYVFQYRVRYAAYQIRRHFDVVYFFKVGFYVPVGHPKRIHRDDLVVEQRQPLFVLGDYDWLERAVPVSRDFYRRALVLQQDCLFRMPVPAVPAVVPGVGILLIPEMLRHFRFQGLLKYPSCQLLYQAALPNNLVLG

SEQ ID NO: 59669 - DNA, 1128 bp, Unknown
  Obtained from environmental sample
  misc_feature (1)..(1128): n is a, c, g, or t
ttggccgagaatgcgaggtttgcaatgagcgcgtcactggtttattttaccgacatgagaacaaaaatggacgaaagtcttctggttaaaatggaacgccttataaaaaaagccggtatagccggaattgattttaaacaaaaatatgtcgccataaaaatacattttggagaaccggggaatctgtcgttcctgcggcccaatttcgcgaaagtagttgttgacatgataaaatcactgggcggaatgccgtttctgacggactgcaacactttatatgtcgggcgacgcaatcagggtttgaatcatctggacgccgccgctgaaaacggctacactccgctgtctaccggttgtcagaacattatcgccgacggcatacgcggcacagatgatgtggacgtgccggttaaaggcgggaaatactgtaaaaccgcccatatcggcaaggccataatggacgcggatattgttgtctcgttgaaccatttcaaggggcacgagggaaccggcttcggcggcgcaattaaaaatctcggtatgggatccggcagcagggccggcaagatggcaatgcacaacgacggcaaacctcaggttaacaaaaaagcctgcgttagctgtaaaatctgcgcccgtttctgcgcccacgacgctatcgtttttgacgacggcaaagctttcattgaccataaaaaatgtgcgggctgcggacgctgcataggttcatgcagtaaaaacgccattggaaccaactgggacaccaacaatcaaatgctttgctgtaaaatagtcgaatacgcaaaagctgtgcttgacggccgcccgaatttccacattaatgtcgtaaaccaggtttcaccctactgcgactgccacggcgacagcgacgccgcagtgattcccgacatcggcatctttgcgagtttcgatccggttgccctggacaaagcctgcattgacgcggtaaaacgccgcccccggtatcaaaaccagcattatcggcgagcgcaaatgcgaccacaaagacgcagccggcaacgacgatcattttaccaacatccaccccacaaccgactggcgcgatcagattgcctatgcggaaaaaatcggactgggcagcggtga

SEQ ID NO: 59670 - protein, 375 aa, Unknown
  Obtained from environmental sample
  DOMAIN (198)...(221): 4Fe-4S binding domain
  misc_feature (1)..(375): Xaa is any amino acid
MAENARFAMSASLVYFTDMRTKMDESLLVKMERLIKKAGIAGIDFKQKYVAIKIHFGEPGNLSFLRPNFAKVVVDMIKSLGGMPFLTDCNTLYVGRRNQGLNHLDAAAENGYTPLSTGCQNIIADGIRGTDDVDVPVKGGKYCKTAHIGKAIMDADIVVSLNHFKGHEGTGFGGAIKNLGMGSGSRAGKMAMHNDGKPQVNKKACVSCKICARFCAHDAIVFDDGKAFIDHKKCAGCGRCIGSCSKNAIGTNWDTNNQMLCCKIVEYAKAVLDGRPNFHINVVNQVSPYCDCHGDSDAAVIPDIGIFASFDPVALDKACIDAVKRRPRYQNQHYRRAQMRPQRRSRQRRSFYQHPPHNRLARSDCLCGKNRTGQR

SEQ ID NO: 59671 - DNA, 426 bp, Unknown
  Obtained from environmental sample
  misc_feature (1)..(426): n is a, c, g, or t
atggacgccgcccgcaaggcccttatcctcgcccgcgagatcggtatgcagcttgagtttgccagcgtggagatagagccgatactgcccaaggactgtttcagcgtaaaaaatgtcgacgctttctttgccgaactggaaaaatcggatgacgctttcgagaaacgccgcgcccaggcggccgcaaagggaatggccctgcgttatgtagcggttattgaggaaggcaatgtaaaacttgccctcagatccgaaccggcgaacagccccttccgcgccttgacggacagcgacaatatggtggtgatcaccaccgatcgttattcgaaactgcctatggtaatcaaggggccgggcgccggcgcgcaggttaccgcgggcggagtttttgccgacatcgtgagggtgtcaagaacgctagtatag

SEQ ID NO: 59672 - protein, 141 aa, Unknown
  Obtained from environmental sample
  DOMAIN (1)...(134): Homoserine dehydrogenase
  misc_feature (1)..(141): Xaa is any amino acid
MDAARKALILAREIGMQLEFASVEIEPILPKDCFSVKNVDAFFAELEKSDDAFEKRRAQAAAKGMALRYVAVIEEGNVKLALRSEPANSPFRALTDSDNMVVITTDRYSKLPMVIKGPGAGAQVTAGGVFADIVRVSRTLV

SEQ ID NO: 59673 - DNA, 789 bp, Unknown
  Obtained from environmental sample
  misc_feature (1)..(789): n is a, c, g, or t
ttggacctgcatgagtgtccggggcatgatttttcagaagcggctaaaacgcctgttcaaaagcttttctccggcgacgatacctatatcaaaaaaaccgaaaaaatctgggcttgccttgcggagcgttacgcaggcaatgatcatgttctctttgaaacgcttaacgagcctgtcgcccccgctcctgatatttggaacaatgtaaaagacaggctatgccgcgaaatacgcaaacacgcgcctaagtcaacgataatgaccggttccaacatgtggaacgttccggctacattcggcttccttactccctttgacgacgaaaacatgatctactgcgtgcatttttacgagccgcttctttttacccaccagaacgcgccctggattgataatcctgaaattaaaatcccaagaccgtaccccggcgattacggccccggcattgtccgccaatacgggcatgcgcattcggacggcatttgggacaaacagcggctggtgaatgaatttacccctgtaaacacattcaggaaaaaatacaacgcgcaggtaatctgcaacgagttcggcgtttacacgcccgtcgagcttcaatcccaactgcgctggtatgatgaccttctttcggttcttaaggaaatggagataggtttctcttactggaactataaaaacctcgattttggcattatttccataggggaaaaactgcatgaaaacctgccccagtacaacaacagcgaaaggataaatcatccggttcttgaggtgttaagaaaatattga

SEQ ID NO: 59674 - protein, 262 aa, Unknown
  Obtained from environmental sample
  DOMAIN (1)...(232): Cellulase (glycosyl hydrolase family 5)
  misc_feature (1)..(262): Xaa is any amino acid
MDLHECPGHDFSEAAKTPVQKLFSGDDTYIKKTEKIWACLAERYAGNDHVLFETLNEPVAPAPDIWNNVKDRLCREIRKHAPKSTIMTGSNMWNVPATFGFLTPFDDENMIYCVHFYEPLLFTHQNAPWIDNPEIKIPRPYPGDYGPGIVRQYGHAHSDGIWDKQRLVNEFTPVNTFRKKYNAQVICNEFGVYTPVELQSQLRWYDDLLSVLKEMEIGFSYWNYKNLDFGIISIGEKLHENLPQYNNSERINHPVLEVLRKY

SEQ ID NO: 59675 - DNA, 888 bp, Unknown
  Obtained from environmental sample
  misc_feature (1)..(888): n is a, c, g, or t
gtgaaggcctgggtctccataaaccgcataaaggcgatgctttatgaaataaccggcggggcaatcgatctgtccgagggcactattgtgaattggaacaaggaattaagcggcaaattagcgtcatttatcgagaaaatgaaggaaaagctgctggcgcagcctgttttgcggaaagacgagacagggatcagagttgccaacaagctgcaatggcttcacgtgctgagtaatgaggcgtatacgctgtatttttcccataagaagcggggcaatgaagcggacaaggaaatcggtatactgcccatgtacagcggggttctggtacacgatcacctcaaagggctgtacagtttcccttgcgaacatgcggaatgcaacgtgcatattttgcggtatttgaaatctgcggcggaaacaaataaatgcgtgtgggcgtcttccatgatagcgcttttggttgatgccaacaataccgtgaaagaccataaggcaaagaatattcccgcgcttgacagtgcgctgctggccgaataccgcgcccgttacgataagattcttgaacaggggcgtcttgagttttttcaatgcgggaggaaggattacaacagtgaagacatgaagcttttgcggagactggaggaatataaaagcgaacacctgaggttcctgtcagatttccaggttccgtttgacaacaatcttgcggagcgggatctgaggatgataaagagcaagacgaaagtgtccggctgttttaggggcaatgagggcggcaccgtttttgcaaatatcaaaagctatatctcaactttgaaaaagaatgccaagaatactttcgacggcttaaaaaatgccttcttgtgtgtacctttttcctgggtttga

SEQ ID NO: 59676 - protein, 295 aa, Unknown
  Obtained from environmental sample
  misc_feature (1)..(295): Xaa is any amino acid
MKAWVSINRIKAMLYEITGGAIDLSEGTIVNWNKELSGKLASFIEKMKEKLLAQPVLRKDETGIRVANKLQWLHVLSNEAYTLYFSHKKRGNEADKEIGILPMYSGVLVHDHLKGLYSFPCEHAECNVHILRYLKSAAETNKCVWASSMIALLVDANNTVKDHKAKNIPALDSALLAEYRARYDKILEQGRLEFFQCGRKDYNSEDMKLLRRLEEYKSEHLRFLSDFQVPFDNNLAERDLRMIKSKTKVSGCFRGNEGGTVFANIKSYISTLKKNAKNTFDGLKNAFLCVPFSWV

SEQ ID NO: 59677 - DNA, 2253 bp, Unknown
  Obtained from environmental sample
  misc_feature (1)..(2253): n is a, c, g, or t
atgacgcgacccgcgtttaccaaggccattaccggcgcgcacaaagaacccggcgcaataacttatcatagcagtaatgaaagtgtcgccacggtggacagcgccggaacggtanccattcatgcagtcagttccaccgtcatttccgcagagaaagcggctgacgataaatacgcccacgctataacaacttacactctgacggttaattacaagcccggttcggaagaaaatcccttcctcgttaccaacgaagccgatctccgcaaagtcggaacaggcactgacggctgggtgctttcggcgcactacaggcagacagcggacatcgccatgacgggaggtaacttcacgacgattggcgataacaccaacagattcttaggcgtgtatgacgggaacggaaaaaccatcactggcttgacccaagttaccacgagcagttatgccggtttctttggcgctatcgacgcaggcggcacggtgaaaaacgttaccgtaaccggcacgataaaccaaaacggaagcagtacctcgtataccggcggcattgccggagttaatggcggtacgattgacaactgtttctttaacggaaacgtcaacggcaacacaaccagcgatgatgtcggcggcattgtaggaatgaacagcggcacggtgataaacagcagaagcaacgcaacggtaagcggcaggacacgggtcggcggcattgccggatcgaataacggcaaaatcgacaactgttacaacacgggagccgttaccggcagtcagcaagtcggcggtatcgccggcggtagttccaacagcggtaattatgtaaagaactgctataacacaggcaatgttaccgccaccaccactaccaccaccgctaatgccggcggcattgtcgggcaatcaagcgcgctgatagaattctgctacaataccggcaatgtttccggtacaaacaatatcggcggcatagtgggatacatcaactccggatgcaccattcaaaactgcgtatcgctcggtcttaaagtaaacggcactgccgccggtcgcataggcggaactaataacggcggcactaccaccgccaacttagcccgtcaagatatgaaaactggtccggtcggttcggaagcaatagtaacaacaggagcggcaggcaatatggcgggcgcaaatgtcagtttggggactgcattgtccactgttttcaacacaaactggctttcatcgctttggaatatcagcggcgatttgactttgggcggcgatttgcccacgctcaaaacaaacacgcaaatccccgctcccacgcttcctgtggaactcggctcggcggaagctcccttcctcgttaccaacgaagccgatctccgcaaggtcggaaccggcactgacggctggacgctttcggcgcactacaggcagacggcgaacatcatgctgaccagcagttttacgaggattggcaataacacgaacaaattcacaggctcatatgacgggggcgagtatgccataaccaatttgagcatgactatcgccagcagttatacaggtttattcggctatatcggcgcaagcggcacggtgaaaaacgtaaatgtaacaagcggcacaataaacgtaagcacaggcagttatgtgagtatcggcggcattgcgggcgaaaacgaaggcactattgacaactgctcctttagcggaactttgagcgtcagtccgcacgatcagattggcggcattgtcggacagaataacggcacggtgaaaaacagcagaaacttcgccaatgtaaccggcggaaatcaggtcggcggcattacgggaacgaatcagggcaaactcgacaatagttacagcaccggaacagtcagaggaagccagcaagtcggcggtatcgccggtactaatgtcggcagcggtaattatataaagaactcctataacacgggcaatgttaccagcaccgccggaacaagctctaatgtcggcggcattgtcgggtataaccaatcaaacacggcggtagacttctgctacaataccggcaatgttaccggatcaaccgcagtcggcggcatagtagggaactccagcggcagtagagtagtagacaacgtatcgctcggcttactgataaccggcactggcgtaactgttcaaacccaggaaaaaggtacacacaagaaggcattttttaagccgtcgaaagtattcttggcattctttttcaaagttgagatatag

SEQ ID NO: 59678 - protein, 750 aa, Unknown
  Obtained from environmental sample
  DOMAIN (177)...(202): The GLUG motif
  misc_feature (1)..(750): Xaa is any amino acid
MTRPAFTKAITGAHKEPGAITYHSSNESVATVDSAGTVXIHAVSSTVISAEKAADDKYAHAITTYTLTVNYKPGSEENPFLVTNEADLRKVGTGTDGWVLSAHYRQTADIAMTGGNFTTIGDNTNRFLGVYDGNGKTITGLTQVTTSSYAGFFGAIDAGGTVKNVTVTGTINQNGSSTSYTGGIAGVNGGTIDNCFFNGNVNGNTTSDDVGGIVGMNSGTVINSRSNATVSGRTRVGGIAGSNNGKIDNCYNTGAVTGSQQVGGIAGGSSNSGNYVKNCYNTGNVTATTTTTTANAGGIVGQSSALIEFCYNTGNVSGTNNIGGIVGYINSGCTIQNCVSLGLKVNGTAAGRIGGTNNGGTTTANLARQDMKTGPVGSEAIVTTGAAGNMAGANVSLGTALSTVFNTNWLSSLWNISGDLTLGGDLPTLKTNTQIPAPTLPVELGSAEAPFLVTNEADLRKVGTGTDGWTLSAHYRQTANIMLTSSFTRIGNNTNKFTGSYDGGEYAITNLSMTIASSYTGLFGYIGASGTVKNVNVTSGTINVSTGSYVSIGGIAGENEGTIDNCSFSGTLSVSPHDQIGGIVGQNNGTVKNSRNFANVTGGNQVGGITGTNQGKLDNSYSTGTVRGSQQVGGIAGTNVGSGNYIKNSYNTGNVTSTAGTSSNVGGIVGYNQSNTAVDFCYNTGNVTGSTAVGGIVGNSSGSRVVDNVSLGLLITGTGVTVQTQEKGTHKKAFFKPSKVFLAFFFKVEI

SEQ ID NO: 59679 - DNA, 531 bp, Unknown
  Obtained from environmental sample
  misc_feature (1)..(531): n is a, c, g, or t
atgtcttcattaaacctggacgactatatcagaaaagtgccggatttccccaaaaagggaattcttttttatgacatcacaagcattctggcgtcccctgaagcttttctttactgcatagaccgcatggtagaaatttacaaagacaagaagatagacgccattgccgcgatagaagcccgcggttttctatttgccgcccctttcgcgattcgtcttggcattccgttaattcccatacgcaaaaaaggcaaactccccggcgttactctttctaaaaaatacgatcttgaatacgcgcaggctgaaattgaagtccattcatcggacgttccgaagggcaaacgcgtcttacttaccgacgacttaatcgctacaggcggcacgcttaacgcggcgagatcccttcttgtcgaaggcggggcgcaagttccggaaattttcggcatattggggcttccgtttcttaatttcaagaaagtgctcgatcctactcctgttactacgttgattgattatcaagctgagtga

SEQ ID NO: 59680 - protein, 176 aa, Unknown
  Obtained from environmental sample
  DOMAIN (25)...(161): Phosphoribosyl transferase domain
  misc_feature (1)..(176): Xaa is any amino acid
MSSLNLDDYIRKVPDFPKKGILFYDITSILASPEAFLYCIDRMVEIYKDKKIDAIAAIEARGFLFAAPFAIRLGIPLIPIRKKGKLPGVTLSKKYDLEYAQAEIEVHSSDVPKGKRVLLTDDLIATGGTLNAARSLLVEGGAQVPEIFGILGLPFLNFKKVLDPTPVTTLIDYQAE

SEQ ID NO: 59681 - DNA, 414 bp, Unknown
  Obtained from environmental sample
  misc_feature (1)..(414): n is a, c, g, or t
atgggagtttttagttcgattaaagaaaagattttcgggaaagccgcggaaactccaaaaacttctacgccgtcaatggcgccggcaggggcgacggctgctgcgatagcgcaagcggcagggcaggcggcgttggcgagagaggcggcaagagtagtggatgtcgaggctattcttgaaaatgccgtaaaggcaaaaggaataaagcttaactggcgcacgtctatcgtcgatttaatgaaagcgcttgatctggacagcagtttagccgcgcgcaaggaacttgccgcagaactgaactacacaggttccgatcccgacggttccgccgagaaaaacatctggctgcacaaggcattgatgaaaacactcgcggaaaacggcggcaagataccgcaggatttattgaaataa

SEQ ID NO: 59682 - protein, 137 aa, Unknown
  Obtained from environmental sample
  misc_feature (1)..(137): Xaa is any amino acid
MGVFSSIKEKIFGKAAETPKTSTPSMAPAGATAAAIAQAAGQAALAREAARVVDVEAILENAVKAKGIKLNWRTSIVDLMKALDLDSSLAARKELAAELNYTGSDPDGSAEKNIWLHKALMKTLAENGGKIPQDLLK

SEQ ID NO: 59683 - DNA, 648 bp, Unknown
  Obtained from environmental sample
  misc_feature (1)..(648): n is a, c, g, or t
gtgattcatcccgatccttcaaagattgaaagaacgcttgtaattattaagcccgataactggacgcataattcatcgcggccgggcgcgattatagacatgttttcacgcaccggccttcgaattataggaatgaaaatccatcatttctcattatctgaagcgctggatttttacggacctgtggaaaacgtacttatagataaattatcatcaagtttcgggaataaggcaaaagagattttggaaacagaattcgacataaaaacaagcaaagaaacagcaaatgtattaattaatgattttggagttcaatgcgcgaaaaaacaattccatgacattattgaatttatgtcaggcaggcgtcccggagcttatcacgaagatgacatgaaaaaaccggggcaggttaaatgcatgataattgtttatgaaggcgagaacgctgttcataaaatacgcgatgttttaggttcaacggatccgacaaaagccacgaatggcacagttcgcagagaattcggcagcaatgtaatggttaacacggcgcacgcttcggattcaaaagaaagttatgaacgcgagcagaagattgtaaggattaatcataattcagtggcttcgataataaaagaaaaccttggatag

SEQ ID NO: 59684 - protein, 215 aa, Unknown
  Obtained from environmental sample
  DOMAIN (10)...(198): Nucleoside diphosphate kinase
  misc_feature (1)..(215): Xaa is any amino acid
MIHPDPSKIERTLVIIKPDNWTHNSSRPGAIIDMFSRTGLRIIGMKIHHFSLSEALDFYGPVENVLIDKLSSSFGNKAKEILETEFDIKTSKETANVLINDFGVQCAKKQFHDIIEFMSGRRPGAYHEDDMKKPGQVKCMIIVYEGENAVHKIRDVLGSTDPTKATNGTVRREFGSNVMVNTAHASDSKESYEREQKIVRINHNSVASIIKENLG

SEQ ID NO: 59685 - DNA, 699 bp, Unknown
  Obtained from environmental sample
  misc_feature (1)..(699): n is a, c, g, or t
atgaagttaaagaatatagcctgtctttcattgtttttgctttttgtatcgacccctttattaacaggtgaagttccacatgatgaaattgtttacataaccaacactggcaggatgtaccatagagagacttgttcatatttaagcagttcaaaggttgctatctctttagtggaagcagccaaatcttacaccccatgttctgtctgtaagcccccggttatagaagctaaagacatcaggattaacaacggtgaattataccgggttaatatttttgggcttagaaattcttatgatgccaatattgactttatgctcaaagccagggttatagagcatatagacggcgatacggtcagagtaagaatttcagacccgccaaaagacctttccgcagtagaaactatacgccttttaggtgtagacacacctgaaactgtacatcctaaccagacagttcaacaattcggaaaagaagcaagcgattatactatgaaaaaccttctgggccaggatgtgtatttggcttttgattgggatcttcgggataggtataaccgccttctggcctatatttatacttatacaggacaatgttttaacgtggctctgattcaggaaggctttggtcacgtttacttgcaatacccctttcaattcatggaagagttaagacttgaaaggaactctcgataa

SEQ ID NO: 59686 - protein, 232 aa, Unknown
  Obtained from environmental sample
  SIGNAL (1)...(22)
  DOMAIN (105)...(231): Staphylococcal nuclease homologue
  misc_feature (1)..(232): Xaa is any amino acid
MKLKNIACLSLFLLFVSTPLLTGEVPHDEIVYITNTGRMYHRETCSYLSSSKVAISLVEAAKSYTPCSVCKPPVIEAKDIRINNGELYRVNIFGLRNSYDANIDFMLKARVIEHIDGDTVRVRISDPPKDLSAVETIRLLGVDTPETVHPNQTVQQFGKEASDYTMKNLLGQDVYLAFDWDLRDRYNRLLAYIYTYTGQCFNVALIQEGFGHVYLQYPFQFMEELRLERNSR

SEQ ID NO: 59687 - DNA, 399 bp, Unknown
  Obtained from environmental sample
  misc_feature (1)..(399): n is a, c, g, or t
atgtggcatccaaagatggaggaatttgacaacagaatgaaaaagcttttcgatgaagttgataattttattgaagaccaatatggcggcagttacagcctgcatccagtgcgtccggcgcggggcgaaacaaccaacccggaagcggacggccttttcaacataggcgcgatctttacacccggttacggatcggaactgggccgcggctatctcattgatgtatcaatggttaccatggataaagtgnataacaatgtccgccgtgaaatctacgaagctgcggcgancaaggtaaaggaactcctgccccttcactttcctgaacgtgaacttaccgtcaggcgtgatagaaatcatttcaagatacaaggcaattttagcctgggggaagcttga

SEQ ID NO: 59688 - protein, 132 aa, Unknown
  Obtained from environmental sample
  misc_feature (1)..(132): Xaa is any amino acid
MWHPKMEEFDNRMKKLFDEVDNFIEDQYGGSYSLHPVRPARGETTNPEADGLFNIGAIFTPGYGSELGRGYLIDVSMVTMDKVXNNVRREIYEAAAXKVKELLPLHFPERELTVRRDRNHFKIQGNFSLGEA

SEQ ID NO: 59689 - DNA, 1083 bp, Unknown
  Obtained from environmental sample
  misc_feature (1)..(1083): n is a, c, g, or t
ttgtattataatctggttatgaaagttctatttataggcggaaccggcactatcagtaccgcgatttcaaaatgggttctggaaaagggatgggagctttatcttctcaaccgtggaaaccggaacagggagcttgaagcggcgaacaaggccggaaaactcatcgagataacctgcgatatcaggacagaggacgaggcggcaatatccgccaagattaaaaaggctctggcggactgcggaagcaaagcttttgatgtggtcgcagatttcatcgcttttactccggcacatgtcgagaaagatttcaggattttcaacgggttgtgcaaacagtatttttttatctcttccgcgtccgcctaccagaagcccctttcttcataccttattaccgaaagcaccccgctggcaaatcccttctggcagtattccagagacaaaattgcctgcgaggatttccttatgcaaaagtacagggaatgcagctttcctgtcaccctaatacgcccaagccacacctacgatgaacgcagcgtccctgtgggagtacacggcgcgaacggaagctggcaggtagtaaagcgtatgcttgaaggcaaaccagtgatcattcacggcgacggaaccagcctctggactatgacgcataacagtgattttgcgcgcgcttttaccggactcatgggcaacattcacgcaatcggggaagcggtgcagatcacttcggacgaaagccttagctggaaccagatttaccaggccatcgccgacgcgctcaatgtagaacttaaggcggtgcatgtttccagcgattttctggacgagtgttcagacggccgttacaatttcctggggggtctcacaggcgacaaggcaaattccgtagtctttgataacaccaagctgaagcgtcttgttcccggctttcacgccaggctgcgttttgatgagggggtaaggctgtgcgcggctcacattcttggacacccggaattacagcgggaagatcctgaatttgacgcatggtgcgataaggttatcgccgccagggaaaaagcgcttgagtatgtaaaagggtag

SEQ ID NO: 59690 - protein, 360 aa, Unknown
  Obtained from environmental sample
  DOMAIN (9)...(242): NAD dependent epimerase/dehydratase family
  misc_feature (1)..(360): Xaa is any amino acid
MYYNLVMKVLFIGGTGTISTAISKWVLEKGWELYLLNRGNRNRELEAANKAGKLIEITCDIRTEDEAAISAKIKKALADCGSKAFDVVADFIAFTPAHVEKDFRIFNGLCKQYFFISSASAYQKPLSSYLITESTPLANPFWQYSRDKIACEDFLMQKYRECSFPVTLIRPSHTYDERSVPVGVHGANGSWQVVKRMLEGKPVIIHGDGTSLWTMTHNSDFARAFTGLMGNIHAIGEAVQITSDESLSWNQIYQAIADALNVELKAVHVSSDFLDECSDGRYNFLGGLTGDKANSVVFDNTKLKRLVPGFHARLRFDEGVRLCAAHILGHPELQREDPEFDAWCDKVIAAREKALEYVKG

SEQ ID NO: 59691 - DNA, 330 bp, Unknown
  Obtained from environmental sample
  misc_feature (1)..(330): n is a, c, g, or t
ttggcgaggaggatcgttatgagcattgaaataaaggaagggctgtgtacggcctgcggcgtatgttcgcagatatgtccgggaagtttaatcaaacataaagacggaactgccgtaatcccgcgtccggaacgctgttggggctgcgcgtcttgtataaaggaatgcccgtcggaagcgatagcccttttcttaggcgaggatattggaggcttggggggaaagatgacggtacgcagagaaggaaccgtattgcattggacggtaacgatgccggattcaacgtcaaaaaccgttactgttgatagccgtgactcgaataagtattaa

SEQ ID NO: 59692 - protein, 109 aa, Unknown
  Obtained from environmental sample
  DOMAIN (9)...(32): 4Fe-4S binding domain
  misc_feature (1)..(109): Xaa is any amino acid
MARRIVMSIEIKEGLCTACGVCSQICPGSLIKHKDGTAVIPRPERCWGCASCIKECPSEAIALFLGEDIGGLGGKMTVRREGTVLHWTVTMPDSTSKTVTVDSRDSNKY

SEQ ID NO: 59693 - DNA, 1134 bp, Unknown
  Obtained from environmental sample
  misc_feature (1)..(1134): n is a, c, g, or t
gtgttatgcgcctcaggcggcgcttcggggctgtataaacccaatcatcctggctattcccggcacaaaatgtggtatccgcccttcaacaccggggcgggcttcgctatgggtatccgcgccggagcggagatgaccacgcttgaaatgcgcttcatcgccctgcggtgcaaggataccatagcgcccaccggaacgttggcgcagggggcgggggcgaagcaaatcaactccgccggagaggtttacgaggacaaatacggccttaccacctcgcagcgtttgcatggaaccgtaatggaaattctaagcggacgaggcccgtgctatctaaagacgaccggcattacgaaagagcaggagacggacttgataaaggcctacctcaacatggctccgagccagagccttcgttggttggagagcggactgccgcctggcgttaaggatgtggagattgagggaaccgaaccatatatcaccggcggccacaccgccgccggatattgggtgagcacggatagggagacgaccgtgcgcggactgttcgccgccggggacgccgccggaggctgcccgcaaaagtatgtgaccggggccttggtcgaaggggaaatagcggcgaaaggggcggtcaaatatatggtcgataaaacgcccgaactgaataatgacgaggccgaggcggtaaagcggaagttggagggatatttatcccccatcggcggcggcgaaatctctttttccgtagacgctctggaagaagaaatgcaggcggcgatggacaaatacgccggagggataggcgcctcttatcgtttcacggaggcgtcgctaaagaccgccgacaaaaaaatcagggaactggaggcgcggtccggccatgttttcgccgccgatatgcaagagctggtctacatattggaactcaaagagcgcctgacgctgtgcaagtcgttgatagttcacctatcagcgagaaaagagacgcgctggcacagcttcgccgaacgcgcagattttccggccaaaagcgaaaaatgggagtgctatgtaaattcccgtctggaaaacggcaaaatcaacgcagtttggcgcccgctggttggcgaggaggatcgttatgagcattga

SEQ ID NO: 59694 - protein, 377 aa, Unknown
  Obtained from environmental sample
  DOMAIN (254)...(375): Fumarate reductase/succinate dehydrogenase flavoprotein C-terminal domain
  misc_feature (1)..(377): Xaa is any amino acid
MLCASGGASGLYKPNHPGYSRHKMWYPPFNTGAGFAMGIRAGAEMTTLEMRFIALRCKDTIAPTGTLAQGAGAKQINSAGEVYEDKYGLTTSQRLHGTVMEILSGRGPCYLKTTGITKEQETDLIKAYLNMAPSQSLRWLESGLPPGVKDVEIEGTEPYITGGHTAAGYWVSTDRETTVRGLFAAGDAAGGCPQKYVTGALVEGEIAAKGAVKYMVDKTPELNNDEAEAVKRKLEGYLSPIGGGEISFSVDALEEEMQAAMDKYAGGIGASYRFTEASLKTADKKIRELEARSGHVFAADMQELVYILELKERLTLCKSLIVHLSARKETRWHSFAERADFPAKSEKWECYVNSRLENGKINAVWRPLVGEEDRYEH

SEQ ID NO: 59695 - DNA, 1029 bp, Unknown
  Obtained from environmental sample
  misc_feature (1)..(1029): n is a, c, g, or t
atgccattcaacgagatcaggaagctccctacccccgcggagatcaaggcggaggtgccggttccggcgcatctgcttgccaagaaggcggagcgggatggggagatcaaggcggtttttgagaagaaggattcacgcttcatcgtggtgatcgggccctgctcggcgcacgacgaggacgctgtttgcgagtacgtttcgcggcttgccgacgtgcaggccaaggtgcgggatcggctgatcctcataccgcgtatctacacgaacaagccgcggaccaccggccagggctacaaggggatggcgcaccagcccgaccacctgaaagagccgaacatcgcggagggcatagcggccatacgccgcatgcacgtgcgcgctttaagccagtcggggctcagcgccgcggacgagatgctctaccccgacaaccacccctacttggaagacctgctctgctacgtggcggtcggcgcccggtcggtggagaaccagcagcaccgcctcacggcgagcggcctcgacattccggtggggatgaagaacccgacgagcggcgacatcggcgtggcgctcaactcggtgctggcggcgcagatagagcacgtgttcgcctacaacggctgcgaggtgcagacgcagggcaatccgcacgcccacctgatactgcgcggcgcggtggacagccacggcgacgcccgccccaactaccaccacgaagacctgatccgcgccgccgagctctaccaaaagcgtaacttgttgaatccgaccattttagtggacaccaaccacgataactccggcaagcgctacaaggagcagacgaggatcacgcgcgaagttttgcgcagcaggagccacgacgcgctgctgtcgcagatggtccgcgggctgatgatcgagagctaccttgaggagggtgctcagaaggcgaacgaggacacctacgggaagtcgatcaccgacccgtgcctgggttgggaggagacggagaaactgctgtttgagatcgcggatgagtgttga

SEQ ID NO: 59696 - protein, 342 aa, Unknown
  Obtained from environmental sample
  DOMAIN (35)...(336): DAHP synthetase I family
  misc_feature (1)..(342): Xaa is any amino acid
MPFNEIRKLPTPAEIKAEVPVPAHLLAKKAERDGEIKAVFEKKDSRFIVVIGPCSAHDEDAVCEYVSRLADVQAKVRDRLILIPRIYTNKPRTTGQGYKGMAHQPDHLKEPNIAEGIAAIRRMHVRALSQSGLSAADEMLYPDNHPYLEDLLCYVAVGARSVENQQHRLTASGLDIPVGMKNPTSGDIGVALNSVLAAQIEHVFAYNGCEVQTQGNPHAHLILRGAVDSHGDARPNYHHEDLIRAAELYQKRNLLNPTILVDTNHDNSGKRYKEQTRITREVLRSRSHDALLSQMVRGLMIESYLEEGAQKANEDTYGKSITDPCLGWEETEKLLFEIADEC

SEQ ID NO: 59697 - DNA, 573 bp, Unknown
  Obtained from environmental sample
  misc_feature (1)..(573): n is a, c, g, or t
ttgcgagtacgtttcgcggcttgccgacgtgcaggccaaggtgcgggatcggctgatcctcataccgcgtatctacacgaacaagccgcggaccaccggccagggctacaaggggatggcgcaccagcccgaccacctgaaagagccgaacatcgcggagggcatagcggccatacgccgcatgcacgtgcgcgctttaagccagtcggggctcagcgccgcggacgagatgctctaccccgacaaccacccctacttggaagacctgctctgctacgtggcggtcggcgcccggtcggtggagaaccagcagcaccgcctcacggcgagcggcctcgacattccggtggggatgaagaacccgacgagcggcgacatcggcgtggcgctcaactcggtgctggcggcgcagatagagcacgtgttcgcctacaacggctgcgaggtgcagacgcagggcaatccgcacgcccacctgatactgcgcggcgcggtggacagccacggcgacgcccgccccaactaccaccacgaagacctgatccgcgccgccgagctctaccaaaagcgtaa

SEQ ID NO: 59698 - protein, 190 aa, Unknown
  Obtained from environmental sample
  misc_feature (1)..(190): Xaa is any amino acid
MRVRFAACRRAGQGAGSADPHTAYLHEQAADHRPGLQGDGAPARPPERAEHRGGHSGHTPHARARFKPVGAQRRGRDALPRQPPLLGRPALLRGGRRPVGGEPAAPPHGERPRHSGGDEEPDERRHRRGAQLGAGGADRARVRLQRLRGADAGQSARPPDTARRGGQPRRRPPQLPPRRPDPRRRALPKA

SEQ ID NO: 59699 - DNA, 666 bp, Unknown
  Obtained from environmental sample
  misc_feature (1)..(666): n is a, c, g, or t
atgacgatagatagatcaatacatcaatcatcgataaatcctcttccggggcgtacgcggaagaacgacgatattttcgcgcgcggcgcggcgggagatatgccgtttgcgtatctctatgaacagcaacatgttgaagtcgtccacggcccgtcgtttgtcgctgagaaagaggtatttgttgatcgttgcgcggttgacggtgtgccgataacggagcgccggggcggcggggggacggtggtgctctcgccggggacgctcgtcatcgtagcggtcggcgaaaggcgcggcggcggcaaagagtgggctcagggcgtcttccatagggtgaacggcgcgatcgtcgccgcgatcggcaaggccggcgtcggcggcgcggcggaggcgggtatcagcgatatcgccgtgggcggcaggaaggcgctcggcagttcgctctacatggggtcgaggccgcctcttttttactaccagtccagcttgatggtctccaacgatctggggctgatggacaggtatctgcgccacccgccgagagaaccggagtatcggggcggcagggggcacggtgatttttgcacgacgcttcgggagtgcgggctgaccgttgggatgggcgagcttgccgggttgatagaggcggagctgaaaggcgtgttgtag

SEQ ID NO: 59700 - protein, 221 aa, Unknown
  Obtained from environmental sample
  misc_feature (1)..(221): Xaa is any amino acid
MTIDRSIHQSSINPLPGRTRKNDDIFARGAAGDMPFAYLYEQQHVEVVHGPSFVAEKEVFVDRCAVDGVPITERRGGGGTVVLSPGTLVIVAVGERRGGGKEWAQGVFHRVNGAIVAAIGKAGVGGAAEAGISDIAVGGRKALGSSLYMGSRPPLFYYQSSLMVSNDLGLMDRYLRHPPREPEYRGGRGHGDFCTTLRECGLTVGMGELAGLIEAELKGVL

SEQ ID NO: 59701 - DNA, 351 bp, Unknown
  Obtained from environmental sample
  misc_feature (1)..(351): n is a, c, g, or t
atgtttattgtaaatgaaaaggacaaagaataccgtttcggggattcgggtcccaagtatctcatgcagggacctcggagtaatttcgctctggtacaattcatgcccggtcaggatttccgcgcccattatcatgaagtgatggaagaaaacttttttattcttgagggaaccgttaccatcgttgtggacggaacggcgcatacccttaaccccggtcaactaatacacattgaacctaaagaggttcattatgtgatcaataaatcttccgccgtggttcgcatggtttccacccttgcacctttccaaaaagttgacaaaattgaagttgataatcccgtgatttaa

SEQ ID NO: 59702 - protein, 116 aa, Unknown
  Obtained from environmental sample
  DOMAIN (30)...(100): Cupin domain
  misc_feature (1)..(116): Xaa is any amino acid
MFIVNEKDKEYRFGDSGPKYLMQGPRSNFALVQFMPGQDFRAHYHEVMEENFFILEGTVTIVVDGTAHTLNPGQLIHIEPKEVHYVINKSSAVVRMVSTLAPFQKVDKIEVDNPVI

SEQ ID NO: 59703 - DNA, 807 bp, Unknown
  Obtained from environmental sample
  misc_feature (1)..(807): n is a, c, g, or t
ttgacaaaaatatattacttcagcgggaccggtaacagtttatggtcggcgaaaaaaattgcgcaaataatcggcgaaccttgcgatttgtttaacattggcattgaagctgaaaaagaccaaataataattgacgcgcaagcagtggtatttgtttacccttcgtatgcctacgggttaccgctgatagtccgcagtttcgcgaaaaaagccgtatttaaaactccatacttggcggcatttgtaacttatggctcagatcccggcggtacgcaggcggagttatgcagaatattaaaaaagaaaaagattgattcgctttactttggcaaaattcccgcgatggaaaattacattcctttctttggtccgcctaatgataaaaaaatcgtaaaacgtaccgccatgcaggaagaagcgagcgaaaaggcggcacgttatgtgatagaaagaaaaacaaacaaaattaataccttccgtccgctgtccgtctttatttcatttcttttctctcttggagtaaaaatattttacaaacattacaaggtaagcgataaatgtaacggctgcggcatttgcgaaaaagtctgccctgtagccgcaattgaaataaaagaaaagcgccccgtattcagcggcaagtgcgaaaattgcgccgcctgtattgacatctgcccgttacgcgccattcagtttggacgcgctaaatttggcacaaggggatattgtcatccggagatcgggattaaagaacttggaagggtaccacttttcacttctaggaaagaaggaataaataaaaaataa

SEQ ID NO: 59704 - protein, 268 aa, Unknown
  Obtained from environmental sample
  DOMAIN (208)...(231): 4Fe-4S binding domain
  misc_feature (1)..(268): Xaa is any amino acid
MTKIYYFSGTGNSLWSAKKIAQIIGEPCDLFNIGIEAEKDQIIIDAQAVVFVYPSYAYGLPLIVRSFAKKAVFKTPYLAAFVTYGSDPGGTQAELCRILKKKKIDSLYFGKIPAMENYIPFFGPPNDKKIVKRTAMQEEASEKAARYVIERKTNKINTFRPLSVFISFLFSLGVKIFYKHYKVSDKCNGCGICEKVCPVAAIEIKEKRPVFSGKCENCAACIDICPLRAIQFGRAKFGTRGYCHPEIGIKELGRVPLFTSRKEGINKK

SEQ ID NO: 59705 - DNA, 402 bp, Unknown
  Obtained from environmental sample
  misc_feature (1)..(402): n is a, c, g, or t
gtgaaaaagacgcttaagagcgataatgatttatgggaagagtatgacgctttgggatttttgcgtaatactcatccgctcgcgttatggaagaatgaggtgttggcggtaaagcatcgggttaaggctttacatattggggaatatgtcgggcggaatgttaaaatggtcggctggcctgttacgcaaaaagacgtatggactaaggacggtttaactatgtgttttttaagtttggaagacgagacggccttgtatgaaacggttgtttttccgcaagtgtatgagcgttataacagactgctttttgaccaactgcctttgcttgtttttgggcttgttacaaatgatgagggggccgtttcccttgagattaacaggattgaagtattggggaaataa

SEQ ID NO: 59706 - protein, 133 aa, Unknown
  Obtained from environmental sample
  DOMAIN (54)...(131): OB-fold nucleic acid binding domain
  misc_feature (1)..(133): Xaa is any amino acid
MKKTLKSDNDLWEEYDALGFLRNTHPLALWKNEVLAVKHRVKALHIGEYVGRNVKMVGWPVTQKDVWTKDGLTMCFLSLEDETALYETVVFPQVYERYNRLLFDQLPLLVFGLVTNDEGAVSLEINRIEVLGK

SEQ ID NO: 59707 - DNA, 1272 bp, Unknown
  Obtained from environmental sample
  misc_feature (1)..(1272): n is a, c, g, or t
atgagtagtacaatcatgttcgggcttcgcattataaaatcgcgtttgggaccatggtcgttttacaaagaggctttggcaatcgctctgcctgttatgcttcaacaattaattatgagtatggtctcgctggtcgacaactttatggttgccggcttgggagacgtaagtatggctgccgtcaatgttaccaaccatcttgtttttgttttctttgtaattgtaaatacaatatgtcaggcgggcggcatttacatatcgcagtttaacggcgcgaatgacagcgagggcatgaagaacgcttacagttttaaactgcttttcggcgtttgtgtcgccgttctttatttcgcggtctgccgcgtttttccgcatcagcttattagtattcttacaacgaacaatgccgcgcaggaacaaatcgttattgtcggctccgaatatctggaaattgtgtcgtgggcgtttattcccatggcaatatcaatggctatagcgacaagtttccgcgaaatagcgaagcctaaaataccgcttattatttccgcggctacaactgtaattaatacgatagggaactggattttaatttacggaaatctcggcgcgccgcgtcttgaagttaagggcgcggcttacgctaccatcatcgcgcggtgcgtagaggttgcggcttttctaatttacgcggcggtttccaacgcgccgttcttcgcgaatattaaaagattgttccttattcataaaaaattgataatcgagattttcggcaaatccgcgatgatattcgcttccgaaatatcgtggattgcttccgaaacattgatgatcgccatgtacaacaggagaggcggcgcggaagttgtcgcgggaatgtccgccgggtggactatcgcgaatattttctttttgctgttcggcggcttgtggacggtgtcttatgttttggttggaggagcgcttggcggcgggaaacttgacgaagcgcgggatcgggcaaaatggctaaagtggggcggagcggcggcgggacttttttttgccgtaccgggcttttttataacttccgctttggtcccgctggtgtttcataacctgagcgccgacgcaagggcgaattgccttgggcttgtgtttgtaatacttgtctatttgccgttgtggtgttatttaaacgttcaattcgctgtttcccgcgcgggaggagacacggctatgggaatgtatacggacatatccgtcaatacactgctttcgcctctgccgatctga

SEQ ID NO: 59708 - protein, 423 aa, Unknown
  Obtained from environmental sample
  DOMAIN (31)...(195): MatE
  misc_feature (1)..(423): Xaa is any amino acid
MSSTIMFGLRIIKSRLGPWSFYKEALAIALPVMLQQLIMSMVSLVDNFMVAGLGDVSMAAVNVTNHLVFVFFVIVNTICQAGGIYISQFNGANDSEGMKNAYSFKLLFGVCVAVLYFAVCRVFPHQLISILTTNNAAQEQIVIVGSEYLEIVSWAFIPMAISMAIATSFREIAKPKIPLIISAATTVINTIGNWILIYGNLGAPRLEVKGAAYATIIARCVEVAAFLIYAAVSNAPFFANIKRLFLIHKKLIIEIFGKSAMIFASEISWIASETLMIAMYNRRGGAEVVAGMSAGWTIANIFFLLFGGLWTVSYVLVGGALGGGKLDEARDRAKWLKWGGAAAGLFFAVPGFFITSALVPLVFHNLSADARANCLGLVFVILVYLPLWCYLNVQFAVSRAGGDTAMGMYTDISVNTLLSPLPI

SEQ ID NO: 59709 - DNA, 660 bp, Unknown
  Obtained from environmental sample
  misc_feature (1)..(660): n is a, c, g, or t
ttgacactagtcccccacaacgaggaagcaaagcaagtagccgagacaatgcaggatttaatcttggaagagctaaacgtagagcaactccatttcgctggtgatgacaccgagctagcgaaaatctccgccaagcccaacttcgcaggcataaaagcaaaaggagcggactacgccaaaaatatgaaaaccctatccaccgctatcacagcattgaccgccgagcaaatcaagcaaatccaaagcggcacaccgcttgatgttgccggtttccaaatagactactcctgcctaatgctagtccgcgaagtagccgaaggtctcgcagttgaagctgacgaaaactataccatagccttggatttgaaaataacgccagagctgcgtcaaagctgcatagcgagagagctggtgaatcgcatacaaaaccgccgcaaggaaatggatttgcagattacggataagataaagatagcgttgaaagggctgggtgcttatgcggatttgcaagcagcggtggagaagcacaggggttatattttggaggagacgcagggggtggaagttttgtgtggcggagatgttggcggtgtgtttgtttctgtcaatgttgaaggatatgaaatagaaatttccatttcccccaatttggcaaaataa

SEQ ID NO: 59710 - protein, 219 aa, Unknown
  Obtained from environmental sample
  misc_feature (1)..(219): Xaa is any amino acid
MTLVPHNEEAKQVAETMQDLILEELNVEQLHFAGDDTELAKISAKPNFAGIKAKGADYAKNMKTLSTAITALTAEQIKQIQSGTPLDVAGFQIDYSCLMLVREVAEGLAVEADENYTIALDLKITPELRQSCIARELVNRIQNRRKEMDLQITDKIKIALKGLGAYADLQAAVEKHRGYILEETQGVEVLCGGDVGGVFVSVNVEGYEIEISISPNLAK

SEQ ID NO: 59711 - DNA, 372 bp, Unknown
  Obtained from environmental sample
  misc_feature (1)..(372): n is a, c, g, or t
atgactgagacccaacccaaccgcaatcacaaagatagcgtttttacgtgtctttttagcgaaaaaagcaacctgctggagctatacagcgcaattagcggcaaaagctaccctgaaagcacaaatatagagatagtaactctctctgatgtgctttatatggatcaaatcaacgatatagcttttgttatggaagataggcttattgtactaattgagcatcaatcttcaattaataacaatatgccgcttaggatgcttcagtatttatctgcggaatatgctatgatagttgacagaaagagcctttataagcagaaaagaattatgataccttcccccctgaatcatgttctatacaacgggagataa

SEQ ID NO: 59712 - protein, 123 aa, Unknown
  Obtained from environmental sample
  misc_feature (1)..(123): Xaa is any amino acid
MTETQPNRNHKDSVFTCLFSEKSNLLELYSAISGKSYPESTNIEIVTLSDVLYMDQINDIAFVMEDRLIVLIEHQSSINNNMPLRMLQYLSAEYAMIVDRKSLYKQKRIMIPSPLNHVLYNGR

SEQ ID NO: 59713 - DNA, 444 bp, Unknown
  Obtained from environmental sample
  misc_feature (1)..(444): n is a, c, g, or t
atgaaagtagatactaaagcctttggattagttgaagttaacgaaaggcagaaaataaaaattcccgaagggctctacggatttgaagattatattgaatacgtgttattggacgcggaacagcagccttatttcctgcttcagtctgtaaatgaaagagatatagcgtttatacttattaatccgtttcttttccgtcctgattatgaagtaaacattcccaatgaagatcttgaagatattggattaaaaactccggaaaatgcgttgatttttacgattgtaacaattcctccggacggaagcgcgatgacggcaaaccttcagggaccgcttattattaaccgtgacaacatgacgggaaaacaatggattcagtccgatgtgcgctggaaaacaaggcatgacattgtagcggaattaaaaaacgcggggaaattataa

SEQ ID NO: 59714 - protein, 147 aa, Unknown
  Obtained from environmental sample
  DOMAIN (17)...(140): Uncharacterized BCR, COG1699
  misc_feature (1)..(147): Xaa is any amino acid
MKVDTKAFGLVEVNERQKIKIPEGLYGFEDYIEYVLLDAEQQPYFLLQSVNERDIAFILINPFLFRPDYEVNIPNEDLEDIGLKTPENALIFTIVTIPPDGSAMTANLQGPLIINRDNMTGKQWIQSDVRWKTRHDIVAELKNAGKL

SEQ ID NO: 59715 - DNA, 852 bp, Unknown
  Obtained from environmental sample
  misc_feature (1)..(852): n is a, c, g, or t
atggccgagaacttgccgaatgtcagcaggcagtcaaaaaccaccgcaacgatgctgaaaaaaataaaagcgtccatagacaacattacaaaatcatctaacggcgtattggaccgtttcggggcgatagactcaagcgtaaaaacagtttccgaacatgagcaaaatatacttagagcgatgcaggaacaggaaaacggaggaaagcaaatactggaatccataagccgtttgaaggatataacagcctcggtaaaaaaaggctctgacgacatggcaaaatcaggcgaaactttggtcaaggaaacagacggttttataaaaaccagccaggaagcggcggaaggcatgaacgaaatactggcaactattaaccagataaaaatttctgtaaaccatgtcaatgagataagccatgaaaacaacagtaactttgaatcgttaaaacaggaaacagaaaaatttaataatactgtcggcaacgaaaagcggaaaattctcatagcagatgacgatactattcatcttgagatggtggaagccgtgttatcaaacgagtatgacatttttaccgcgaaatcgggtaaagaagcgcttaacttattctatcaggggcttgtaccccagttaatattgctggatttgataatgcccgatatggacggatgggatacttacaaaagaataaaagcggtaagcgccttacacgataccccgatagcgtttttcacatcttcaaacgacccgaaagacaaacagcacgcccgcgaaatgggggcggttgactacatcaaaaaaccatacgataaagacgatctgttacgcagggtgggtaganattataaagaatga

SEQ ID NO: 59716 - protein, 283 aa, Unknown
  Obtained from environmental sample
  DOMAIN (164)...(278): Response regulator receiver domain
  misc_feature (1)..(283): Xaa is any amino acid
MAENLPNVSRQSKTTATMLKKIKASIDNITKSSNGVLDRFGAIDSSVKTVSEHEQNILRAMQEQENGGKQILESISRLKDITASVKKGSDDMAKSGETLVKETDGFIKTSQEAAEGMNEILATINQIKISVNHVNEISHENNSNFESLKQETEKFNNTVGNEKRKILIADDDTIHLEMVEAVLSNEYDIFTAKSGKEALNLFYQGLVPQLILLDLIMPDMDGWDTYKRIKAVSALHDTPIAFFTSSNDPKDKQHAREMGAVDYIKKPYDKDDLLRRVGRXYKE

SEQ ID NO: 59717 - DNA, 1161 bp, Unknown
  Obtained from environmental sample
  misc_feature (1)..(1161): n is a, c, g, or t
ttggatattactccgttatatgcaaatcaaacccttcttgacgccgcgcaggctatanccatgagcgaaaaagcttttaaagaaaaacgttattatgattcgcactggcttgccaatcttggaacgcggctcgccgaaagaggaagcgtagaagccgccaatgcctcccgtcttgcaagcgacgcgtggaacatgattacaactctagctccaaccgcgaaagaaatgcgtctttatgaattgtataatttaaaagtttccggctatcaggcaatggaagccggtgaatggatactcgcgttttacatttttcaggaattgttgacctatactcccgatgatcccgacacaaaaaatttccttgccgtcagcgagaaaaaatccaaggagaccgccttctttattgacgagatggaactgtcggtaggggacattttacacggcgcgatattttctcttcccagcggggatggaagggcggtgcttcgttttaccaatcttacaacatcggaagatgtcgcctatggtcttgggtttgaatacatggaatttgacgcaaatatgattccaagagcaaatgtaagatcgcgttatgcaaaacttacgccttttacattaaacggaaaaccgcaggtgcttattttaactcacgcgcttgatcgcctgaataaagataattcttttaagagcgaatggcttcttggcagttctgtaacaagcggaatctttttagatacaagttatgaagatttggttttaattaccgatgtccgaagagggcttcacaatctgcggattaatgagctttttgccgcctcaaaaaaacttgaggaagaggggtatattaatcagattttccaggcggaaattttaaaccggctcggctccgttatgtattttctgccaatgtcaatttttgtaattgttatcgcgtggcgataccgcgcaaaagaaaaaccgcgttatctttttatccttcttcttcctgttttacctattgtttttaacggactcactttcctgtaccgctctgtaattaataccttgggtatctggcttattttaacgtttggttttaccaccgccctagttatttttatcgcttctgtggctgttaccttgtttgtttctcttgtttcgctttccgctcagcatagctag

SEQ ID NO: 59718 - protein, 386 aa, Unknown
  Obtained from environmental sample
  misc_feature (1)..(386): Xaa is any amino acid
MDITPLYANQTLLDAAQAIXMSEKAFKEKRYYDSHWLANLGTRLAERGSVEAANASRLASDAWNMITTLAPTAKEMRLYELYNLKVSGYQAMEAGEWILAFYIFQELLTYTPDDPDTKNFLAVSEKKSKETAFFIDEMELSVGDILHGAIFSLPSGDGRAVLRFTNLTTSEDVAYGLGFEYMEFDANMIPRANVRSRYAKLTPFTLNGKPQVLILTHALDRLNKDNSFKSEWLLGSSVTSGIFLDTSYEDLVLITDVRRGLHNLRINELFAASKKLEEEGYINQIFQAEILNRLGSVMYFLPMSIFVIVIAWRYRAKEKPRYLFILLLPVLPIVFNGLTFLYRSVINTLGIWLILTFGFTTALVIFIASVAVTLFVSLVSLSAQHS

SEQ ID NO: 59719 - DNA, 837 bp, Unknown
  Obtained from environmental sample
  misc_feature (1)..(837): n is a, c, g, or t
ttgaagtatggacggaggcctgcatcgaaaacagttcccgttctcatgttaaaccgatacgccagaaatggtttgactgctccatgttgtcctacaaatgtggctcgtaccctgaccaaccttggagagtacatttattttataaatggggataatctgtttatcaacctgtttattccgaacgaggctcaatttgaaatgaatggagagccagtgagcatttccataaaaacacatgatcccaaaacgggtttagtgaaaatttcgctaaaaacccccagccttcatttctcccttaaaatcaagataccgggttatgccgagagcttttcatcgaaagtaaacggcaccacagttccaggttttgatggcgatcctattgaaagagttaacggccgtttcgttaccggagaaaaaaacaacaactatttgcgtataacaaaaacatggaacgatgatgaaatagaaatttctttttccctgaaaccccgtcttgtttaccccaaccccagggttcaccataactgcggaaaagttgccatcgcgcgggggcctgaaatttactgctttgaagaaatagacaacgacgccaatcttgcagccctttctctggataccgatgcctcgcttgaggaatgctatagggaagaccttttgggcgggatcatgcagatcaaaaccaaaggctcaaggcttattgtacccgaagtcccggaatccttctcagaaaaatttgttcccaggcatgaaaccgttaccctcagcgcaattccttatggcttttggggtaatcgcggtcccggcgaaatgcttgtgtggattcgctccaagttatga

SEQ ID NO: 59720 - protein, 278 aa, Unknown
  Obtained from environmental sample
  misc_feature (1)..(278): Xaa is any amino acid
MKYGRRPASKTVPVLMLNRYARNGLTAPCCPTNVARTLTNLGEYIYFINGDNLFINLFIPNEAQFEMNGEPVSISIKTHDPKTGLVKISLKTPSLHFSLKIKIPGYAESFSSKVNGTTVPGFDGDPIERVNGRFVTGEKNNNYLRITKTWNDDEIEISFSLKPRLVYPNPRVHHNCGKVAIARGPEIYCFEEIDNDANLAALSLDTDASLEECYREDLLGGIMQIKTKGSRLIVPEVPESFSEKFVPRHETVTLSAIPYGFWGNRGPGEMLVWIRSKL

SEQ ID NO: 59721 - DNA, 543 bp, Unknown
  Obtained from environmental sample
  misc_feature (1)..(543): n is a, c, g, or t
atgaaaaaatggatctgcgcagtttgcggttatgttcacacgggagacgagcctccggaagcctgcccccagtgtaaagcgccggcttccaagttcagcgagcaaaaagcgggaagcagttatgcctccgagcatgtggtcggggtagccaagggtgtggacgccgacattataaaggatttgcaggcgcactttaacggcgaatgttgcgaggtgggaatgtaccttgcaatgtcacgtgtcgcgttccgcgaaggctactgcgaaatcggcctttactgggaaaaagccgcttacgaggaagccgaacacgccgccaagtttgctgagttcttgggtgaggtggtaaccgacagtactaagaaaaaccttgaaatgagggtcgaggccgagcatggcgcctgcgccggcaagaccgacatcgcaaagagggccaaagaaaagggcctggacgccattcacgacacggttcatgaaatggctagggacgaagccaggcactgcgcggcttttaagggattcttggcaaggtatttcaagtaa

SEQ ID NO: 59722 - protein, 180 aa, Unknown
  Obtained from environmental sample
  DOMAIN (59)...(175): Rubrerythrin
  misc_feature (1)..(180): Xaa is any amino acid
MKKWICAVCGYVHTGDEPPEACPQCKAPASKFSEQKAGSSYASEHVVGVAKGVDADIIKDLQAHFNGECCEVGMYLAMSRVAFREGYCEIGLYWEKAAYEEAEHAAKFAEFLGEVVTDSTKKNLEMRVEAEHGACAGKTDIAKRAKEKGLDAIHDTVHEMARDEARHCAAFKGFLARYFK

SEQ ID NO: 59723 - DNA, 507 bp, Unknown
  Obtained from environmental sample
  misc_feature (1)..(507): n is a, c, g, or t
atgctccgaactatagcagattggcataaagaatattttcctatggttttcaggcgctgcaagtatatgctccgtaaaagcacatacgcccctgaagacgcggcccaggacgtttttgtcaaccttcttacctgtaagaaaaagcctgccgatatggctaagattgaaaatgttgaaagcctgctctggactattgctaccaatgtgtgccttaacaaactcaaggcaaaaaaatggaaaccgggaggagatctcactatcaatgaagaagaaatttatcctgccgcctgcgacgactataaacgggtagatgacaatttgcttttggaagccattttggaagaggaatcggaagaggtcagaagctatgtctttatgcattattacgacgggatggggtatgtagaaatagcaaacaccgtgggcaagtcaaaaacctgggtagggaaaaagcttgccgcctttagggaaagagcgcgaaagatactgggggagagcgtaaaatga

SEQ ID NO: 59724 - protein, 168 aa, Unknown
  Obtained from environmental sample
  misc_feature (1)..(168): Xaa is any amino acid
MLRTIADWHKEYFPMVFRRCKYMLRKSTYAPEDAAQDVFVNLLTCKKKPADMAKIENVESLLWTIATNVCLNKLKAKKWKPGGDLTINEEEIYPAACDDYKRVDDNLLLEAILEEESEEVRSYVFMHYYDGMGYVEIANTVGKSKTWVGKKLAAFRERARKILGESVK

SEQ ID NO: 59725 - DNA, 615 bp, Unknown
  Obtained from environmental sample
  misc_feature (1)..(615): n is a, c, g, or t
gtggaaaatattatattttatttttctggaacaggaaatagtttatacgtcgcaaaatgtatatcgaaagaacttggtaatggtgaaattatttcaatggcaaaaccattcaattcaataaaagaatatgatagtgttggttttatttatccgacttattattgggggatgcccaataaagttattgaatttgtaaaaaatttaaaactaaacaatcataataagactacatattattattcaattacaacttatggaggacttgctggaaatgctgtttatcaattgtatgaattgttactaaatgaacatggtataaaattaaattacggggaaaaattaaaaatgtttgcaaattatgttgctgcatacgacatgagtgtaaagatagacaaaattacgaaaaaatcaaataaaaaacttatttcaataataaattctattaaaaacagaaaaaatattaaaataaaaaagtttacaagaatatttaaatctataaatgaaaaattcataaaagaagtatcaaatatggataaagatttcacagttaataataattgtaccggctgtagtatatgtgaaaaaatttgtccggttataaatattgagatgtaa

SEQ ID NO: 59726 - protein, 204 aa, Unknown
  Obtained from environmental sample
  misc_feature (1)..(204): Xaa is any amino acid
MENIIFYFSGTGNSLYVAKCISKELGNGEIISMAKPFNSIKEYDSVGFIYPTYYWGMPNKVIEFVKNLKLNNHNKTTYYYSITTYGGLAGNAVYQLYELLLNEHGIKLNYGEKLKMFANYVAAYDMSVKIDKITKKSNKKLISIINSIKNRKNIKIKKFTRIFKSINEKFIKEVSNMDKDFTVNNNCTGCSICEKICPVINIEM

SEQ ID NO: 59727 - DNA, 792 bp, Unknown
  Obtained from environmental sample
  misc_feature (1)..(792): n is a, c, g, or t
atgggagccgtcgttgtaatgcgccccaacggggaaatactggcccttgtttcatacccctggtttgatcctaatatgtttaccggcggagggcgcggtcagtacaatatacttgtcagcgatccgaacaaacctttcctgaaccgcgccatacagtcaagctatcccccggcttcgacctttaaggttattatgaccacagggatacttgccgaaaacgtcttccccccggaaaagaccgtggactgcccgggcgagattgattatgggaacaggcagtggcgctgccatatccgcaagccggggcatgggcgcctgagtctgtcccgcgccatggcgcaatcatgtgatatttactactggacagtgggccgcgacaacctgggggcggagaacatcgcctcatacgcaaagatgtatggtttcggttccgctacaggcattgacctgcccggtgaaattgacggctttatcccgacgccgcaatggaagtcaaggcgtttccatgagaaatggcttggcggcgataccatgaatatggcaatcggccagggctggactctggttacgccgatccagatggcaaacatggtcgcgcttgtggtaaacaacggcaaggtatacaggcctcatttgcttaaagaaatcagggatcccgcgacaggcgcgatagagcagaggatagcgccggtattggcgcgtcaaagcgatattgatcccaaagtatttgaaaacgtccgggcgggatatgcgcggggtaataagcgaaggtacagcgcagtatccacttaa

SEQ ID NO: 59728 - protein, 263 aa, Unknown
  Obtained from environmental sample
  DOMAIN (2)...(263): Penicillin binding protein transpeptidase domain
  misc_feature (1)..(263): Xaa is any amino acid
MGAVVVMRPNGEILALVSYPWFDPNMFTGGGRGQYNILVSDPNKPFLNRAIQSSYPPASTFKVIMTTGILAENVFPPEKTVDCPGEIDYGNRQWRCHIRKPGHGRLSLSRAMAQSCDIYYWTVGRDNLGAENIASYAKMYGFGSATGIDLPGEIDGFIPTPQWKSRRFHEKWLGGDTMNMAIGQGWTLVTPIQMANMVALVVNNGKVYRPHLLKEIRDPATGAIEQRIAPVLARQSDIDPKVFENVRAGYARGNKRRYSAVST

SEQ ID NO: 59729 - DNA, 363 bp, Unknown
  Obtained from environmental sample
  misc_feature (1)..(363): n is a, c, g, or t
ttgatcccaaagtatttgaaaacgtccgggcgggatatgcgcggggtaataagcgaaggtacagcgcagtatccacttaatatcggaacggttcagattgcggggaaaacaggaacagccgaagtgggactgcctgaaaattggcattcatggtttacatcctttgcgccttatgaaacaaacaaccctgaagaaagaattgttgttgcggttattgttgaagctgtcaatacctgggaatggtgggcgccttattgttcggcaataatttaccagggcatttttgcggatcaaacttatgaagaagcagcgagaacccttggaatctacaatgcccagccggtacaggggcgcagggaataa

SEQ ID NO: 59730 - protein, 120 aa, Unknown
  Obtained from environmental sample
  misc_feature (1)..(120): Xaa is any amino acid
MIPKYLKTSGRDMRGVISEGTAQYPLNIGTVQIAGKTGTAEVGLPENWHSWFTSFAPYETNNPEERIVVAVIVEAVNTWEWWAPYCSAIIYQGIFADQTYEEAARTLGIYNAQPVQGRRE

SEQ ID NO: 59731 - DNA, 1308 bp, Unknown
  Obtained from environmental sample
  misc_feature (1)..(1308): n is a, c, g, or t
atgaggattcgggatcttttggaaatagattttgtactgctcttggccgctatggttctggtagtattcggcatactatttatttattcttcagggattaccagcgaaggcatccttatttccagcgagtaccaaaaacagatcgtttgggcttcaataggtctggtctctgccctggttatctccatgcttaattacaagaagatttccgatttagccatttatttttatatcggaatgcttgcattgcttgtggttaccttcatatttggcagggttattcacggaagcaggtggctcaggataggttttttaggcttccaggcatctgaatttgccaaaatagcgaccatactttttttggcctggtacctggatagcaccaaacgaaaccagaatgatttccttcgttttatcgtttgcagcattattgcaatgattccgatgatgctggttttgattcagccggatntgggaaccgcgctggtttttattcctatacttttggggatggcctatgtcgccggaatttccatcaggtacattgctttttttggattttcaattgctttcgcgggggtatttctggtgcttccgttttggcagtctacgataatgaataactcaataccggcccttatgatgctggctaatttgcgctttgtggcggcaggctgcatgaccctgctacttattgccgctattgcgtggtttggatatgtccgttatgaaaagcgctatttttactggatacgctacttcgcctttatctttattgtctcgctggtcggctcgttcctggcccagaagatgctaaggcagtaccagatcatgcggctgattgtttttatgaatcccaatgtagacccaaggggctttggctggcaaatcattcagtccatcaccgcgattggatccggaggtgtattcggcaaaggctatttgcggggaacccaaagccattaccggtatcttccggaacagagcacggacttcattttttcaatcctttcggaagaatggggatttgtcggcggaattttggtgtttgcgttatttcttattatttttttaaggctcacaaggatcatgcaaattacaacggattcttttggttcctatatagttgccgggctggtttatatgtttgcctttcattttattgttaatgtaggaatgaccatgggaattatgcccattaccggtatcccgcttatgtttgtttcctacgggggttcggcggttttgtcctcaatgatagggataggattggccatgagcattcatgtaagaaggtttacccgctga

SEQ ID NO: 59732 - protein, 435 aa, Unknown
  Obtained from environmental sample
  DOMAIN (11)...(434): Cell cycle protein
  misc_feature (1)..(435): Xaa is any amino acid
MRIRDLLEIDFVLLLAAMVLVVFGILFIYSSGITSEGILISSEYQKQIVWASIGLVSALVISMLNYKKISDLAIYFYIGMLALLVVTFIFGRVIHGSRWLRIGFLGFQASEFAKIATILFLAWYLDSTKRNQNDFLRFIVCSIIAMIPMMLVLIQPDXGTALVFIPILLGMAYVAGISIRYIAFFGFSIAFAGVFLVLPFWQSTIMNNSIPALMMLANLRFVAAGCMTLLLIAAIAWFGYVRYEKRYFYWIRYFAFIFIVSLVGSFLAQKMLRQYQIMRLIVFMNPNVDPRGFGWQIIQSITAIGSGGVFGKGYLRGTQSHYRYLPEQSTDFIFSILSEEWGFVGGILVFALFLIIFLRLTRIMQITTDSFGSYIVAGLVYMFAFHFIVNVGMTMGIMPITGIPLMFVSYGGSAVLSSMIGIGLAMSIHVRRFTR

SEQ ID NO: 59733 - DNA, 897 bp, Unknown
  Obtained from environmental sample
  misc_feature (1)..(897): n is a, c, g, or t
gtgcgaaagctgggcggggcgcttttgcggcgcgacgtgcagatactcccgctcttctcgcggctgacaagggcggatcaggaggcgatattcaacccgtccggcaggatccggatcatcgtttgcacgaacatagccgagacctccgtcaccgtgccgaacatcagttacgtcgtggacacggggcttgcccgcatatcgcggtacgcgccgaggcttcgcaccaaccgcctgcccatagagccgataagccgcgcaagcgccgaccagcgcaaggggcgttgcgggcgcgttcaggacggcgtctgcatacgcctatattcggaagaggattacaactcgcgcgaagcctttacgctgccggagataaagcgctccaacctcgcgggggtgatacttacaatgacggcgcataaactgggggcgattgaggatttcccgttcatcgccccgccgtcgaagcaggcgatctcggagggatacgcgcagttgaaagaactcggggcgattgacaacgggaaaaaactcacgcggatgggcgcggagatggcgcagctgccgttcgacccgcacatatcgcggatgattatcgccgccggacgggaaaacgctttgcgggaggtgaagatcatcgccgcggcgctttccattgtcgaccccagggaaaggccgcttgagaaacaagccgaagccgacgcggcgcacgtcaaattcgtcgataaaggctcggacttcttgacgtatgtcaacctatgggacgcctataggaacgaatgggacacgctcaaaacacagggcggtttgcggcgtttcgcaaagggcacttcttgtcgttcacgcggatgcgcgagtggcacgacgtctattggcagcttgacgagacgctctcgcggatga

SEQ ID NO: 59734 - protein, 298 aa, Unknown
  Obtained from environmental sample
  DOMAIN (7)...(99): Helicase conserved C-terminal domain
  misc_feature (1)..(298): Xaa is any amino acid
MRKLGGALLRRDVQILPLFSRLTRADQEAIFNPSGRIRIIVCTNIAETSVTVPNISYVVDTGLARISRYAPRLRTNRLPIEPISRASADQRKGRCGRVQDGVCIRLYSEEDYNSREAFTLPEIKRSNLAGVILTMTAHKLGAIEDFPFIAPPSKQAISEGYAQLKELGAIDNGKKLTRMGAEMAQLPFDPHISRMIIAAGRENALREVKIIAAALSIVDPRERPLEKQAEADAAHVKFVDKGSDFLTYVNLWDAYRNEWDTLKTQGGLRRFAKGTSCRSRGCASGTTSIGSLTRRSRG

SEQ ID NO: 59735 - DNA, 2322 bp, Unknown
  Obtained from environmental sample
  misc_feature (1)..(2322): n is a, c, g, or t
atgggacacgctcaaaacacagggcggtttgcggcgtttcgcaaagggcacttcttgtcgttcacgcggatgcgcgagtggcacgacgtctattggcagcttgacgagacgctctcgcggatgaaagggtacgagcagaatcccgcgcccgcctcttacgacgcggtgcataggtcgctgctgaccggtctgttggccaactgcgcgtatcttgacaagaacggaaaatacaaggccgcgggcgggaaagaggtgctgatattccccggttcggcgcttgccaagaagaaatgcgattgggtggtgtgtcacgagatagtggagacaagccgcgtgttcgccagaaccgtggcggcgatcaaaccggagtggcttgaggagttagccgccgatttttgcaaacggaccttcgagacgccgtttttcgacgctgaaagcgggtgcgtgcgggctgtggagcgcgtcatgctcttcgggcttccgctggcagtcaagaaaaacgccttgtacagccgggcggagccggaggcagccacagaaatctttataagggacgggttggttgaggagaaccttgtatgccaccacaaattttacgatcataacaagaagctcaaacaaaaaatcctttcatacgaggcgaagctacggtcgaggggctattacaagggggacggggcgatatttgatttctacaagaagcgcctatcgattgcggcgtccatacacgatctgaacaaggcgataaggtccgccggaaatgataaatttctgtatatgcgcgaagatgacgtcatcgaggaatcaatcccgaaagaggctcacgcttaccccgaccacgtcaacatcggcaatcagaatttcgcgctgaaatacgcttttgatccggggaatgaaaacgacggcgttacgctggcgctaccgcagaaggttttgccgtttatcgcaaaggaaacaataggatggttgatcccgccgctatggccggcgcagataaagagcctgctgcaacagctgccgcgcagtcaacgaaaggtattcgtacctgtaggcgaagcggcgcagaagcttgcggataacatcgttgcgccccctgctacgcacgaatcgttcgcggcggaattgtcgtcggctataaaaaggatttacggcattgatattgacccggaattattggattccgataagactgatccgcacttggatttgaagatcgaagtaagagacgagaaaaatgacgttgtggcgaagggcaggagcggcgaattgttcaagcggatgaacgatacggcggttgtcggcggtacggatgttaatacaagtataaacgatataaccggtacatcaattaatacggcggcaggctcgccttgggacggcgctttcgcgtcataccgcaagacaggtcttgtatcatggccgggcgaggacttaaataaaccgcttgacataggttcaaacaagggcgggttcgcggttcgcgggtatccggcgctagtgccgacgagcgggatcattgacggcggtatcaatactgataatgacaactgcgtagacttggttctcttcccgtcaaaaataaagagcgacatcgcccaccgctatggtgttcgtaaattgctggaaacaacgttaatgaaagatttggcttggaccgaacgcgacgtttcatcattctcaaaagaggtaaaggtgatgtgcgcccctttcgcctccacggacaagttcgcggcgaggctgtatgacatgatatgcgaatccattctcgatttcgacgacgcgcctaggagcaaagatggatttgatcaattgataataaagatcaaagaatcattaagaggaataggcttccgcgtactatccgtatttgaggaatcattacgcgtatttacggacgacgcaacccgtctatcatcagcaaaaaagaaattgccggccgacatccacaaagaactggcaaacgcgctaaacgaattcttcactgatattctagacggacaaatcacgcttgaaatcttttcccaatacccgcgctacctaaaagtcttcgcggcaatcatagaaaaggcctctttcgaaccgttcaaataccgccaaaaacgcgccgaggtcaatcagtacgtatcggtttataacgatttgcagaaaaaaaacgccaagccggaaaacgcgcaccgcagcaaacgcttgttgaaagaacttttattaatgataaaggaatttgagatcaatcaattcgcgcaacacattaagacattgttcccggtatcggaacagcggctcgataagaaggtcggggagataaagaagctttgttcgtga

SEQ ID NO: 59736 - protein, 773 aa, Unknown
  Obtained from environmental sample
  DOMAIN (32)...(132): Domain of unknown function (DUF1605)
  misc_feature (1)..(773): Xaa is any amino acid
MGHAQNTGRFAAFRKGHFLSFTRMREWHDVYWQLDETLSRMKGYEQNPAPASYDAVHRSLLTGLLANCAYLDKNGKYKAAGGKEVLIFPGSALAKKKCDWVVCHEIVETSRVFARTVAAIKPEWLEELAADFCKRTFETPFFDAESGCVRAVERVMLFGLPLAVKKNALYSRAEPEAATEIFIRDGLVEENLVCHHKFYDHNKKLKQKILSYEAKLRSRGYYKGDGAIFDFYKKRLSIAASIHDLNKAIRSAGNDKFLYMREDDVIEESIPKEAHAYPDHVNIGNQNFALKYAFDPGNENDGVTLALPQKVLPFIAKETIGWLIPPLWPAQIKSLLQQLPRSQRKVFVPVGEAAQKLADNIVAPPATHESFAAELSSAIKRIYGIDIDPELLDSDKTDPHLDLKIEVRDEKNDVVAKGRSGELFKRMNDTAVVGGTDVNTSINDITGTSINTAAGSPWDGAFASYRKTGLVSWPGEDLNKPLDIGSNKGGFAVRGYPALVPTSGIIDGGINTDNDNCVDLVLFPSKIKSDIAHRYGVRKLLETTLMKDLAWTERDVSSFSKEVKVMCAPFASTDKFAARLYDMICESILDFDDAPRSKDGFDQLIIKIKESLRGIGFRVLSVFEESLRVFTDDATRLSSAKKKLPADIHKELANALNEFFTDILDGQITLEIFSQYPRYLKVFAAIIEKASFEPFKYRQKRAEVNQYVSVYNDLQKKNAKPENAHRSKRLLKELLLMIKEFEINQFAQHIKTLFPVSEQRLDKKVGEIKKLCS

SEQ ID NO: 59737 - DNA, 912 bp, Unknown
  Obtained from environmental sample
  misc_feature (1)..(912): n is a, c, g, or t
atgccggcgagctcggtgatcttcgacgagcttgaaaagttcgacggcgtgcagttcaactacttgatgacccgcgagtacaaccagatggcgggccgcgccggccggcgcgggatggacgaggtgggctacgtctactcgcaggtgatcccggaggccacagacccggaccaattggagcgcatactttacggtaccaatgagcgcatcaacagccggttttacgcgtcgtattcgacgatactgtccctatacagccaattcggcgacggggcgttcgatattttccgcaagagcctccacaacttccgcaagggggtctttgcgatgtcgaagatatatcaaaaagaagaggcgcagataaggaacaggataaaattcctgcaatcgagcggctttttggacggtacgaagctgacgcccaagggccagttggcggcggcggtgagcggttacgagatacagaccgcggagctttactactgcagggatttcgaagacgtctcggcggcgcagctgccggtgctattggccgcgctgattaccgaggaggcgcgcagccgcaaagtcccgcccataaccaacgtcgcgctcaaattcgacgcccagaagacgatacacaagctgcgccagaaagagataaagtacaatatagcaaaccctatcagagaaatggacttctcaatggccgcgccggtcttcgcgtgggcgagcggttgcgatttaaagcagttagccggtttcggggtgccggagggggatctgatacggatactgcgtatgacgatacagttgctgcggacgttgcgggataggattgttgaccccgaaaataacgacaaaatgcataacgcgttagaattagtcaatagggatgtggtggacgctcagaatgaattgaatgtggggtga

SEQ ID NO: 59738 - protein, 303 aa, Unknown
  Obtained from environmental sample
  DOMAIN (124)...(302): DSHCT (NUC185) domain
  misc_feature (1)..(303): Xaa is any amino acid
MPASSVIFDELEKFDGVQFNYLMTREYNQMAGRAGRRGMDEVGYVYSQVIPEATDPDQLERILYGTNERINSRFYASYSTILSLYSQFGDGAFDIFRKSLHNFRKGVFAMSKIYQKEEAQIRNRIKFLQSSGFLDGTKLTPKGQLAAAVSGYEIQTAELYYCRDFEDVSAAQLPVLLAALITEEARSRKVPPITNVALKFDAQKTIHKLRQKEIKYNIANPIREMDFSMAAPVFAWASGCDLKQLAGFGVPEGDLIRILRMTIQLLRTLRDRIVDPENNDKMHNALELVNRDVVDAQNELNVG

SEQ ID NO: 59739 - DNA, 1275 bp, Unknown
  Obtained from environmental sample
  misc_feature (1)..(1275): n is a, c, g, or t
atgacatcatattcccaaaaagagggcgttatgaagattcataatgattttaccttgtattttcgggttaccccttcggggaaacgggtcgtgtatttctacgcttatgacgagaacggcaggcggacgcagggcaggtccacggggcagaccacaaaaacagcggcaagggtgctggtaaacaggcttttgaaagaaggggctttgctgccgaaaaaagacgatgtgcccactttcggcgaatacgccgtgaactggtgggattgggaaaaatgcgaatacctgaaaaaaaggcggaagcgggctaatttaacccagagctattccgaccacatgaagcggaatttggacaaagttgttttgccttattttaaaaatatgaaaatggacgccattacccctgcggttatcgaggcgtttctggacagcctcatcaaancaaaatataagaataccacgattaacggttactacggcactttcaaaaccatgatgattgaagccgtcgagcgcggggttatagccgcagaccctaccgccaaagtcgagtgcctgataaacgaccgcgatgaaataaagattatcactccccttgaattcaaaaagctgtttgtggtggattggcgcaaggtttgggaaggcaatttcatcgcctgtaccgtgaacaagctggcggctctgtcgggcatgagggtgtcggagattttggggcttaaagggagctgcctgttcgacgaccatatttacgtctgtatgcagcatgacatttacggctacaggccgaccaaaacaaaagacaggcacaacataccgcttccggcttccctgattgccgatttgaagctgctgaaggaaacaagcggggacggctacttgttttccactaacggcgggggcagccccatatgcaggaaaactgttttgatgtatctgcgaaaggcgctggtaaatatcgggattaccgccgccgagattaaggagcggaatttgcatatccacgcatggcggcattttttcaatacggaaatgctgaagggcgggatgaccacagaacaggcgcaggcgataaccacgcacaaaagcgaaaggatgacggaacggtacacgcattttgacccgcttgaatttgtaaaggcgaaagaaatacaagaagccttgttacagcctgtcggcgaanaggcgcaagggccggaagcaggaaaaaaggaaatgccgcttaacgtgttttctttccctgcgtctggcactccgcaagaggaccggaaacaagcttag

SEQ ID NO: 59740 - protein, 424 aa, Unknown
  Obtained from environmental sample
  DOMAIN (205)...(378): Phage integrase family
  misc_feature (1)..(424): Xaa is any amino acid
MTSYSQKEGVMKIHNDFTLYFRVTPSGKRVVYFYAYDENGRRTQGRSTGQTTKTAARVLVNRLLKEGALLPKKDDVPTFGEYAVNWWDWEKCEYLKKRRKRANLTQSYSDHMKRNLDKVVLPYFKNMKMDAITPAVIEAFLDSLIKXKYKNTTINGYYGTFKTMMIEAVERGVIAADPTAKVECLINDRDEIKIITPLEFKKLFVVDWRKVWEGNFIACTVNKLAALSGMRVSEILGLKGSCLFDDHIYVCMQHDIYGYRPTKTKDRHNIPLPASLIADLKLLKETSGDGYLFSTNGGGSPICRKTVLMYLRKALVNIGITAAEIKERNLHIHAWRHFFNTEMLKGGMTTEQAQAITTHKSERMTERYTHFDPLEFVKAKEIQEALLQPVGEXAQGPEAGKKEMPLNVFSFPASGTPQEDRKQA

SEQ ID NO: 59741 - DNA, 396 bp, Unknown
  Obtained from environmental sample
  misc_feature (1)..(396): n is a, c, g, or t
ttgggttcaatatgcggcttgcgaaacaccaatcaaatccatcaatgggtatcaagccaacgcgtcagcgagtttctgtcggggtattttctgataaatgacattccctgttattactggcttttatgccttttaaagctgataaagcttgactcgcttaacagatgcttcatgaaatgggcgcagtcgctaaggcccggcggagatggaaccgaagcctataccatttcattcgacgggaaaacaatccgctcgactgggaagatggacagctatgaaaatccgctgcatatactaagtgcgcactggccgaaactgggcatagccataggccaaaagacggtcgccgagaagagcaacgagattcntgcggtgagggagcttatagggttttaa

SEQ ID NO: 59742 - protein, 131 aa, Unknown
  Obtained from environmental sample
  misc_feature (1)..(131): Xaa is any amino acid
MGSICGLRNTNQIHQWVSSQRVSEFLSGYFLINDIPCYYWLLCLLKLIKLDSLNRCFMKWAQSLRPGGDGTEAYTISFDGKTIRSTGKMDSYENPLHILSAHWPKLGIAIGQKTVAEKSNEIXAVRELIGF

SEQ ID NO: 59743 - DNA, 366 bp, Unknown
  Obtained from environmental sample
  misc_feature (1)..(366): n is a, c, g, or t
atgatagtcgccgacgcgcttaactgccagaaagaaacggctaaagcggtaatcgaaggcaagggagactatttgttttcggttaaggacaaccagcaggtattgaaggaagacatagaaggctatgttcaggacaggcatttgcagaaagcaatggcaatggacacaaccgcaacggtagaaaaaacgggcggcagggtcgagcggaagaccgcatatacaaggtgcgacataggatggctttccggaaaggaggaatgggagggcctggcttgtattggggctgagaacactcaagtttccagcaagaagggagagacaaacgaaaggcattattacatcgcaagctgcggcttgacggcgtag

SEQ ID NO: 59744 - protein, 121 aa, Unknown
  Obtained from environmental sample
  misc_feature (1)..(121): Xaa is any amino acid
MIVADALNCQKETAKAVIEGKGDYLFSVKDNQQVLKEDIEGYVQDRHLQKAMAMDTTATVEKTGGRVERKTAYTRCDIGWLSGKEEWEGLACIGAENTQVSSKKGETNERHYYIASCGLTA

SEQ ID NO: 59745 - DNA, 579 bp, Unknown
  Obtained from environmental sample
  misc_feature (1)..(579): n is a, c, g, or t
atggctgatttgggcgagaccctggtcaaggaaacggaggaattcataaggaccagccgggaagccgtagagggcatgaacgagatattgcagggcattaatcagataaatacttcggtgaaccatgtaaacgacatgagtatggaaaacaaccgtaacttcgacgcgttaaaacgggagacggaaaaatttaacgataccgtaggcgacgagaaacaaaaaatcctcatggtggatgacgacactatccatcttgaaatggcaagcgctgtgctttcaaatgaatatgaggtgtctaccgccaaatccggaaaagaggcgcttagattgttctatcaggggcttgttcccaagttaattttactggatctggtaatgcccgatatggacggatggggcacttttaaaagaataaaagcgataggcgccctgcacaatacccctatagcgtttttcaccgcttcgaacgacccgaaagacaaacggaacgcgcaggaaatgggagctgtcgattacattagaaaaccctatgacgcgaacgacctgttaaagagggtgggcagaatcctcaaaaaataa

SEQ ID NO: 59746 - protein, 192 aa, Unknown
  Obtained from environmental sample
  DOMAIN (73)...(187): Response regulator receiver domain
  misc_feature (1)..(192): Xaa is any amino acid
MADLGETLVKETEEFIRTSREAVEGMNEILQGINQINTSVNHVNDMSMENNRNFDALKRETEKFNDTVGDEKQKILMVDDDTIHLEMASAVLSNEYEVSTAKSGKEALRLFYQGLVPKLILLDLVMPDMDGWGTFKRIKAIGALHNTPIAFFTASNDPKDKRNAQEMGAVDYIRKPYDANDLLKRVGRILKK

SEQ ID NO: 59747 - DNA, 1146 bp, Unknown
  Obtained from environmental sample
  misc_feature (1)..(1146): n is a, c, g, or t
atggaaaatgaagaaaccctcgagaaagaggaaatagagaaacaattcttctcggattccagaatcgtggcaaattacgattttcttgagagtatcggcgtttttgactatgttgacagccttgccagggagatacgcaattataaaacccttcttaccagaggattggatatttttaaccgtaccagtattgatgaaatactggatgccactgtatggcagatttcggatcattttctgccttcatttatcgcttttttatggaagccgattcagaaccgccctgacattaccatacgggcataccgcaactacaagcttgtggaactggatctgaagatagacaacattaccccatttgagtctttttttcaggaattcccccagcctgttaattttgacatgctggcgaaagaacttaacaacgaagaagccattaagccctacagggcggtgcggcctgaaatcgccattcccataatcgggccttttggcctgtacggcattatccttgtcggacgtaagatgctggagacgccgtatacccgggaagaactggtttttatacagcagcttatgtcctttgtgtctcaggcgctcaaaaaccacctgcactatgaacacgcgctgcgggacgtgaaaaccggattatacaaccacggcttttttatgacccgtttaaaagaggaaattgtcaggacaaaacggcaggcccacgcttcatcggtaatcgtaatggatgtggataaatttaaaaatttcaacgacacttacgggcaccttgcgggagatcaggttctggaaaagctggcgcaggttatcaaacagagtgtccgctcggaggatatcccttcgcgttttggaggtgaggaatttaccgttcttttgccctccaccgaaatctcgaccgcgtggagaatttccgaacgcctaaggaccagcgtagcggcgatgcgggtaccctgggaaacgcccctgccgcaggtgacaatcagcttgggcgtgttcgcttttgacaaggacagcgaactggataccgttggcatcctccgccgcgccgatgaggcgttatatgtttccaaagcaaagggcagaaactgcagcaccatctgggatcccggcattattgacagcataataaagtga

SEQ ID NO: 59748 - protein, 381 aa, Unknown
  Obtained from environmental sample
  DOMAIN (206)...(367): GGDEF domain
  misc_feature (1)..(381): Xaa is any amino acid
MENEETLEKEEIEKQFFSDSRIVANYDFLESIGVFDYVDSLAREIRNYKTLLTRGLDIFNRTSIDEILDATVWQISDHFLPSFIAFLWKPIQNRPDITIRAYRNYKLVELDLKIDNITPFESFFQEFPQPVNFDMLAKELNNEEAIKPYRAVRPEIAIPIIGPFGLYGIILVGRKMLETPYTREELVFIQQLMSFVSQALKNHLHYEHALRDVKTGLYNHGFFMTRLKEEIVRTKRQAHASSVIVMDVDKFKNFNDTYGHLAGDQVLEKLAQVIKQSVRSEDIPSRFGGEEFTVLLPSTEISTAWRISERLRTSVAAMRVPWETPLPQVTISLGVFAFDKDSELDTVGILRRADEALYVSKAKGRNCSTIWDPGIIDSIIK

SEQ ID NO: 59749 - DNA, 516 bp, Unknown
  Obtained from environmental sample
  misc_feature (1)..(516): n is a, c, g, or t
atgagcggcagcggaaggggtggagataacaggggaaaccgccggaaacctttcaatcgcagggagcgggaaaaccagtcacacaaccgggactctgccaaaaccggaaaaaaacctgttgatttctccctggacggcggaaagcttgaaaaaaaacgcggaagctttattgagcgtccaaagtgggttccgccgaaaccgcccgcgctttccctcccccctgtttcctgcgcctggtgcggcaaaccgatcaaagatatgtcaacggctatttccgaaccttcagaaggaaagcccgtgcattttgactgcgcgataaacaggattgttgaagaagaagtccttgaaaggggcgatactgtaagctacatcggcggcgggcgttttgggatagtccattacaataaccccccggatataagagatttcaaaatacgaaaaatccttgaatgggagaacaaggaaaaccgttctgaatggcgccttgcaataagcgaatattttacaattacttaa

SEQ ID NO: 59750 - protein, 171 aa, Unknown
  Obtained from environmental sample
  misc_feature (1)..(171): Xaa is any amino acid
MSGSGRGGDNRGNRRKPFNRRERENQSHNRDSAKTGKKPVDFSLDGGKLEKKRGSFIERPKWVPPKPPALSLPPVSCAWCGKPIKDMSTAISEPSEGKPVHFDCAINRIVEEEVLERGDTVSYIGGGRFGIVHYNNPPDIRDFKIRKILEWENKENRSEWRLAISEYFTIT

SEQ ID NO: 59751 - DNA, 363 bp, Unknown
  Obtained from environmental sample
  misc_feature (1)..(363): n is a, c, g, or t
atgatgagcgggaattctgtcagttttggaagggaaggggaggacagggctgttgaggcgctccaggccgcaggaatgagcataattgcccgaaatttccgttcccgctggggggaaattgacataatcgccctggacggtgaaattcttgtttttgtcgaggtaaaggcttattccaaattcggcccggaaagcctggcttacagcgtcagccaaaaaaagcagcgccgaatcatagagacagctaagtattttctctctatcaatcgacaatattatggaagggcgattcgtttcgacatagtttttattggaaatgaggcgattagccatcttgcatcagccttcatggagcgtgtataa

SEQ ID NO: 59752 - protein, 120 aa, Unknown
  Obtained from environmental sample
  DOMAIN (12)...(105): Uncharacterised protein family UPF0102
  misc_feature (1)..(120): Xaa is any amino acid
MMSGNSVSFGREGEDRAVEALQAAGMSIIARNFRSRWGEIDIIALDGEILVFVEVKAYSKFGPESLAYSVSQKKQRRIIETAKYFLSINRQYYGRAIRFDIVFIGNEAISHLASAFMERV

SEQ ID NO: 59753 - DNA, 612 bp, Unknown
  Obtained from environmental sample
  misc_feature (1)..(612): n is a, c, g, or t
atgttaaggctgccaaagcaagttacggaaaagaggggagggctttccgacgcggaacaccagcttatacgcagccatccgatgattgccaacaagattgtggtcaaagaactgcactttctggatgatgtcggtaatatcgttttacagcaccatgaacgctgggacggtacaggctaccccaaccacatagccggggattatattgatataggcgcaaggatagtgtccattgccgacgcgtttgaggccatggtaagccccaagccgtaccgtaattccattacaggcaatcaggcggtgaaaaacctcctgtccgacaattcgcgccgtttcgatccttccatccttaaggcgtttgtccttattatggggatttatcccattggttctattgtccgtctgaacaacggcgcggttgcgcgtatatcagaagttcgcgccattgcgccgttacgccccaaagtgcaggtaattgttgaccaatccaataagatataccgtaatgaacagggcgaatttctcgatttatttacggaaaagagcctgtacatcgtcaaagcaatagacactaaagaatttttggagcaatacgcccagaataatacatga

SEQ ID NO: 59754 - protein, 203 aa, Unknown
  Obtained from environmental sample
  DOMAIN (1)...(85): HD domain
  misc_feature (1)..(203): Xaa is any amino acid
MLRLPKQVTEKRGGLSDAEHQLIRSHPMIANKIVVKELHFLDDVGNIVLQHHERWDGTGYPNHIAGDYIDIGARIVSIADAFEAMVSPKPYRNSITGNQAVKNLLSDNSRRFDPSILKAFVLIMGIYPIGSIVRLNNGAVARISEVRAIAPLRPKVQVIVDQSNKIYRNEQGEFLDLFTEKSLYIVKAIDTKEFLEQYAQNNT

SEQ ID NO: 59755 - DNA, 1677 bp, Unknown
  Obtained from environmental sample
  misc_feature (1)..(1677): n is a, c, g, or t
ttggaaactctctttccaagaccaataccggttaccttgcacgctacgccgcgcaagtcggctccgccgcgcatggcgcggtctttaattctgatccgtgtaaaggaaattaaaatgcaatactctggggcgcgaatattaattgaatccctaattgaacagggagtggataccgtctttggctatcccggtggagcggttttatttatttacgatgaactctacaaacatcgcgacaagattcgccatatccttgtcagccacgaacagcatgccgcccacgccgcagacggttacgcgcgttcaactggaaagactggggtttgcatcgccacttcagggcctggcgctacgaaccttatcacgggaattgccacggcgtatatggactcaacgccgctggtcgcgattacgggcaacgtacccacaggcattttaggcaaggacagttttcaagaggtggatatcacgggcatctccatgccggtggtgaagcacaactggattgtaaaaaatgttgacgaccttgccgaagtgatacgcgaagcgtttttactcgccgcctcaggccgcccgggaccggtactcatcgatataccgaaagatataacggaacgcatggccgaatggaatccttcaaagaaagacggattaaaagacggttccctttcagcccgtgccaagcgttttgacgagcgcacgttcaggatcaggttttcagaagaggaaataaatatcgcttcggaaatgattaagaaggctcagcgtcccctgctctacgccggaggaggggtcatcagcgcaagggcggaggaagaacttgtcgctctcgccgaaaggcttaacgcacctgtggcattgagcctgatgggaataggggcgattccaaaagatcacagtctctgcacggggcttatcggaatgcacggaaccatggcgagtaacaaggcgacgcagaaagcggatctgctcattgcgattggagcgcgtttttccgaccgcgttacaagcaagccggatatgttcgcaaagacagcgaaaataattcactttgacattgatccggctgaaatcagcaaaaacattgaaacccacgcaagtgttgtgggaaatttaaaggatactcttaaaagcctgctgttaaaacttccggcgcgccttaagaccgaatggcacggcgaaatcgataaatggaaaacccatctgcctcaaacttacacacacgaagttacgtttattaaaaacgcgctccacccccggtttatcatagaagaaaccgcaaaggcgcttggccccgatacaatcgccgttaccgacgtaggccagcatcagatgtgggcggcgcaattttttcccgcggaaaggccaaggtcatttatcagctcaggcgggcttggaacgatgggcttcggccttggggcggcttgcggcgcgaaaatcgcgaatccccaaaaacccgtcgtgctctttacaggggacggaagtttcagaatgaactgcgcggaaatggcaactgtcagcaataataaaatcccgctcttaataatagtttttaacaagcggggttctcggcatggtaaggcagtggcagagtttcttttacgaaaaaagatactcgcaaacaaatctcggcgaagcccccgactttttaaaactgtgcgaggcttacggcattaa

SEQ ID NO: 59756 - protein, 558 aa, Unknown
  Obtained from environmental sample
  DOMAIN (439)...(552): Thiamine pyrophosphate enzyme, C-terminal TPP binding domain
  misc_feature (1)..(558): Xaa is any amino acid
METLFPRPIPVTLHATPRKSAPPRMARSLILIRVKEIKMQYSGARILIESLIEQGVDTVFGYPGGAVLFIYDELYKHRDKIRHILVSHEQHAAHAADGYARSTGKTGVCIATSGPGATNLITGIATAYMDSTPLVAITGNVPTGILGKDSFQEVDITGISMPVVKHNWIVKNVDDLAEVIREAFLLAASGRPGPVLIDIPKDITERMAEWNPSKKDGLKDGSLSARAKRFDERTFRIRFSEEEINIASEMIKKAQRPLLYAGGGVISARAEEELVALAERLNAPVALSLMGIGAIPKDHSLCTGLIGMHGTMASNKATQKADLLIAIGARFSDRVTSKPDMFAKTAKIIHFDIDPAEISKNIETHASVVGNLKDTLKSLLLKLPARLKTEWHGEIDKWKTHLPQTYTHEVTFIKNALHPRFIIEETAKALGPDTIAVTDVGQHQMWAAQFFPAERPRSFISSGGLGTMGFGLGAACGAKIANPQKPVVLFTGDGSFRMNCAEMATVSNNKIPLLIIVFNKRGSRHGKAVAEFLLRKKILANKSRRSPRLFKTVRGLRH

SEQ ID NO: 59757 - DNA, 822 bp, Unknown
  Obtained from environmental sample
  misc_feature (1)..(822): n is a, c, g, or t
atgatgattaaaccgttttcttctcttagttcgtgtttgttcgtagttttattttctcttttaaccgcttcactaacaggttgcgtaaaacaaaagcacggactcaccatcatagacggcacgctctctgtcggcgtggaaatcggctacccgcctatggaatactacgacaccgacagcgttaccctcatcggcttcgacatagaacttacaaaagccatcgccggcaaattgggattgaccgtcaaatacatcgacatcgcttgggacagtatttttgcgggactggagacaaacaagtatgacattgcggttaatataaccattttgcccgaacggttacaaaaatttaattttaccaaaccctacatcgacagttccatgaccattgttaccgcaaaaaactcccctgtaaaaattgaaagacccgaagacatcgaaaggtacagggcggcttatcagggcgacactacggcgcagtattttgcggaaagattaaagaagaacggcgtctcttttacatcgttctcatacgataaaataacaaattgctttgacgatcttgcccttgggcgcgtcgatttaatagtcgcagacaacattgccgcctgcgattacgcgggaaaagaaaatagtccatttgaaattgtatggcagggggcatcgggcgaattaatcggtatttgtttaaagaaaggaaacgacgctttaaccgccgcgattgacaacgctctggacgaactgtttaaggacggcgctatgcgggaaatatctcttaaaatatttaaccgcgatttggtttcgccggcgagagatttctga

SEQ ID NO: 59758 - protein, 273 aa, Unknown
  Obtained from environmental sample
  SIGNAL (1)...(27)
  DOMAIN (42)...(264): Bacterial extracellular solute-binding proteins, family 3
  misc_feature (1)..(273): Xaa is any amino acid
MMIKPFSSLSSCLFVVLFSLLTASLTGCVKQKHGLTIIDGTLSVGVEIGYPPMEYYDTDSVTLIGFDIELTKAIAGKLGLTVKYIDIAWDSIFAGLETNKYDIAVNITILPERLQKFNFTKPYIDSSMTIVTAKNSPVKIERPEDIERYRAAYQGDTTAQYFAERLKKNGVSFTSFSYDKITNCFDDLALGRVDLIVADNIAACDYAGKENSPFEIVWQGASGELIGICLKKGNDALTAAIDNALDELFKDGAMREISLKIFNRDLVSPARDF

SEQ ID NO: 59759 - DNA, 636 bp, Unknown
  Obtained from environmental sample
  misc_feature (1)..(636): n is a, c, g, or t
ttgacaacgctctggacgaactgtttaaggacggcgctatgcgggaaatatctcttaaaatatttaaccgcgatttggtttcgccggcgagagatttctgatatacttattactatggaagaaattaaagaattatatacgctgattaaaaaagccaaacaccttgtcgctcttacgggcgcgggtgtaagcacgctttcgggtatccgcgactttcgcggcaagaacggtctttacaacgatatggacgcggaaaaaatttttgacatcaattattttgaacaagacccgtcgttttattacaaaatgtccggtgatttcatttacaatcttgatgagaaagaagcgtccatagtccacattgtgcttggagaacttgaacagcgcggttacttaaaagcgttgattactcaaaacatcgatcttcttcaccaaaagggcggaagcaaaaacgtgatagagattcacggctcgccttcaatgcattactgtatgcggtgttcgggcgtaagagtgagttatgaagaagtagcggttattgtccgcaagggagaaatgcctaagtgcccgaagtgcggcagggtattaaaaccggctatcacttttttcggcgaaaggcttcggcggacgcgttag

SEQ ID NO: 59760 - protein, 211 aa, Unknown
  Obtained from environmental sample
  DOMAIN (60)...(209): Sir2 family
  misc_feature (1)..(211): Xaa is any amino acid
MTTLWTNCLRTALCGKYLLKYLTAIWFRRREISDILITMEEIKELYTLIKKAKHLVALTGAGVSTLSGIRDFRGKNGLYNDMDAEKIFDINYFEQDPSFYYKMSGDFIYNLDEKEASIVHIVLGELEQRGYLKALITQNIDLLHQKGGSKNVIEIHGSPSMHYCMRCSGVRVSYEEVAVIVRKGEMPKCPKCGRVLKPAITFFGERLRRTR

SEQ ID NO: 59761 - DNA, 1617 bp, Unknown
  Obtained from environmental sample
  misc_feature (1)..(1617): n is a, c, g, or t
atgccgaagacacaaataatatttcaggctccatacttttattatagcacaataagaataaaacgtaaagttagaggtgatgcacattatcgctgcttttataactcccgtctttctgctacaataaaatcaatgagtatacgagacagatacgcgccttcccctacggggcttcaacatatcggcggaataagaacggcgctttttaattacctctttgcccgttcgggcggcggaaaatttatcctgcgcctagaggataccgacagaacacgctacgacgaaagctttgtgaaaaatctttacgatacctttgactggctgggaataaaatgggacgagggaccagattgcggcggaccgttcagtccctatgtgcagtccgagcgcaccgctcactataaaaaatacgcgcaggagcttcttgataaagggcaggcgtactattgcttttgctcatcggaaagaattgaaaaagtgcggcaggaaagagaagccgcacattcttcggagagcggttacgaccgcctctgccgcaagatcgatcctgcggaagccgcaaagagagccgccgcgggcgaaccctgtactgtcagattaaaaatcccgctcggcgagacgacacgctttaacgatcatctgctcggcgatattgaatggaagaacgatgacattaaccccgaccccgtcctgttaaaatcggacggcttccccacttaccaccttgcgaatgtggtggacgatcatttaatggaagtgactcacgtacttcgcgctcaggagtggcttgcgtccacgcccttgcatgtgataatgtaccgcgcctttggctggacgcctcctgagttctgccaccttccgatggtgatggggcaagacggcaaaaaactttccaaacgccacggcgcaacgagtattgatgaattccgcaagcaggggtatcttcccgccgcgctgataaattacatcgcgctgttgggcgcttcctacgaagaaggcaaagagatttacacccccgaagaacttgcgcagcgtttcagtcttgaaaaactaaataaagcgcccgctgtttttgattacaaaaaacttgagtggtacaacggtcagtatatcagaatgatgagcgatgaggagtttacctctctctgccttccgtttgcggtagaagcgggattgttcggcggcgcaaagagcgaaccgtcaacacagcagaaagaaatttttaccgccgcaatgccgcttgtaaaagagaggcttgtctttcttaacgaagtccctgaaaaaatagcctacctgtttagcgagccggaagtccccgcgcctgaagaatttatccccaaaaagagcgaccttgccaagacggttgagattttacagataggcaaggaacttgtacgcgaattggcgggtgcgccgagcgacgaacaggcggaagagtttatcaaggcggaggcggaaaagagggaaataaaactcggcgaccttatgatgcctttgcgcgttgcgattacgggaagccgcgtaagcccgccgctttttggatcgcttcgcatacttggagcggaaaaatccgcggagcgagtgcagagagcgttggataaattaaaccgaacttaa

SEQ ID NO: 59762 - protein, 538 aa, Unknown
  Obtained from environmental sample
  DOMAIN (46)...(365): tRNA synthetases class I (E and Q), catalytic domain
  misc_feature (1)..(538): Xaa is any amino acid
MPKTQIIFQAPYFYYSTIRIKRKVRGDAHYRCFYNSRLSATIKSMSIRDRYAPSPTGLQHIGGIRTALFNYLFARSGGGKFILRLEDTDRTRYDESFVKNLYDTFDWLGIKWDEGPDCGGPFSPYVQSERTAHYKKYAQELLDKGQAYYCFCSSERIEKVRQEREAAHSSESGYDRLCRKIDPAEAAKRAAAGEPCTVRLKIPLGETTRFNDHLLGDIEWKNDDINPDPVLLKSDGFPTYHLANVVDDHLMEVTHVLRAQEWLASTPLHVIMYRAFGWTPPEFCHLPMVMGQDGKKLSKRHGATSIDEFRKQGYLPAALINYIALLGASYEEGKEIYTPEELAQRFSLEKLNKAPAVFDYKKLEWYNGQYIRMMSDEEFTSLCLPFAVEAGLFGGAKSEPSTQQKEIFTAAMPLVKERLVFLNEVPEKIAYLFSEPEVPAPEEFIPKKSDLAKTVEILQIGKELVRELAGAPSDEQAEEFIKAEAEKREIKLGDLMMPLRVAITGSRVSPPLFGSLRILGAEKSAERVQRALDKLNRT

SEQ ID NO: 59763 - DNA, 1269 bp, Unknown
  Obtained from environmental sample
  misc_feature (1)..(1269): n is a, c, g, or t
gtgctgtttcttatcatccttgtggtcggcggtcttgcgttttttttctctatgcggcagattgtaaggaccaataggacgaatgagttgtctcagatgcttgaaatcaagcggataaatttagaagcctacgtaatgaacgagatcgccatcgtcaagaagatggcgggttccccgcttatcaaggattatttagccgaccctaccgaagcgaagctgagaatgcaggctgttaaagagatcgccgcctaccgcgcggcttttgagaacaagtcggtgttttggattagcgatagagataaagtattttacagcaacgacaacgcgccgtacgtggttgatccgaattctcccgataactattggtatccactgactctttacaagacggaagtgtataacttcaatatcaattacaatcctgacctcgacatgattaacctctggataaacgcgccggtttttgacgacggcaagaaaccgctgggtatggtgggcaccggccttgagttatccgcgtttgtgagcgcgcttttcagcgatttggacgatagaatggaactttattatttcaacgccgacggggagataaccggcgctaggaatattgagtttatatcgtcaaagaagaagataggcgatgtgtctatcggtatgcgcgtcgattttttgacgattgccgccaaaggggatatatccggcgcgaaggatatcaagcgcgtctccttgaagaggaatatagacgacgaggttacccaaggtgtcttggccttggcgcaaaacctttcgccgagcgagacgcggacgcttacggtgccgcacggcaatcttgtaatcagcacggttccgcaactcaaatggtacgctattgcgtatatgccggacagcatagacgactataagacctctatgaccgcactgtttcttgtggtgcttgtcgtcatattgctgatattcatcatcttcaacgtctttgtctccgattttctcaagtcccagcacgagacgatgttgtcgcttgaacttgccagaaatgaggcggagatagccaatcggagcaaatcgaatttcctcgccgccatatcccacgaaatccgcacgccgatgaacgcgattatcgggatagcgcagatacagctgcaacgcgagaatttgccggacgactacgcgacggcgttgcggagaatatacggttcggccaataaccagctcggtatcgtcacgatcttttggatatgtccaagattgagacgggcaagatggtactga

SEQ ID NO: 59764 - protein, 422 aa, Unknown
  Obtained from environmental sample
  SIGNAL (1)...(19)
  DOMAIN (353)...(415): His Kinase A (phosphoacceptor) domain
  misc_feature (1)..(422): Xaa is any amino acid
MLFLIILVVGGLAFFFSMRQIVRTNRTNELSQMLEIKRINLEAYVMNEIAIVKKMAGSPLIKDYLADPTEAKLRMQAVKEIAAYRAAFENKSVFWISDRDKVFYSNDNAPYVVDPNSPDNYWYPLTLYKTEVYNFNINYNPDLDMINLWINAPVFDDGKKPLGMVGTGLELSAFVSALFSDLDDRMELYYFNADGEITGARNIEFISSKKKIGDVSIGMRVDFLTIAAKGDISGAKDIKRVSLKRNIDDEVTQGVLALAQNLSPSETRTLTVPHGNLVISTVPQLKWYAIAYMPDSIDDYKTSMTALFLVVLVVILLIFIIFNVFVSDFLKSQHETMLSLELARNEAEIANRSKSNFLAAISHEIRTPMNAIIGIAQIQLQRENLPDDYATALRRIYGSANNQLGIVTIFWICPRLRRARWY

SEQ ID NO: 59765 - DNA, 1686 bp, Unknown
  Obtained from environmental sample
  misc_feature (1)..(1686): n is a, c, g, or t
ttggatatgtccaagattgagacgggcaagatggtactgattccggttgaatatgatacgccgagcctgataaacgacgccgtgcagctcaacgtcgtcagaatcgggtcgaagcagattgagttcaagattgacattgatgagaatctgccgtcgaagctttacggcgatgagttgcggattaaacagatactgaacaacctgctttccaatgcgataaagtacaccggcaagggtagtgtaaaactgtcgataggttatttaacggataacaacggcgtgatgctgcgttttgtcgtagaggataccggacagggtatgaaactggaggacaaggatcggcttttttcggagtatatgcgtttcaacgctcaggccaaccgcgccacggaggggacggggctcggtttgaatataaccaaaaagttggtggagatgatggacggcaccatcagcgtggagagcgagtacggcaagggcagcgtattcaccgtgactatccggcaaaagccggtggaatgcaccgcgataggcgcgagcattgtcgagcagctgagcaaattcgtgttcaccggcgacaggcacacggcgaatttgcagatcgccgccgaacctatgccatacgggtgcgtgcttgtggtggacgacgtggccacgaacttatatgtggcggacgggttgctgtcgctctatcaattaaaaatagagacggcggacagcggtttcgccgccattaggagagtggagaacggctacatttacgatatcatcttcatggatcacatgatgccgcgcatggacggcatagagacgacgcggaagatacgcgaactcggatacaagggcacgatagtggcgctgaccgccaacgccattgtcggcaacgacgagatgttcatacagaagggattcgacggattcatctccaagccaatcaacgtccgccagttagacgagatcttaaaaaagttcgtcagcgacaggcatcctgaagaggcgaaaaaatacgccgttgaaacagcgggtcagggagaccgccgccaaggggtaaacctgcgcgacggcgcgaatcaggatcaacaagcggcggttgccgtcaaacgttctaatccggtcaacttcgcggcgaatcccagattactgaaattcttttgccaagacgtggagaaggctatcgtcacgctgcgggaaacggtaaaaaacggcgacgcgaaactcttcacgatcaccgcccacgccatgaaatcggcattggcgaacgtcggggaagatgatgcgtcgcgggttgcggccgcactggaaagcgtcgggcgaaacggcgatatcgggtgcgtctcggcgagtgtggatgaatttatccgaaccttagagtcgttaatcgataaattcggcggtacggcgaaatccgacgcgggcggtactgataaaccgagcgatcccgtcgcggcggaagataccgattatctcatggaacagctgcgtataataaaatcagcctgcgaaaattacgacgacgacgcggtctacgccgccctcgaccggttgaaggagaggcggtggaagttggagacggcggaagcgttagagaagatacgcgaggcgctgtacgtatccagcgatttcgagggagcggcgaaacagtgcaagtcgcttgcgggcgcgtacggtaaggagataattccatga

SEQ ID NO: 59766 - protein, 561 aa, Unknown
  Obtained from environmental sample
  DOMAIN (379)...(462): Hpt domain
  misc_feature (1)..(561): Xaa is any amino acid
MDMSKIETGKMVLIPVEYDTPSLINDAVQLNVVRIGSKQIEFKIDIDENLPSKLYGDELRIKQILNNLLSNAIKYTGKGSVKLSIGYLTDNNGVMLRFVVEDTGQGMKLEDKDRLFSEYMRFNAQANRATEGTGLGLNITKKLVEMMDGTISVESEYGKGSVFTVTIRQKPVECTAIGASIVEQLSKFVFTGDRHTANLQIAAEPMPYGCVLVVDDVATNLYVADGLLSLYQLKIETADSGFAAIRRVENGYIYDIIFMDHMMPRMDGIETTRKIRELGYKGTIVALTANAIVGNDEMFIQKGFDGFISKPINVRQLDEILKKFVSDRHPEEAKKYAVETAGQGDRRQGVNLRDGANQDQQAAVAVKRSNPVNFAANPRLLKFFCQDVEKAIVTLRETVKNGDAKLFTITAHAMKSALANVGEDDASRVAAALESVGRNGDIGCVSASVDEFIRTLESLIDKFGGTAKSDAGGTDKPSDPVAAEDTDYLMEQLRIIKSACENYDDDAVYAALDRLKERRWKLETAEALEKIREALYVSSDFEGAAKQCKSLAGAYGKEIIP

SEQ ID NO: 59767 - DNA, 894 bp, Unknown
  Obtained from environmental sample
  misc_feature (1)..(894): n is a, c, g, or t
ttgacagattcggccgagcacgcgctgacggttgacatggcgcttggctgttccaccaactcggtgctgcaccttttcgcaattgctcgtgaacgcggttttaggcttaacctgaacatggtgaacgagatcagcggaagaacgccgaacctatgtcggcttgccccggcgggcaaacaccacattcaggatctgcatttcgcggggggagtgtccgccgttatgcgggagctgggaggccttttaaaccgggaggaacttacggttaccggcaagacggctggcgagaacgtgcaaaacgcgcttgtcaaaaacagcgaggtaattcagcgctacgctcctacaggcggccttgcggccctgttcggcagtcttgcgcctgacggcgcggttgttaagcgcagtgccgtaaaaaaggagatgcttgattttaccggaagggcgagggtgttcgacggcgaggaggccgccgtcgccgcaatatacggcgggaaaattgaaaagggcgatgtggttgtcatacgctacgaagggccctcaggcgggccgggaatgcgcgagatgctccaggcgacctcggcgatcgtcggcatgagtcttgacgcggatgtggcgctgatcaccgacgggcgcttttccggcgcgacgcgaggcgcggccatcgggcacatttcccccgaagcggccgctggcggtcctattgcctatgttagcgagggcgataaaattcacattgatattgaacgcaacgccatttcattgctcgtatccgctgaagagatgcagaagcgcagggataccatgcgcttaagagagactgaggttctaagcgggtacttgaagcgatacgcgaaagctgtctcatccgccgataaaggggctgtactaaattga

SEQ ID NO: 59768 - protein, 297 aa, Unknown
  Obtained from environmental sample
  DOMAIN (1)...(297): Dehydratase family
  misc_feature (1)..(297): Xaa is any amino acid
MTDSAEHALTVDMALGCSTNSVLHLFAIARERGFRLNLNMVNEISGRTPNLCRLAPAGKHHIQDLHFAGGVSAVMRELGGLLNREELTVTGKTAGENVQNALVKNSEVIQRYAPTGGLAALFGSLAPDGAVVKRSAVKKEMLDFTGRARVFDGEEAAVAAIYGGKIEKGDVVVIRYEGPSGGPGMREMLQATSAIVGMSLDADVALITDGRFSGATRGAAIGHISPEAAAGGPIAYVSEGDKIHIDIERNAISLLVSAEEMQKRRDTMRLRETEVLSGYLKRYAKAVSSADKGAVLN

SEQ ID NO: 59769 - DNA, 993 bp, Unknown
  Obtained from environmental sample
  misc_feature (1)..(993): n is a, c, g, or t
atgacaggaatccggctcattaagagcgagaggttatttcagccggaaatgctttctctggcgcgaaagatacaagggtttacccagagtgagttatatacgcaatcaggtatatcgcaggcgcatctctcaaagattgaacaaggtttgcaggcaccgactgaagaacatatcgaaaaactttctctagtgcttgggtttcctccggatttctttttccaaaacaaccgatattttccacccataacgccgtttcatcgaaaaagaacatctcttggtaaaaaggcacaggaacaagctgaagcaatagctaatttaaaaagaatacatctagaaaaactgcttactgcgtttgatattgaaaaaattatcccaaaactggaaatagaagaatatggaacaccagaaaaagtagctcaggttctaagaacatatttacagcttcccaaagggcctattcaaaatcttgttatggtacttgaagaccatggggtttttatctttcttgaggattttatttctttacaattagccggatttacgctgataggaagcgacacaactcctattatatttataaacaaagaagcgccgggcgacgcggaaagattgacgcttgcgcacgaactggggcatattgtgatgcacgcaataataagtaaaagcgtagaagatgaagcgtggagttttgctgcagagtttatgatgccgaggtctgatatttctattgaactgcgcagagcccggaaagtggttgattttgccgatttgaaaagaaaatggaaaatatcaatggtagcccttatgagacgttcccatgaactaaattttattagcgacacccactaccgttatttgatgcaggcgatggcccgctaccgcattgaagaaccggttcaaacacccaaagagtatccttctttgtttgatgaattaataaccaaatataaaaccgaatatgattattcagatgaagaaatagcaaagtattaa

SEQ ID NO: 59770 - protein, 330 aa, Unknown
  Obtained from environmental sample
  DOMAIN (160)...(273): Domain of unknown function (DUF955)
  misc_feature (1)..(330): Xaa is any amino acid
MTGIRLIKSERLFQPEMLSLARKIQGFTQSELYTQSGISQAHLSKIEQGLQAPTEEHIEKLSLVLGFPPDFFFQNNRYFPPITPFHRKRTSLGKKAQEQAEAIANLKRIHLEKLLTAFDIEKIIPKLEIEEYGTPEKVAQVLRTYLQLPKGPIQNLVMVLEDHGVFIFLEDFISLQLAGFTLIGSDTTPIIFINKEAPGDAERLTLAHELGHIVMHAIISKSVEDEAWSFAAEFMMPRSDISIELRRARKVVDFADLKRKWKISMVALMRRSHELNFISDTHYRYLMQAMARYRIEEPVQTPKEYPSLFDELITKYKTEYDYSDEEIAKY

SEQ ID NO: 59771 - DNA, 2067 bp, Unknown
  Obtained from environmental sample
  misc_feature (1)..(2067): n is a, c, g, or t
atgaatactacagaattaatgactatattggtttttcaggttgggattattctatttgccgtgcgtttaggcgggttttttgcgcgtaaaattggcattccttccgtgttaggtgaattgcttataggcgtggtaataggcccttacgcgttaggctgtatcgcccttcccggttttcctgagggactttttcctttaagcgaatttagttctatagcggttagtaccgagttgtacgcgtttgccacagttgcctccattattttactttttttctccgggttggaaacggatataggtttgtttttaaaatattcggttgcgggcgtggtaataggacttggcggagttttattttcctttgtaattggggatttatgcggtattctgcttcttaaaacttcatttcttgatacgcgatgtttatttttaggggtactgtcaaccgcgacttcggtaggtattaccgccagaattttaagtgatagaaaaaagatggactctcccgaaggagttaccattcttgccgccgcggtatttgatgacgtattgggaataatcatgctggccgtagtgcttgggataaccgctttgcttacaggacatgcggagggtaatttttccgcgctggcaattcttggtattgccgggaaagcgttcggcatttggctgggatttaccgtattgggtttggtattttcacgtcagcttgcttcgttcttaaaactatttaaaaacaattctgatttctctattcttgcgtttggtctggcccttattattgcaggcttttttgaaagacacggcggacttgcgatgattatcggcgcttatattacgggtctctccctatccaaaacggatattgccgcggtgatacagggaaggcttgaaggactatatgaatttttcgttcccgtattttttgccgttatgggaatgatggtaaatattcgggaaatactttccgcggatgttttaatttttggcgggatatacactttggcggcaatttttgcaaaggtaatcggttgcggcggacccgcgctccttcttggttttaatgttaaaggggcgttacgaatcggggtaggcatggttccgcgcggtgaggtcgcgcttatcattgccggtattggattaacgatgggcgttcttgacaaccagcttttttcaattgtaattctattaactttaatttctactatcatagccccaccgcttttaaacgcgtccttaaaaattaaagggcagggaacaagaaagatagtcagcgacggagatatcacctgtttaaaatgggattttgattcccatgacgttgcaaaacttatgttggacaggttattaattgacattcgcgccgaaggtttttatgttcagataatgaattttgacgataacatcgcccttgcgcgtaaagatgatatttccctttcgataagttgtgaaggaagcgccgttaccgtagagacttcaaaatcggatttaccatttgtaaaaaacgtcgtttatgaagatataataaatctttcagaatccatgcagaagttaaaagactcaatgaacactacggcgatgaagaaggaactctttgaccgcaggggaagaaccaacaacacccttctttcattaatagaacccggttccattattcttgatcttaaaggaaatacaaaggaagaaataatccgtgaattggttgatatgctctttacgcagaagaaactgttggatcgcgaacttgttttaaccgacgtatttgaacgggaaaatatcatgagtaccagcatgggatacggaatagttattccccacgcgaaaaccgacggtgttaaagatacggttgtggcggtgggtattaaaaaagagggaattattcttgatccgtcggataaccagccgtcccgtctttttatactggaagtttcccccagaaaagacggtccccatttgcaattcctttcggcgttaggcgccattttaagggacgagtcaattcgtcaggctctgattaacgccaaatccgtggaagaagcggctaatttattgcataataagagataa

SEQ ID NO: 59772 - protein, 688 aa, Unknown
  Obtained from environmental sample
  DOMAIN (544)...(687): Phosphoenolpyruvate-dependent sugar phosphotransferase system, EIIA 2
  misc_feature (1)..(688): Xaa is any amino acid
MNTTELMTILVFQVGIILFAVRLGGFFARKIGIPSVLGELLIGVVIGPYALGCIALPGFPEGLFPLSEFSSIAVSTELYAFATVASIILLFFSGLETDIGLFLKYSVAGVVIGLGGVLFSFVIGDLCGILLLKTSFLDTRCLFLGVLSTATSVGITARILSDRKKMDSPEGVTILAAAVFDDVLGIIMLAVVLGITALLTGHAEGNFSALAILGIAGKAFGIWLGFTVLGLVFSRQLASFLKLFKNNSDFSILAFGLALIIAGFFERHGGLAMIIGAYITGLSLSKTDIAAVIQGRLEGLYEFFVPVFFAVMGMMVNIREILSADVLIFGGIYTLAAIFAKVIGCGGPALLLGFNVKGALRIGVGMVPRGEVALIIAGIGLTMGVLDNQLFSIVILLTLISTIIAPPLLNASLKIKGQGTRKIVSDGDITCLKWDFDSHDVAKLMLDRLLIDIRAEGFYVQIMNFDDNIALARKDDISLSISCEGSAVTVETSKSDLPFVKNVVYEDIINLSESMQKLKDSMNTTAMKKELFDRRGRTNNTLLSLIEPGSIILDLKGNTKEEIIRELVDMLFTQKKLLDRELVLTDVFERENIMSTSMGYGIVIPHAKTDGVKDTVVAVGIKKEGIILDPSDNQPSRLFILEVSPRKDGPHLQFLSALGAILRDESIRQALINAKSVEEAANLLHNKR

SEQ ID NO: 59773 - DNA, 729 bp, Unknown
  Obtained from environmental sample
  misc_feature (1)..(729): n is a, c, g, or t
atgagcaagatcaacgtaacagtatggaacgaatacagagaagagcaaaaagaaaaagccgtcttcgacatttatcctcaagggttgcacgtaacaatttccgaattccttaacaaagacgatagcataaacgccaaaaccgccgttttttcagagccggaacacggtttaacggacgccgttcttgacaataccgacgttttgctctggtgggggcacatgcaccatgaggacattgatgataaaatcgcttcccgcgtagttgaacgcgtacagcgcggcatgggcatcatctttcttcattccgcgcacaaatcaaaacctttcatgcgcctcttgggaacaagcggctcgctgagttggagggaagcgcacgaaagaagccgcgtctggacatgtacgccgtcccaccccatcgcaaagggcgttcctgaacaatttgttcttgaatgtgaggaaacgtacggcgagcccttcgggattcccgcgcctttgcagacggtctttataagctggtttcagggcggcaatgttttcagaagcggcgtaacatttgtgcgtgaaaacggcaggattttttattttcaacccgggcatgagacttatcctgcttatcacaatgagaacgtacagcggataattacaaacgctgttaagtgggcgaatcctgttgttaaggttgattcgcttgaatgcccgaatgtacaggcgttggaaaaattgatgtaa

SEQ ID NO: 59774 - protein, 242 aa, Unknown
  Obtained from environmental sample
  DOMAIN (4)...(239): Protein of unknown function (DUF1037)
  misc_feature (1)..(242): Xaa is any amino acid
MSKINVTVWNEYREEQKEKAVFDIYPQGLHVTISEFLNKDDSINAKTAVFSEPEHGLTDAVLDNTDVLLWWGHMHHEDIDDKIASRVVERVQRGMGIIFLHSAHKSKPFMRLLGTSGSLSWREAHERSRVWTCTPSHPIAKGVPEQFVLECEETYGEPFGIPAPLQTVFISWFQGGNVFRSGVTFVRENGRIFYFQPGHETYPAYHNENVQRIITNAVKWANPVVKVDSLECPNVQALEKLM

SEQ ID NO: 59775 - DNA, 1089 bp, Unknown
  Obtained from environmental sample
  misc_feature (1)..(1089): n is a, c, g, or t
atgggagaaaagcttaagtacgggataatagggtgcgggggaattgcggagaataagcatcttccggctataaaaaaacttaataatattgaaataaccgctttttgcgacataattccggaacgggcggaaaaagcgaataaagagtacggcgctggaaagggcaaggtattcaaggattaccgcgagcttgtcaaggaaaatcttgacgccgttattgtgttgacacctaacaattcccattgtgaaattacggttgccgcgttaaacgcgggcaaacatgtattgtgcgaaaaacctatggctacaaattataaagaagccaaagcgatgattgccgcccgtgacaagagcggaaaacttttaaccataggctatcagaacagattcagggcggacagcctttaccttaaagccgaatgtgataacggagcattaggcgaaatatattttgccaaggcgacggcgatccgcaggcgggcggttcccacatggggagtttttcttgacgaggaaaaacagggcggcggccctttaatagacataggaacccacgctctcgaccttactttgtttatgatgaacaattacgagcccttgtacgcggtaggaacaacttatcacaaactgaacaaagataaaaatacaggcaacgcatggggcgactgggatacaaaaaagtttaccgtggaagattccgcgtttggatttatcgtaatgaaaaacaacgctacgattattcttcaaagcagttgggcgttaaacacaacggaagtaagggaagcggttacaactctgtgcggcacaaaagcaggagctgatatgccggcgcagggagaacttgtcattaacggcgtaaaaaacggaaggcagtacatatacaagccggattttaaagcgggcggagtcgctttctttgacggaacaaatgaaaaatcagccgatgttgaagcgcggactttcgcgcaggcggtacgcggcaagggcaaactgtatgtgcaggccgaagaagcggcggttgtaacaaaaattcttgaaggcatctacaaatccgccaaaacgggcaaaccccattattttgaggactaa

SEQ ID NO: 59776 - protein, 362 aa, Unknown
  Obtained from environmental sample
  DOMAIN (5)...(126): Oxidoreductase family, NAD-binding Rossmann fold
  misc_feature (1)..(362): Xaa is any amino acid
MGEKLKYGIIGCGGIAENKHLPAIKKLNNIEITAFCDIIPERAEKANKEYGAGKGKVFKDYRELVKENLDAVIVLTPNNSHCEITVAALNAGKHVLCEKPMATNYKEAKAMIAARDKSGKLLTIGYQNRFRADSLYLKAECDNGALGEIYFAKATAIRRRAVPTWGVFLDEEKQGGGPLIDIGTHALDLTLFMMNNYEPLYAVGTTYHKLNKDKNTGNAWGDWDTKKFTVEDSAFGFIVMKNNATIILQSSWALNTTEVREAVTTLCGTKAGADMPAQGELVINGVKNGRQYIYKPDFKAGGVAFFDGTNEKSADVEARTFAQAVRGKGKLYVQAEEAAVVTKILEGIYKSAKTGKPHYFED

SEQ ID NO: 59777 - DNA, 1149 bp, Unknown
  Obtained from environmental sample
  misc_feature (1)..(1149): n is a, c, g, or t
gtgtcgtcttcagccattgagcagatgacggccaatattaattcggtaaccaaaactcttgcggacaacaacaaaaacgtcgtcgctttgaccgaagcgtcagaaaacggaaaaacgggcgttcagacggtggcgcaggagatacaggaaatagcgcgggattccgaaggccttttggaaataaacgccgtaatggacaatatcgccagccagaccaacctgctttcgatgaacgcggcaattgaagcggcccacgccggagaggcgggcaaaggctttgccgtagtcgccgatgaaatccgcaagctggcggaaagttccagcgcacagtcaaaaactaccacggcaatgcttaaaaaaataaaagcctccatagacaacattaccaaatcatccaacgaagtgctggcgcgtttcggcgcgatagacacaagcgtaaaaacagtttccgagcatgagcaaaacatcttaaacgcgatggaagagcaggaacagggaggaaaacaaatactggaatccataagccgcctgcgggatgtaacggcttcggtcaagaaggggtctgatcacatggcggcatcgggattgactcttgtcaagcaaacagaccaattcatacagaccagtaaagaaacggtagaaagcatgaccgaaatactgaagggcattgatcagataagttctgcggtgggccttgtcaacgaaatgagtcaggaaaacaataaaaactttgaagcgttaaaagtggaaacggataaattcgttgataccattggcggcgagaagaaaaaaatccttgtggtagacgatgacgctcccattcgtgaaatggcgaaagggatgttacagaaagattatgaggtaattacctccnattcgggcaaagatgcgctgggtttgttctatcagggtctggttccacatttaatattattggacttagtaatgcccggaatagacggatgggatacatacagccgaataaaagcgataagcggcctgcacgataccccgatagcgttcttcacggcttcaaacgatccgaaagacattcagcacgcgcgtgaaatgggggcggttgattacatcaaaaagccctatgataaagacgatctgttaagaaggataggaagaataaccaaaaaataa

SEQ ID NO: 59778 - protein, 382 aa, Unknown
  Obtained from environmental sample
  DOMAIN (4)...(208): Methyl-accepting chemotaxis protein (MCP) signaling domain
  misc_feature (1)..(382): Xaa is any amino acid
MSSSAIEQMTANINSVTKTLADNNKNVVALTEASENGKTGVQTVAQEIQEIARDSEGLLEINAVMDNIASQTNLLSMNAAIEAAHAGEAGKGFAVVADEIRKLAESSSAQSKTTTAMLKKIKASIDNITKSSNEVLARFGAIDTSVKTVSEHEQNILNAMEEQEQGGKQILESISRLRDVTASVKKGSDHMAASGLTLVKQTDQFIQTSKETVESMTEILKGIDQISSAVGLVNEMSQENNKNFEALKVETDKFVDTIGGEKKKILVVDDDAPIREMAKGMLQKDYEVITSXSGKDALGLFYQGLVPHLILLDLVMPGIDGWDTYSRIKAISGLHDTPIAFFTASNDPKDIQHAREMGAVDYIKKPYDKDDLLRRIGRITKK

SEQ ID NO: 59779 - DNA, 432 bp, Unknown
  Obtained from environmental sample
  misc_feature (1)..(432): n is a, c, g, or t
ttgaccgaagccgttacatcccgcaggcggcttatggattccagtatttgttttcctccctgttcctgctcttccatcgcgtttaagatgttttgctcatgctcggaaactgtttttacgcttgtgtctatcgcgccgaaacgcgccagcacttcgttggatgatttggtaatgttgtctatggaggcttttatttttttaagcattgccgtggtagtttttgactgtgcgctggaactttccgccagcttgcggatttcatcggcgactacggcaaagcctttgcccgcctctccggcgtgggccgcttcaattgccgcgttcatcgaaagcaggttggtctggctggcgatattgtccattacggcgtttatttccaaaaggccttcggaatcccgcgctatttcctgtatctcctgcgccaccgtctga

SEQ ID NO: 59780 - protein, 143 aa, Unknown
  Obtained from environmental sample
  misc_feature (1)..(143): Xaa is any amino acid
MTEAVTSRRRLMDSSICFPPCSCSSIAFKMFCSCSETVFTLVSIAPKRASTSLDDLVMLSMEAFIFLSIAVVVFDCALELSASLRISSATTAKPLPASPAWAASIAAFIESRLVWLAILSITAFISKRPSESRAISCISCATV

SEQ ID NO: 59781 - DNA, 300 bp, Unknown
  Obtained from environmental sample
  misc_feature (1)..(300): n is a, c, g, or t
atgttcggactgcccgatgagacggtaaccatgattaacgagatattccgcaattgccccggaatcaaaaaggcaatcatttacggttctagggctaggggcgattatcggaacgggtctgatattgatttgacgttgataggcgacatttcggatagagagaggttgaatatttccgagtcaatctacgatttgcctattccgtatatgtgtgatttgtcgattcttaaaaacatcaaaaacgaaaacttagtcgagcacatagagcgtgtcgggcaagttttttatgagaaagcttaa

SEQ ID NO: 59782 - protein, 99 aa, Unknown
  Obtained from environmental sample
  DOMAIN (5)...(96): Nucleotidyltransferase domain
  misc_feature (1)..(99): Xaa is any amino acid
MFGLPDETVTMINEIFRNCPGIKKAIIYGSRARGDYRNGSDIDLTLIGDISDRERLNISESIYDLPIPYMCDLSILKNIKNENLVEHIERVGQVFYEKA

SEQ ID NO: 59783 - DNA, 1206 bp, Unknown
  Obtained from environmental sample
  misc_feature (1)..(1206): n is a, c, g, or t
atggccgagaacctccccatggnacaggggcgtcatccaagacgacacccgcatccagccgcgttgcccactatcaaatacgtcttggagaacggggcgaagagccttgttctaatgtcccacctcggcgatcccaagaaggatatggccaaggctaaggagaaggccgagaaggccggcaagccgtttgacgaggagcagtatcttgcctacaagcataagatgaagccgctggccgaacacctgtctaaacttttgggtaaaaacgtcgctctcgcccccgactgtatcggcgaggagaccaaggctatggctgcgaagctcgacggcggcgctatcctcatgttggagaatacccgcttccacaaggaggagacctccaaagaggccgccgaccgcgagaagatggccaaagcgctcgcggagctcggcgacgtctacgtcaacgacgctttcggcacggcgcaccgcgcccacgcctccacggagactatcgcccatttcctcccggcggtggcgggcttcctgatggagaaggagctactctttctgcaggacaaggtggtggacgcgccggttaagcctttcgttgcgattatcggcggggcgaaggtctcctccaagatcgctgtgctggagagcctcctttccaaggttgacagcatgataataggcggcggcatggcctacaccttccagaaggcgcagggtcagagcatcggcgagtcgctcgttgaggacgacatgatcgacaccgccaagagcattatggagaaggcgaagtccaagggcgtcaagctgctgctgccggtggacaacgtggtgaccaaggagttcgcggcggaggccgagtccaaggtcgtggccgccggagcggttgaggcgggttggatgggcatggacataggccccaagacgaccgacctcttcaaggacgcgctcaagagcgccaagacggtcttctggaacggcccgatgggcgtcttcgagttccctaagttcgcggttggaacgcaggcgatagccgcgacgctggccgaactgaaagacgcgaccacggtgataggcggcggcgactcggtgtcggcggtgaagaaagcgggcgtagccgacaaaatgtcgcacatttcaacaggcggcggcgcgtcgctggagttggtagagggcaaagagctgccgggagtcgtggcgcttaacgataaataa

SEQ ID NO: 59784 - protein, 401 aa, Unknown
  Obtained from environmental sample
  DOMAIN (2)...(398): Phosphoglycerate kinase
  misc_feature (1)..(401): Xaa is any amino acid
MAENLPMXQGRHPRRHPHPAALPTIKYVLENGAKSLVLMSHLGDPKKDMAKAKEKAEKAGKPFDEEQYLAYKHKMKPLAEHLSKLLGKNVALAPDCIGEETKAMAAKLDGGAILMLENTRFHKEETSKEAADREKMAKALAELGDVYVNDAFGTAHRAHASTETIAHFLPAVAGFLMEKELLFLQDKVVDAPVKPFVAIIGGAKVSSKIAVLESLLSKVDSMIIGGGMAYTFQKAQGQSIGESLVEDDMIDTAKSIMEKAKSKGVKLLLPVDNVVTKEFAAEAESKVVAAGAVEAGWMGMDIGPKTTDLFKDALKSAKTVFWNGPMGVFEFPKFAVGTQAIAATLAELKDATTVIGGGDSVSAVKKAGVADKMSHISTGGGASLELVEGKELPGVVALNDK

SEQ ID NO: 59785 - DNA, 459 bp, Unknown
  Obtained from environmental sample
  misc_feature (1)..(459): n is a, c, g, or t
ttgccctctaccaactccagcgacgcgccgccgcctgttgaaatgtgcgacattttgtcggctacgcccgctttcttcaccgccgacaccgagtcgccgccgcctatcaccgtggtcgcgtctttcagttcggccagcgtcgcggctatcgcctgcgttccaaccgcgaacttagggaactcgaagacgcccatcgggccgttccagaagaccgtcttggcgctcttgagcgcgtccttgaagaggtcggtcgtcttggggcctatgtccatgcccatccaacccgcctcaaccgctccggcggccacgaccttggactcggcctccgccgcgaactccttggtcaccacgttgtccaccggcagcagcagcttgacgcccttggacttcgccttctccataatgctcttggcggtgtcgatcatgtcgtcctcaacgagcgactcgccgatgctctga

SEQ ID NO: 59786 - protein, 152 aa, Unknown
  Obtained from environmental sample
  misc_feature (1)..(152): Xaa is any amino acid
MPSTNSSDAPPPVEMCDILSATPAFFTADTESPPPITVVASFSSASVAAIACVPTANLGNSKTPIGPFQKTVLALLSASLKRSVVLGPMSMPIQPASTAPAATTLDSASAANSLVTTLSTGSSSLTPLDFAFSIMLLAVSIMSSSTSDSPML

SEQ ID NO: 59787 - DNA, 1608 bp, Unknown
  Obtained from environmental sample
  misc_feature (1)..(1608): n is a, c, g, or t
gtgggccccattaacgggcacaatatccgcctgctggagagagtgttcagggacgtaagacagcttgagcggcccgtggtcgtccacatcgtcaccagcaagggcaaaggctacgccttcgcggaagatgatccgggagggtatcacggcgtgggagccttttcggtcagcggcggcattccggaagcgtccgtaaaaccggccggcctcgcatttacagactccttcgccgccgccctcctcgccgcggcgaaacgtgaaaaacggatcgtcgccctcaccgccgcgatggaacagggcaccgggctttcgcttttcaaaaagacatatcccggccgcttttttgacgtgggcatcgcggagggccacgccgtcacttttgccgcgggactcgccgcgcaggggctgaagcccgtcgtggcgatttactccacttttatccagcgttcgattgaccaggcgatccacgacgtgtccctgcaggttctgccaatcgtgtttgtccttgaccgcgccggctttgtaggcggggacggcgagacccatcaggggctttttgacatctgcctgttccgcgtaatccccaacatggtcatcctcgcgccggcaagcgacaaggaactggggcttatgctggactacgccctttcccttgacgtgccctccatgatccgctaccccaaagccccctgccccgccgatcttcccgagttcccgcatcccatagagaaaggcaggggaatatggatttcgcgtaacagcagcagccgtatctgccttgcctttaccgggagcctgtatccgcaggcgctcggcgcgctgcaaatactggaagacaggggaataaaagccgacgcgtacaacctccgcttcctgagtcagattgatgaggaatacctgattgagatactgaacagttacgaccttgtagcatttgccgaggaaggggtccgccagggcggcttcggcgaatacgcctcagctctgacccgctgccggaactgccgggcgcggacgattatttttgcggtagacggtgattttgccgccaacggcaacgctcttggaaccagggaggaactgctcagggacaacgggctggatgcggagggaattgcgaacaaaatnncaggggancggggacaggnntntagntttgtggacattgcgcgatacacccaaaattatattacaaataacaatccgcagcccctgttccctagtccctatatatcagttttcttagaaagcccgtatacgtactcaacggatttggcganagcgtcaagcgcgtattcaaggtcttcttttgtggcggtgagcggcggcagccagcggaacactttggggttgttgaaggaatgcatgatctggatgcggaacttctcggagaagtactgctcgcagggctgggaccagaaatcggcgccgaattttgccttcttgtcctccggaatattttcgaactcaacgccgatgatgcagccttttccgcgcacgtccttgatgatgccggggtactttttccaggcttcgctcatcgagtccatgatgaacttgccgttctcccgtgctttggcgggaaggtcgttttcgatcatgtattga

SEQ ID NO: 59788 - protein, 535 aa, Unknown
  Obtained from environmental sample
  DOMAIN (245)...(372): Transketolase, C-terminal domain
  misc_feature (1)..(535): Xaa is any amino acid
MGPINGHNIRLLERVFRDVRQLERPVVVHIVTSKGKGYAFAEDDPGGYHGVGAFSVSGGIPEASVKPAGLAFTDSFAAALLAAAKREKRIVALTAAMEQGTGLSLFKKTYPGRFFDVGIAEGHAVTFAAGLAAQGLKPVVAIYSTFIQRSIDQAIHDVSLQVLPIVFVLDRAGFVGGDGETHQGLFDICLFRVIPNMVILAPASDKELGLMLDYALSLDVPSMIRYPKAPCPADLPEFPHPIEKGRGIWISRNSSSRICLAFTGSLYPQALGALQILEDRGIKADAYNLRFLSQIDEEYLIEILNSYDLVAFAEEGVRQGGFGEYASALTRCRNCRARTIIFAVDGDFAANGNALGTREELLRDNGLDAEGIANKXXGXRGQXXXFVDIARYTQNYITNNNPQPLFPSPYISVFLESPYTYSTDLAXASSAYSRSSFVAVSGGSQRNTLGLLKECMIWMRNFSEKYCSQGWDQKSAPNFAFLSSGIFSNSTPMMQPFPRTSLMMPGYFFQASLIESMMNLPFSRALAGRSFSIMY

SEQ ID NO: 59789 - DNA, 774 bp, Unknown
  Obtained from environmental sample
  misc_feature (1)..(774): n is a, c, g, or t
gtggaagccttaaaaaaagaactctccagcggtatctatcagggttttatcatggagccgattcagggcgaaggcggcgttaacgtcgccaccgatgagttcatcaagaccgcgcgggaatattgtaccaaatacgacaccattttcgtcgccgatgagattcagaccggctgctgccgcaccggcaaattctgggcctgcgaatggtgggatatcgttcccgacgtgatgacttttgccaaaggcatctcgggcggcatcataccgctcgccggtttcatcgccaagcctgaaatttacgacgccgcctacggtactccggaaacctgtttccaccacaccgccacctaccagggcaacgcctacgcctgcgccgcgggcatagccgccattcaatacatgatcgaaaacgaccttcccgccaaagcacgggagaacggcaagttcatcatggactcgatgagcgaagcctggaaaaagtaccccggcatcatcaaggacgtgcgcggaaaaggctgcatcatcggcgttgagttcgaaaatattccggaggacaagaaggcaaaattcggcgccgatttctggtcccagccctgcgagcagtacttctccgagaagttccgcatccagatcatgcattccttcaacaaccccaaagtgttccgctggctgccgccgctcaccgccacaaaagaagaccttgaatacgcgcttgacgctntcgccaaatccgttgagtacgtatacgggctttctaagaaaactgatatatag

SEQ ID NO: 59790 - protein, 257 aa, Unknown
  Obtained from environmental sample
  DOMAIN (1)...(181): Aminotransferase class-III
  misc_feature (1)..(257): Xaa is any amino acid
MEALKKELSSGIYQGFIMEPIQGEGGVNVATDEFIKTAREYCTKYDTIFVADEIQTGCCRTGKFWACEWWDIVPDVMTFAKGISGGIIPLAGFIAKPEIYDAAYGTPETCFHHTATYQGNAYACAAGIAAIQYMIENDLPAKARENGKFIMDSMSEAWKKYPGIIKDVRGKGCIIGVEFENIPEDKKAKFGADFWSQPCEQYFSEKFRIQIMHSFNNPKVFRWLPPLTATKEDLEYALDAXAKSVEYVYGLSKKTDI

SEQ ID NO: 59791 - DNA, 1506 bp, Unknown
  Obtained from environmental sample
  misc_feature (1)..(1506): n is a, c, g, or t
gtgcccgcgttttggagtcaaatcgcctcggatattattgcgcaaaaatacttccgtaaagccggaattccaaaagatagaatctatgaatggaagaaatgggctaaagccggaagccagtccgaagacccggggaattccctgcccgaagacggcgcggagcatgacgctcggcaggtcttccaccgccttgcctatacatggcttgaatggggcaggcagaacaaatattttgacactcaagaggacgagaacgccttctatgatgaaacctgctatatgcttgcccaccaatacgcggctcccaacagtccgcaatggttcaataccggtttgtattccgtgtacgggctcgacggtcccgcgcaagggcattactactatgatatcgagaaagaaaaagttgttaagtctgacagcgcctacaaacgccctcagcctcacgcctgttttattctttccatagatgacaaccttgtaaacgaaggcggcatcatggatctattaacccgtgaagccagactgtttaagtacggttcggggacaggctccaatttttcccgtattcgcggaataaacgaaactctttcaggcggcggagtttcatcggggcttttatcgttcttaaaaatcggcgacagatccgcgtcggcgattaagtcgggcggcacgacacgccgagcggcaaagatggtaacgctggatatcgaccaccccgacgtagaaaagtacataagctggaaagccggagaggaacataaagtcgcctctatggtaaccggttctttaatacttaaaaaacatatcgacgccgtaaaaagggcgttggcgggtttcagaggtcctgaagaagataaattcagcgccgagaaaaatcacgatctcgctatggctctgcgcgcggcgttaggtgataaaataccgccttcttatctgtaccagcagcttcgccgccttgaacagggcgatgaggaagttgatgtttcccagtattccaccgcgtgggacgatgaggcttacaatacggtctccgggcagagttccaacaacagtctgcgcctaagcgatgattttatgcgcgcggtgttaaacgatgaagattggcagttaaaaagcagaacgggcggcgaggcaataaaaacagtaaaagcccgcaagctctggtctgacatagcgaaaacaagctggcagtgcgccgaccccggacttcagtaccatacaacgattaacgattggcatacatgtcccgccggcggagagatacgcgcgtccaacccgtgctcggaatatatgttccttgacgacacggcttgtaacctcgcttccataaatctttccgcgttatacgacaaaacaaataaagcttttaatgttgacggataccttcacgccattgatatttggactacaattcttgaaatctccgtagtaatggcgcaattcccgtctgcgcgtatagccgaagctttcatatcagtaccgcacactaggcttgggttacgctaa

SEQ ID NO: 59792 - protein, 501 aa, Unknown
  Obtained from environmental sample
  DOMAIN (1)...(98): Class II vitamin B12-dependent ribonucleotide reductase
  misc_feature (1)..(501): Xaa is any amino acid
MPAFWSQIASDIIAQKYFRKAGIPKDRIYEWKKWAKAGSQSEDPGNSLPEDGAEHDARQVFHRLAYTWLEWGRQNKYFDTQEDENAFYDETCYMLAHQYAAPNSPQWFNTGLYSVYGLDGPAQGHYYYDIEKEKVVKSDSAYKRPQPHACFILSIDDNLVNEGGIMDLLTREARLFKYGSGTGSNFSRIRGINETLSGGGVSSGLLSFLKIGDRSASAIKSGGTTRRAAKMVTLDIDHPDVEKYISWKAGEEHKVASMVTGSLILKKHIDAVKRALAGFRGPEEDKFSAEKNHDLAMALRAALGDKIPPSYLYQQLRRLEQGDEEVDVSQYSTAWDDEAYNTVSGQSSNNSLRLSDDFMRAVLNDEDWQLKSRTGGEAIKTVKARKLWSDIAKTSWQCADPGLQYHTTINDWHTCPAGGEIRASNPCSEYMFLDDTACNLASINLSALYDKTNKAFNVDGYLHAIDIWTTILEISVVMAQFPSARIAEAFISVPHTRLGLR

SEQ ID NO: 59793 - DNA, 1095 bp, Unknown
  Obtained from environmental sample
  misc_feature (1)..(1095): n is a, c, g, or t
gtggccgtagtagccacggcggacgagtcgatgcgcacgtgggaacgccccaccgccgcggcgccngtagccgcggtcgaggacatccccaaaatggcgataatggccgacaaactcgaaccgtcggtgcggacgatcagcctgctcggaataggggcgtatctgccggagagaatcgtcaaaaacgaggaacttctggctgagttccccgacatcaccgccgactacatcttcaaggtgaccggaataaaggagcgccgctgggctgcggcggacgtcaagccgtcggatatggcctacgaggcgtcgaaaaaagcgatagagaacagcgggctcaaaccctccgacatcaacgcgatcatcgtatccaccacaacgcccgacgtggtgatgccctccaccgcctgcatactgcaaggaaaactcggtatacgcggcgcgccggccttcgacctcaacgcggcgtgttcgggatggctctacggcttatcggtggcgcggggccttatactctctggcatcgcgaaaaacgttttggtggcaagcgtcgatatgcagtcgcgggtgatggacaagagcgacaaggacacctacttcctcttcggcgacggcgccggggccacggtgctcagcggcgtggagaaagggcacgtcatcaaggacgaaattctaagcgccgactcgcttggcctcaacatggcgaggcgcggatacccgggctacgaggtgccggtgaactcttcgaccttcgacccgtggctgcgtttggacggcaaggctctattccggttcgcgaccgaaagtttctcggcgatggtgcgggaactcatagccaagagcaggtggacgccggaggaggtgcgctgggtggtgccccaccaagccaacggccggatcatcagggcggcggcgcagaagagcggagtgcctttcgaacgcttctatctgaacatagaccgagtaggcaacacgtcaagcgcaagcattccagtagcgttatcggagatacagaacgggttgcagaagaaggacaaggtcatattctgcacagtaggcgcgggaatcacagcggcgggattgtcgttagagtggtaa

SEQ ID NO: 59794 - protein, 364 aa, Unknown
  Obtained from environmental sample
  DOMAIN (150)...(228): 3-Oxoacyl-[acyl-carrier-protein (ACP)] synthase III
  misc_feature (1)..(364): Xaa is any amino acid
MAVVATADESMRTWERPTAAAPVAAVEDIPKMAIMADKLEPSVRTISLLGIGAYLPERIVKNEELLAEFPDITADYIFKVTGIKERRWAAADVKPSDMAYEASKKAIENSGLKPSDINAIIVSTTTPDVVMPSTACILQGKLGIRGAPAFDLNAACSGWLYGLSVARGLILSGIAKNVLVASVDMQSRVMDKSDKDTYFLFGDGAGATVLSGVEKGHVIKDEILSADSLGLNMARRGYPGYEVPVNSSTFDPWLRLDGKALFRFATESFSAMVRELIAKSRWTPEEVRWVVPHQANGRIIRAAAQKSGVPFERFYLNIDRVGNTSSASIPVALSEIQNGLQKKDKVIFCTVGAGITAAGLSLEW

SEQ ID NO: 59795 - DNA, 435 bp, Unknown
  Obtained from environmental sample
  misc_feature (1)..(435): n is a, c, g, or t
gtgagcgcaaacgttttcagcaccggactcttccttcccgcccaagcggcggcggagacggaggccataattacgaagtggtttgtggccgagggcggcgagataaaaaaaggccaggtcatagccgaggtggagagcgcgaagtctacgtttgactttgaggcgccctgcgacggtcgtatagagaagttgctctacgccgacggcgcaaccgcggctgttcgacaaaccggtggccgtagtagccacggcggacgagtcgatgcgcacgtgggaacgccccaccgccgcggcgccngtagccgcggtcgaggacatccccaaaatggcgataatggccgacaaactcgaaccgtcggtgcggacgatcagcctgctcggaataggggcgtatctgccggagagaatcgtcaaaaacgaggaacttctggctga

SEQ ID NO: 59796 - protein, 144 aa, Unknown
  Obtained from environmental sample
  SIGNAL (1)...(18)
  DOMAIN (8)...(81): Biotin-requiring enzyme
  misc_feature (1)..(144): Xaa is any amino acid
MSANVFSTGLFLPAQAAAETEAIITKWFVAEGGEIKKGQVIAEVESAKSTFDFEAPCDGRIEKLLYADGATAAVRQTGGRSSHGGRVDAHVGTPHRRGAXSRGRGHPQNGDNGRQTRTVGADDQPARNRGVSAGENRQKRGTSG

SEQ ID NO: 59797 - DNA, 816 bp, Unknown
  Obtained from environmental sample
  misc_feature (1)..(816): n is a, c, g, or t
gtgatagacgtccctatatgcgaggccgggacggtgggtttttgtttgggggcgtcgcaggccggcgctcggccggtcatggagttccagttcgccgacttttccacggaggccgtgtcgcagcttgggttgaacgcggggacgtggtacttccggtcggacaggccggcgcctctgctcttccgcctgcccaacggcgcgggggtgacgctgggggcgtttcactccggcgagtttgagggcttgtggtcgcgctttcccgggcttaaattattttaccccgccacgcctcaagaatcctatgaggcgcttatggttggattttatgacgataatccgtgcgtcgtctttgagcataaattactttattggggtaggcccgccgacattgagttcgacggagatttgtccaaggtctgccgtccgcgccagtatacggagggggcggatattacggtgatcgcgatgggggcgatggttgatcaggcgctgcgcgcggttgaagagggtaagtattccgccgaggtgtggaacccgtttgtgttgaacccgctgtgtttcgggccgatagcggagtcaatccgcaaaacgggtaggcttttggtcgttcaggagtccggcgccacggcggggcttgggagccattttatatcccttgccgcgagggagtgcttcggggagttgcggcgcgcgccggagcttgtctcggcgccggacacgccggtgcccttcgccaaggagcttgaggcggccttcttgccggattccggcaggatagcggctgttatcgaaaaaatgatcggagatatatcgtga

SEQ ID NO: 59798 - protein, 271 aa, Unknown
  Obtained from environmental sample
  DOMAIN (1)...(125): Transketolase, pyridine binding domain
  misc_feature (1)..(271): Xaa is any amino acid
MIDVPICEAGTVGFCLGASQAGARPVMEFQFADFSTEAVSQLGLNAGTWYFRSDRPAPLLFRLPNGAGVTLGAFHSGEFEGLWSRFPGLKLFYPATPQESYEALMVGFYDDNPCVVFEHKLLYWGRPADIEFDGDLSKVCRPRQYTEGADITVIAMGAMVDQALRAVEEGKYSAEVWNPFVLNPLCFGPIAESIRKTGRLLVVQESGATAGLGSHFISLAARECFGELRRAPELVSAPDTPVPFAKELEAAFLPDSGRIAAVIEKMIGDIS

SEQ ID NO: 59799 - DNA, 990 bp, Unknown
  Obtained from environmental sample
  misc_feature (1)..(990): n is a, c, g, or t
gtgctttctccggccgcgtcggcttcggatgttttagaatgtatggctagccgcgcccgcgatgttactntgaatcgttttgggcgcgtcatactgctttntacgccgctctacgtttccaatatatgcgacaaccgctgcctctactgctcgttcgctcatcagaataaaattaagcggcggcacttaagcgttgacgaggtcagggtggaggcttcgcgaattgccgcgacggggctgcgccatattctcatgttgaccggggagtcgcgccgcgccgctccggtggggtatcttagggagtgcgtatcggtgttgcgcgaatatttctcctctatatcgatagagatttacccgcttgacgaacgcgagtactccgaactggcggcggcgggggcggacgggttgaccgtatatcaggagacctacgacagggcggtctacgcgtctctgcatgagggcgggcccaaggcggacttcgagtaccgcctccttgctccagagcgcggctgcgccgcgggaatgcgtcaggccacggtcggcgctttattggggctggcgcaaccgcttaaggaggcctttttctccggtctgcacgcccgccacatcgcggagacgcacccttccgtggaggtctccgcctcctttccgcgtattaggccccaggccggggagttcgagccgaaattctgcgtcgacgacaggatgttcgtccaatacatgaccgccttccgcctcttcatgccgagcgccggaataacggtatcgaccagggaatcggcgccgtttagagacgccgtactgccgctaggccctacaaagatgtccgccggcgtgagcacggcggtaggccgaagcaccggcaaggtctccgacgctcaatttgaaatagccgacgggaggtcggtggacgagatgcaagaaaatttattatcaaaaggatttcaaccggtgatggtggactggaattatattttatgtaggagttga

SEQ ID NO: 59800 - protein, 329 aa, Unknown
  Obtained from environmental sample
  DOMAIN (37)...(199): Radical SAM superfamily
  misc_feature (1)..(329): Xaa is any amino acid
MLSPAASASDVLECMASRARDVTXNRFGRVILLXTPLYVSNICDNRCLYCSFAHQNKIKRRHLSVDEVRVEASRIAATGLRHILMLTGESRRAAPVGYLRECVSVLREYFSSISIEIYPLDEREYSELAAAGADGLTVYQETYDRAVYASLHEGGPKADFEYRLLAPERGCAAGMRQATVGALLGLAQPLKEAFFSGLHARHIAETHPSVEVSASFPRIRPQAGEFEPKFCVDDRMFVQYMTAFRLFMPSAGITVSTRESAPFRDAVLPLGPTKMSAGVSTAVGRSTGKVSDAQFEIADGRSVDEMQENLLSKGFQPVMVDWNYILCRS

SEQ ID NO: 59801 - DNA, 612 bp, Unknown
  Obtained from environmental sample
  misc_feature (1)..(612): n is a, c, g, or t
ttgtcgatgaccagcgcctacaatctagaagccgaaacgcgcccgttgcgcgacctaagcctaaacgcgagcaccggtatcagtattctgaacgtgaccttctcgtcgagcttctggttctacgacgaggccgacgagcttacgccgcccacgataaactcctacagcttagacctgacgtccggaaggctgggcgcctccggaaagttctgggacggcgacctattggagctgagcctgacaaaacccggcgttccggcgtcggccaagcaaaactgggacgtcggcctatcgcccagcctgagctacagggcaagccgccaatctgcgtccgaaaatttcgtgccgaggaagtcgttcaacgtgagttcatccgcaaacataaatttgacaaacgccctctccgtaagatggaacggaaactacgacttctccagcgacagattctcgcacaacagttttgatttctactatgacttagagtgctgggagatgcgcttcacgtggaggcccgaaaagataaaccccggttttaatttcgtggtgaatataaagaaaataccggatataaagtgggaacagaaggagactagaagtactagagtactttaa

SEQ ID NO: 59802 - protein, 203 aa, Unknown
  Obtained from environmental sample
  misc_feature (1)..(203): Xaa is any amino acid
MSMTSAYNLEAETRPLRDLSLNASTGISILNVTFSSSFWFYDEADELTPPTINSYSLDLTSGRLGASGKFWDGDLLELSLTKPGVPASAKQNWDVGLSPSLSYRASRQSASENFVPRKSFNVSSSANINLTNALSVRWNGNYDFSSDRFSHNSFDFYYDLECWEMRFTWRPEKINPGFNFVVNIKKIPDIKWEQKETRSTRVL

SEQ ID NO: 59803 - DNA, 780 bp, Unknown
  Obtained from environmental sample
  misc_feature (1)..(780): n is a, c, g, or t
ttggtaaaggacacgctcaacgtatgggacaccatagtctacactgtaccgaatatggctatggacacaagagcgcccgactacatactgatcagcgcagtgccggattatttcatcaacggcgacggcgatttagactcgctctacaccgtcacaaaggtaagcccctaccccatccgcaaacaattggtacgcgatacgctgaactcggaattcaacacggtaagatcatggaacaccggcgtcaacctatccacacgcatatacggattgttcccgataaacgcgttcggaataacggcaatccgccacacgctcaccccgactataggctactcgttttcacccaaacacgagttagacagaactttttataatgtggggataagctacgccgggccgagaaccaaggcggagcagttaatgacgttcagcctgtccaacagctttcaggggaaaaggttggtgaccgatcggaagcgtgataataatactaataccaataataacgggattaacggagttatcagcggtattaataacggaaacgggatcagcggtggtgatagtattgatattgacgctaataatgttattaataccggtagtgatgttatcgatacgaatagcgttattgatatgaataacgactttgttgatacaaacaatattgttattaatacaaataacgatgttattgatactgtcagcgttatcaatacgaataatgttaataatgataataacgccgatagcatcagcgccgcccaaaatgantaa

SEQ ID NO: 59804 - protein, 259 aa, Unknown
  Obtained from environmental sample
  misc_feature (1)..(259): Xaa is any amino acid
MVKDTLNVWDTIVYTVPNMAMDTRAPDYILISAVPDYFINGDGDLDSLYTVTKVSPYPIRKQLVRDTLNSEFNTVRSWNTGVNLSTRIYGLFPINAFGITAIRHTLTPTIGYSFSPKHELDRTFYNVGISYAGPRTKAEQLMTFSLSNSFQGKRLVTDRKRDNNTNTNNNGINGVISGINNGNGISGGDSIDIDANNVINTGSDVIDTNSVIDMNNDFVDTNNIVINTNNDVIDTVSVINTNNVNNDNNADSISAAQNX

SEQ ID NO: 59805 - DNA, 477 bp, Unknown
  Obtained from environmental sample
  misc_feature (1)..(477): n is a, c, g, or t
atgtctgttgagcaagtccgcgcctggttagaccgctggggcagaggaaaagacgttgttgaaatggatatctccaccgccacggttgaactggcggcaaccgcccttaaggtgatacccgcaagaatcgcgaaaagcatttccctcaggggggataccgataacaacgccatgattgtcgttgccgccggtgacatgaaagtggataaccgcaagtttcgcgatcgctttgggtttaagcccaggatgttgagttctgaggaagcgctgaaatttacaggccacgcgataggcggcgtctgtccctttgcgcttcctcccgccattactgtctatctggacgactcaatgaaaagattcacgactatttttccggcctgcggcagtagtaactcactcatcgaattgacgctgagcgaacttgaggaatactcccaatgctccggttgggttgatgtttgcgttgaaagaagctaa

SEQ ID NO: 59806 - protein, 158 aa, Unknown
  Obtained from environmental sample
  DOMAIN (12)...(151): YbaK / prolyl-tRNA synthetases associated domain
  misc_feature (1)..(158): Xaa is any amino acid
MSVEQVRAWLDRWGRGKDVVEMDISTATVELAATALKVIPARIAKSISLRGDTDNNAMIVVAAGDMKVDNRKFRDRFGFKPRMLSSEEALKFTGHAIGGVCPFALPPAITVYLDDSMKRFTTIFPACGSSNSLIELTLSELEEYSQCSGWVDVCVERS

SEQ ID NO: 59807 - DNA, 543 bp, Unknown
  Obtained from environmental sample
  misc_feature (1)..(543): n is a, c, g, or t
atgaaaagcaaaattaaaaccaagcttggatcgataattatcctccatgcaattcttattctcttcggatgcggtttctctccacctgccgcttcagatgttcctgaagattttaccgctgtggtgtggaacatacaggcgctcttcgatggaaccgaatacgggaacgagtactcggaatacaccgaaggggcagggtggacgcaggaaaaatatcaggcccccattctggccgtatcccaggcagttatgaagatggaggcttcccgtgatgttccggatttaattggctttgtggaagtcgagaatcagggggttcttgatgatctcagccggggtgtcctttccaaatactcctacaagtggaccgcgtttgcgaatcttcccggatcttccctggtgctcggtattttaagtcgttatccaattaaaagcgctgttgcccattcgataaccgtggaaaatgataccgctcccaggcgggtactggaagtaagggttgagccacaaggcaagccgctggttttcttcctctgccactga

SEQ ID NO: 59808 - protein, 180 aa, Unknown
  Obtained from environmental sample
  SIGNAL (1)...(23)
  misc_feature (1)..(180): Xaa is any amino acid
MKSKIKTKLGSIIILHAILILFGCGFSPPAASDVPEDFTAVVWNIQALFDGTEYGNEYSEYTEGAGWTQEKYQAPILAVSQAVMKMEASRDVPDLIGFVEVENQGVLDDLSRGVLSKYSYKWTAFANLPGSSLVLGILSRYPIKSAVAHSITVENDTAPRRVLEVRVEPQGKPLVFFLCH

SEQ ID NO: 59809 - DNA, 486 bp, Unknown
  Obtained from environmental sample
  misc_feature (1)..(486): n is a, c, g, or t
ttgtgcagcggccgccttttggaaatcacttcgacggaagcagagacgcctgtaattgtcatgggggatctcaacgaaaaccatgatgagttttatcggcttaaggcgttgtgcgccctgcttcctgacgataaagacgcggcaaagctggtttcttcgacacgtaaagactatctcgttttgagcggtgaaaagccgccgcgcagcgccttttttcctggcattgctgagccgctttattcgccctggatggctgacctaaacgacggctcttattactacaagggggaatgggaaaccattgatcacttcctgctttcaaaagctctctttggcgcatcgtcgtggagattttccgactgctgggtattgaatcaggagccttttacaacagcgaaggggactccaaatgtttatattcccaaaagcggcaagggcctaagcgatcaccttccgctcatgctgtatttgaggtatgtggaatga

SEQ ID NO: 59810 - protein, 161 aa, Unknown
  Obtained from environmental sample
  misc_feature (1)..(161): Xaa is any amino acid
MCSGRLLEITSTEAETPVIVMGDLNENHDEFYRLKALCALLPDDKDAAKLVSSTRKDYLVLSGEKPPRSAFFPGIAEPLYSPWMADLNDGSYYYKGEWETIDHFLLSKALFGASSWRFSDCWVLNQEPFTTAKGTPNVYIPKSGKGLSDHLPLMLYLRYVE

SEQ ID NO: 59811 - DNA, 315 bp, Unknown
  Obtained from environmental sample
  misc_feature (1)..(315): n is a, c, g, or t
ttggattgccccggaacaatcgccgtaattccggtatctgaaagctacaacgaatacgcaaaaaaaataagcacggagttaagagatcaggatctcagggttaccacagagctgggcgacggcaggctaaacgccaaaatccgcgattgccagaaccgcaaaatcccctacatgctggtcgtgggcgaacgggaagaaaaagagggaaccgtttccgtccgttttagggacggcaaacaaattccctcgatgaagtttgaagaatttatctcctacgccgtaaaaaaagccaagtccagggatttggagctttaa

SEQ ID NO: 59812 - protein, 104 aa, Unknown
  Obtained from environmental sample
  DOMAIN (6)...(96): Anticodon binding domain
  misc_feature (1)..(104): Xaa is any amino acid
MDCPGTIAVIPVSESYNEYAKKISTELRDQDLRVTTELGDGRLNAKIRDCQNRKIPYMLVVGEREEKEGTVSVRFRDGKQIPSMKFEEFISYAVKKAKSRDLEL

SEQ ID NO: 59813 - DNA, 786 bp, Unknown
  Obtained from environmental sample
  misc_feature (1)..(786): n is a, c, g, or t
ttgatcagatcggcacgagctcgaaattctctattcccccatattggaaaatcctggctctgggaaacttcaggccatctgggtttttacaaaggcaatatgtacagcccgatgcagattgacaatcaggactacatcataaagccgatgaactgccccttccacataatgatctataaaaccaaaggccgttcctaccgcgaccttcccttgcgctgggcggaacttggcacggtgtaccgctacgagcgttccggcgtcctgcacggccttttaagggttcgcggttttacccaggatgacgcgcacatattctgtacacccgagcagatggaggacgaaatccgcgaagttctgcgtttcagcctttggatatggaaacaattcggctttaaggaaatcaaggcgtacctggccaccaagcccgccgagtccgtcggtgaacaaagccgctgggacgccgccctggaaagcctgcgcagggcaattaacgccgagggacttggctacgaaatcgacgaggggggcggcgcgttttacggccccaagatcgatctcaaaataaaagacgccttgggccgtgaatggcagatgaccacaattcagtttgattttaacgaaccggaacgttttgacatgacctttgtggacgcggacggaaagcaaaaacggccctacatgatccaccgcgcccttctgggcagcctggagcgcttcttcggggtgcttatcgaacacttcggcggagccttccccgtttggattgccccggaacaatcgccgtaa

SEQ ID NO: 59814 - protein, 261 aa, Unknown
  Obtained from environmental sample
  DOMAIN (1)...(161): tRNA synthetase class II core domain (G, H, P, S and T)
  misc_feature (1)..(261): Xaa is any amino acid
MIRSARARNSLFPHIGKSWLWETSGHLGFYKGNMYSPMQIDNQDYIIKPMNCPFHIMIYKTKGRSYRDLPLRWAELGTVYRYERSGVLHGLLRVRGFTQDDAHIFCTPEQMEDEIREVLRFSLWIWKQFGFKEIKAYLATKPAESVGEQSRWDAALESLRRAINAEGLGYEIDEGGGAFYGPKIDLKIKDALGREWQMTTIQFDFNEPERFDMTFVDADGKQKRPYMIHRALLGSLERFFGVLIEHFGGAFPVWIAPEQSP

SEQ ID NO: 59815 - DNA, 453 bp, Unknown
  Obtained from environmental sample
  misc_feature (1)..(453): n is a, c, g, or t
atggagccgcgcgcccttaccgcctggcttaaagatcaggaacacgcgccgttggctttggtttttggcaacgagcgcaccggccttgaggaagacgagcttaatttctgcaatgtcgcctcacacatccccgtttccgattcctttccctcgctcaatctttcacacgccgtgcaaatatacgcctacgagctttttctagcttttggccatgtcggggaaaaccccgttaaaggggaatgggttccgctggaatacccggcggctttacagctaacagaaagcattaccaacacccttgccgaacttggtttttacaagcgtcccgggcgcgtggaacagacccgctttctgcgtgatttaatctgccgcgccggcctgacggaaagggaaggccgctacctaaaagacatctttatcaaggcggcaagattgggatataacaaatcataa

SEQ ID NO: 59816 - protein, 150 aa, Unknown
  Obtained from environmental sample
  misc_feature (1)..(150): Xaa is any amino acid
MEPRALTAWLKDQEHAPLALVFGNERTGLEEDELNFCNVASHIPVSDSFPSLNLSHAVQIYAYELFLAFGHVGENPVKGEWVPLEYPAALQLTESITNTLAELGFYKRPGRVEQTRFLRDLICRAGLTEREGRYLKDIFIKAARLGYNKS

SEQ ID NO: 59817 - DNA, 570 bp, Unknown
  Obtained from environmental sample
  misc_feature (1)..(570): n is a, c, g, or t
ttggatataagaactatgaaacaaagtaactggaaaagcgtcttgcggcttgaaaaaaacaaaaatggccgggattttgtttgtggcgatattcatgggtgtttctcatacctcgaagaacggttaatagagataggctttaataaaaatagcgacaggctgttttgcgttggggatttaattgatagagggcctgaatcaagaatggctgttgattatttagagatgtcctggttctattctgtattgggaaaccatgaagaaatgcttattaaatcgctttgtaatagatattatagagataatcatattaaaaatggcggaaaatgggtctataaagaaacattgtcctataaaacaaaattattgaaggcagttgataaacttcctttgattattcaggtagaggatgctataatcgcccacgcagtcctgccggcgttcatagtctggaagatattgaaattgatccttacaattacctggaaactgttttatggaacgggaaagaattcccacccgtacttattccaggaatttcaaaagtttatgtcggacataatattgtaa

SEQ ID NO: 59818 - protein, 189 aa, Unknown
  Obtained from environmental sample
  DOMAIN (23)...(146): Calcineurin-like phosphoesterase
  misc_feature (1)..(189): Xaa is any amino acid
MDIRTMKQSNWKSVLRLEKNKNGRDFVCGDIHGCFSYLEERLIEIGFNKNSDRLFCVGDLIDRGPESRMAVDYLEMSWFYSVLGNHEEMLIKSLCNRYYRDNHIKNGGKWVYKETLSYKTKLLKAVDKLPLIIQVEDAIIAHAVLPAFIVWKILKLILTITWKLFYGTGKNSHPYLFQEFQKFMSDIIL

SEQ ID NO: 59819 - DNA, 1500 bp, Unknown
  Obtained from environmental sample
  misc_feature (1)..(1500): n is a, c, g, or t
gtgtttacggaaaagggctatgcggtttcgggcgggattacaaccacagttaagcgcacgctgatgggcagcatgtgttttacagacccggaaaaccgcaaaaggttaggtgaaatcaccgcgtacacggcggaactttttgatgaactcatactggacgatttttattttaccaactgccgctgtgaatcctgcattaaggcgaaaggcgatcgcgattgggcaacattccgcctcgcgcttatgaatgatatttccgaaaacgtaattatcaaaaaagcgaaagcagcgaatccgaaggtaaattgcattattaaataccccaactggtacgacagttttcaggccaacggctataaccttgaagacgagtcgaaaatgtttgacatgatctacaccggaaccgagacccgcgatccccattacacccatcagaatctgccccgatacttgagttttttcctgccccgattgctggagcatataaaaccgggaaaaaacggcggcggctggtacgacctttttgactgttctctggaagactatgtacagcaggcgtatttaacattattcgcaaaatgccgcgaacagatgctgttctgctttcccttactcgtcaataaccctgtttacaccgccgccgtgggcgcgttctacgatgaggcggatcttttcatcgaacagcttggtgaacctgttggagttgcctgttacaagccgtatcactcgtacggggaaaggcttctacatgaatttatcgggatgtgcggcgttcccctggatccctatccttatttcccggctgacgcgaagacggtatttcttactgccgatgccgcatgggacgaggaaattgtcgctaaaataaaacaaagtcttttaaacggaaacaaggtttttattacaagcggattgtatgaaaaattggcgggcaaaggaatagaagatattctaccattggaaattacaaacagaaaaataaccacggatgtttttaccaacagcgcttttggcaggggcaactgcggctatgtaaaagccgcagcccccataacgctgccccatgtcgcctacaatgaaaacgatatatggccgctttcagccgcgcttactccccattcaagccatccgctgttgttatgcggcgcttacggcaaaggcagcctctacgtgctgacgatccccgacgcgttcgccgatttgtacaacctgcccgccgaaacgctggctctcctgcgcggtgaacttgatttacccataacgctggaatgtacaggccgcgtgtctctgttcccctatgacaatgatacttttattttacagtcgttccttgacaggccggaacgtgtgcgtgtccgcattaacaggccgaacgcgtctcttgtgcccctgatgcagccgaggatgcgcccgttcgagatagcccgttcaggagaaaaagaaagcgtttttgacattttcataatgccggggcattacatggcgtttaaggttgaatga

SEQ ID NO: 59820 - protein, 499 aa, Unknown
  Obtained from environmental sample
  misc_feature (1)..(499): Xaa is any amino acid
MFTEKGYAVSGGITTTVKRTLMGSMCFTDPENRKRLGEITAYTAELFDELILDDFYFTNCRCESCIKAKGDRDWATFRLALMNDISENVIIKKAKAANPKVNCIIKYPNWYDSFQANGYNLEDESKMFDMIYTGTETRDPHYTHQNLPRYLSFFLPRLLEHIKPGKNGGGWYDLFDCSLEDYVQQAYLTLFAKCREQMLFCFPLLVNNPVYTAAVGAFYDEADLFIEQLGEPVGVACYKPYHSYGERLLHEFIGMCGVPLDPYPYFPADAKTVFLTADAAWDEEIVAKIKQSLLNGNKVFITSGLYEKLAGKGIEDILPLEITNRKITTDVFTNSAFGRGNCGYVKAAAPITLPHVAYNENDIWPLSAALTPHSSHPLLLCGAYGKGSLYVLTIPDAFADLYNLPAETLALLRGELDLPITLECTGRVSLFPYDNDTFILQSFLDRPERVRVRINRPNASLVPLMQPRMRPFEIARSGEKESVFDIFIMPGHYMAFKVE

SEQ ID NO: 59821 - DNA, 1128 bp, Unknown
  Obtained from environmental sample
  misc_feature (1)..(1128): n is a, c, g, or t
atgatttacaaaacctttggtaaaacaggcgtaaaagtttccgcgttgggttttggtgctatgcgtctgcccatgaaagaggttgacggcaagaaaatcgttgacgacgatcttgccgtccctctcatgcaaaaagcgtttgacatgggcattaactatgtcgataccgcgccgctttactgtgaaacgttaagcgaagtttccgtaggcaaggcgttaaagggatggcgcgacaaagtttacctgtccacgaagaaccccatagaggacgcggacggagatcactggatggaaaggctggaaaaatcgctgaaaaaacttgatacagactacatcgatttttatcatttttggggcatatcgttaaaaagtttcgagtcgtggcagagcttgaaattcggccctcttgaagccgcgtacaaagccaaagatcaggggttaataaagcacatttgtttttcgtatcacgacgcggcggaaaattataagacaatagtagattcaggacactttgagacaacacttgtccagtacaatatgctggatcgttccaatgaagaaaacatcgcctacgcgaagtcaaaagggcttggcgttgtggtaatgggccctgtcggcggcggcaggctgggcgcgccgagcgaaaaaattcaagggctgttgaaaaataaacttacaagcaccgcggaattagccctgcgcttcgtgtttgcgaacgaaaatatagacatggccctttccggcatgggcgatctaaaaatgcttgaagaaaattttgagatcgcgtcgcgcaccggccatttaacggaagacgaactgcagcacatcaaaacaatgatggaagaaaacaaaaaccttgcgaagttgtactgcacgggctgtaattactgcaaaccctgtccgcagggcatcgacattccctacctttttgaaatcatgaaccgctaccgcgtctacgatttaaaggaacacgcgaaaagcgcctacaaggaaatgatgaacggctggagctggataaagagcgcggacgcatccaagtgcgtctcttgcggcgcgtgcgaggaaaaatgcccgcagaaactgccgattatcaagcagctgcaggagacgcataagacgcttgcttag

SEQ ID NO: 59822 - protein, 375 aa, Unknown
  Obtained from environmental sample
  DOMAIN (340)...(363): 4Fe-4S binding domain
  misc_feature (1)..(375): Xaa is any amino acid
MIYKTFGKTGVKVSALGFGAMRLPMKEVDGKKIVDDDLAVPLMQKAFDMGINYVDTAPLYCETLSEVSVGKALKGWRDKVYLSTKNPIEDADGDHWMERLEKSLKKLDTDYIDFYHFWGISLKSFESWQSLKFGPLEAAYKAKDQGLIKHICFSYHDAAENYKTIVDSGHFETTLVQYNMLDRSNEENIAYAKSKGLGVVVMGPVGGGRLGAPSEKIQGLLKNKLTSTAELALRFVFANENIDMALSGMGDLKMLEENFEIASRTGHLTEDELQHIKTMMEENKNLAKLYCTGCNYCKPCPQGIDIPYLFEIMNRYRVYDLKEHAKSAYKEMMNGWSWIKSADASKCVSCGACEEKCPQKLPIIKQLQETHKTLA

SEQ ID NO: 59823 - DNA, 441 bp, Unknown
  Obtained from environmental sample
  misc_feature (1)..(441): n is a, c, g, or t
ttgggacacgggaaccgagccgttgaatattatctggaaagctgccccgccgcgcagaatgaaattgccgacacgcgccttatggaaccgtatgtttactcgcaatttactgaaagcgtggacagcccctttgaagggcgcagtcacgttcactggcttacaggcacggcaagcacggtaatggtcggcagtgttgagggcattttgggattaaggccggatattgaagggctgcgtttgtcgccggcgatcccctcgtcgtggaaatcctttacaatggaaaaaattttccggggcaaaaaacttaatataaaagtgaataaccccaacggacgcgaaggcggctgtaacaaactcactgttaacggaaaagaggttgaaggcaattatattcccgcttcgatattgaaagcgcataacgagataattctggatatgtaa

SEQ ID NO: 59824 - protein, 146 aa, Unknown
  Obtained from environmental sample
  misc_feature (1)..(146): Xaa is any amino acid
MGHGNRAVEYYLESCPAAQNEIADTRLMEPYVYSQFTESVDSPFEGRSHVHWLTGTASTVMVGSVEGILGLRPDIEGLRLSPAIPSSWKSFTMEKIFRGKKLNIKVNNPNGREGGCNKLTVNGKEVEGNYIPASILKAHNEIILDM

SEQ ID NO: 59825 - DNA, 984 bp, Unknown
  Obtained from environmental sample
  misc_feature (1)..(984): n is a, c, g, or t
gtggtcgtcccgcacaacgggtcgctcgccgaccttaggcacgttctccaccacgagttcgtccacgccttcgtcttcggcatgatctacggcggcagcatcctgcgcgccgccggggcgcaggtgccgctgtggttcaacgaggggcttgccgaactgctctcctccggttgggagcgtcaagccgacatgttcatgctggacaggatgctgaactcgaccgtcccgccgccctccccggctctcgacgggtatttggcctacaagggcggtcagtcttttctatattatatatacagcgccggcggcgacagcctattcaatagaatgctggtggagttcaggcttacccgctccgccgaggccgcgatcgaacggatctacgcaaaaaagatggaagagctcggcaaggattggctaaacgaactgcgccgcgtctactggccggaggtcggccgccgcataaatccggaaacgcaggcctcgcccgtcaccgcaaagggccgcagccatatcaacgtgcgccccagagtctcgcccgacggcaggcgcatagcctttttcagcgacaagcacgactacacgaggataatcatcaccgacaccgccggcaaggagctgcgccggataggcggggagcacagcttgggcaactccttcgagtccttccgccccatgaacggagcgatcgcctggtcgcccgacggcaagcgaatcgccttcatcgccaaaagaggcggcaaggacgaggtgcgcatcgtcggcgcggcgaagaacggcaagaccctgcgcgccgtccggccgccgctgtcgtcgatcggcgggcttgactggtcaaaagacggaaagtttcttactttcaccggaacctcctacggacaaacggatctgtacctttacgacctggcttccaacgagctcaacgtcctcgcagactcgtacgagtctaaggattcgccgcggttcagtccgggacggcggtaa

SEQ ID NO: 59826 - protein, 327 aa, Unknown
  Obtained from environmental sample
  DOMAIN (214)...(253): WD40-like Beta Propeller Repeat
  misc_feature (1)..(327): Xaa is any amino acid
MVVPHNGSLADLRHVLHHEFVHAFVFGMIYGGSILRAAGAQVPLWFNEGLAELLSSGWERQADMFMLDRMLNSTVPPPSPALDGYLAYKGGQSFLYYIYSAGGDSLFNRMLVEFRLTRSAEAAIERIYAKKMEELGKDWLNELRRVYWPEVGRRINPETQASPVTAKGRSHINVRPRVSPDGRRIAFFSDKHDYTRIIITDTAGKELRRIGGEHSLGNSFESFRPMNGAIAWSPDGKRIAFIAKRGGKDEVRIVGAAKNGKTLRAVRPPLSSIGGLDWSKDGKFLTFTGTSYGQTDLYLYDLASNELNVLADSYESKDSPRFSPGRR

SEQ ID NO: 59827 - DNA, 1122 bp, Unknown
  Obtained from environmental sample
  misc_feature (1)..(1122): n is a, c, g, or t
atgaaaagactctttttattactgataataattccgtcctttgtttttgcggagggcctgtattctcccacatggggctttaacctgaatcttcccgaatactatgaatatacggaaggggacggcaaggacagattttcttttaaggggccggaaggcgcggtatttgacctaatcgtttacaacggagtttacgcgaatataaaagaaatggctgaagatgtaaccaagagactgggaaacaaaggcgatattgattactttaaatataacggcaaacaggcggctattttggaattgaacttcggcgataaattaagcggctggggaatatgcgttgagcttgccggagctcagggccgccgtccgcccttgcttctttccctcgcttacggtcccgccgcgaagagcgaattgaatttatttcacttttcggcgcttgattcaatcgcgccctcggaagcggaaaaattatatcccggtctgataaccgagtacagttatccgcggggagagcagataattacgcccattgcctcaagcggagcgaccgccgctatatgcaagaacgacgcggaagcctcgcaggcttttattgagcgtgaatttgttgttttatcaacttatgttaatactccggcatggcagaaggcatggcttcgctattacagactcatctaccgtgattcatacgaaagagtaaaatatatcgccgacgcgctaattaaaaagtgggggcgcggcgcagcaagcagcggcaatgaaaggggctttgcgcagaaagcgcttacttttgtacagggttttaagtacgaaagaaatcacgaaggcagcgattttttaaatttggtcagtacggctgttgacggcagcggcgactgcgacagccgcgccatgctctgggcgataattcttaattacgcggacattcgcgccgcgatgatgatttcccccaagtacagtcacgccatgggccttgcggatgtctcaggcgcgggagcccgctttgaagcctacgaaacaaactggctggtcgcggaaaccacggcaaaaattgatatcgggctaattgataaagaacaggctgacccgaataattggttcggggttttatttgaatga

SEQ ID NO: 59828 - protein, 373 aa, Unknown
  Obtained from environmental sample
  SIGNAL (1)...(17)
  misc_feature (1)..(373): Xaa is any amino acid
MKRLFLLLIIIPSFVFAEGLYSPTWGFNLNLPEYYEYTEGDGKDRFSFKGPEGAVFDLIVYNGVYANIKEMAEDVTKRLGNKGDIDYFKYNGKQAAILELNFGDKLSGWGICVELAGAQGRRPPLLLSLAYGPAAKSELNLFHFSALDSIAPSEAEKLYPGLITEYSYPRGEQIITPIASSGATAAICKNDAEASQAFIEREFVVLSTYVNTPAWQKAWLRYYRLIYRDSYERVKYIADALIKKWGRGAASSGNERGFAQKALTFVQGFKYERNHEGSDFLNLVSTAVDGSGDCDSRAMLWAIILNYADIRAAMMISPKYSHAMGLADVSGAGARFEAYETNWLVAETTAKIDIGLIDKEQADPNNWFGVLFE

SEQ ID NO: 59829 - DNA, 363 bp, Unknown
  Obtained from environmental sample
  misc_feature (1)..(363): n is a, c, g, or t
gtgaaaacccttaaaattttgtacgaagataataattgtattgtaattgacaaaccggccgggcttgcggttcagggcgggaaagaggttaaatcgtccgtagacgtgattttagcggaaatgcgcgatcccgcgccgcttctggtacaccgtctggacaaggatacatcgggggttctccttaccgcaaaaacaaaggaagccgccgcggaattttcccgtcttttgggagcggacaggcaggctgttaagcggtacatcgcggtctgcgcgggaagccccgtaaaaaaagagggggtcatttcgcaggatttaatgatacggggcgcattaaagaagtcggaaacaaggtacaagggataa

SEQ ID NO: 59830 - protein, 120 aa, Unknown
  Obtained from environmental sample
  DOMAIN (12)...(120): RNA pseudouridylate synthase
  misc_feature (1)..(120): Xaa is any amino acid
MKTLKILYEDNNCIVIDKPAGLAVQGGKEVKSSVDVILAEMRDPAPLLVHRLDKDTSGVLLTAKTKEAAAEFSRLLGADRQAVKRYIAVCAGSPVKKEGVISQDLMIRGALKKSETRYKG

SEQ ID NO: 59831 - DNA, 2421 bp, Unknown
  Obtained from environmental sample
  misc_feature (1)..(2421): n is a, c, g, or t
gtgtacaacgccggcaccgcccgcgaaatggtaaaatcgggctttattaatccgcgcggcggatccacagccctgaccccggtgaacagcagcggggtgacgctgcccgattaccccttaagggtagccagcgacacagtgaccagaacggatacggtggtagcggatagggacatagatcaggtcagcggcaaaatcatcctgcgcggccttgcctgggacgaccagttgattgacgagatacaggttagcattagcggcacctcaaccaccatactcaaactgcaggataccggcgaagaggattcatacaaaaatgctatttggaaaatgcggccggtgggttcagctcaggcctttgccgctgaaacgctcaactggaagacaggccatactgttgaatgggcttatgtctgggacgcaagcgctgtcaacccgggaaccagcgtactaatacaggtgacggttagagacgtgaagggtaccacagttcctcctccgggtgatccgacccctacccgcctgccaagcgctaacgttaccgtggcccaggaaaacgcctcgcctgctaccgcaaaggtatatcacagccagatcagcgttaacatagtgccatacatcaccggctttgaacggcacaagccgcaatttacaaccaaacgctcattgcagggctggtacagcttctaccagggcgaaggtttagagacagcccccaatgttgttaacactattaaagtgcttggctataactttggaaccggcgacgcttctatgaccnttagtggagatactctgacggtaaccggcaatgggacaacagagcgtactttcaggatacctgacaatggaaaagcaggcgcgatattaatgactacttccggtacggcggcctacaataacagcgtcgatgtggcaagcgtgacggcaactacaggcagcaagtcctggaaccgcgaatacagcagctttacccccggctcagacctgtgggtcaacaggccctacgcccatatctggcggactacgcagtctaatgatgctcccagaactttaataggcaatactcccgaacaaagctccgggcttaaccatccgggcatggcgctggaatacataggaaatccgggcactctccacggaacctgggcggtatacggaaaagccaatgtattctatggaacaaacggaacatccaacaatttctattctcttcatggtaatggtaccactgcccagatgccgggcgaaccgttcagcactccggacatcagcatttataacggcggaggcgccgatacggcaaatgtcgggtatactcaccagcctgacggccgggcgatacttctcgtcaagtcaaatattacaacctattcacatcatactgacgtcgcgaatgttaatatcatacaggcttcaactgtttacgggtctacgcagcgctggcagaatatcaggataagcaaagccgccgcgaatacctctactacggaagccaatgtaggcaagatttatatgaccgcctataatgccgattacaagagcctgtggtatggcagcaggaacaataataataatactacgatgattattgacggagggtcagttacaggtataaacaatattggaaattccggattggccgcggcggcaaacgcgggtgagttcagcgcggtagattacgacaatgttggtcccattatcgcctactatgacgcgagcaatgacaccgtacgcgttgccctgggagccaatgacaatccgggtaccggcaactggacccggagttatctgctgccttccggtaatgccctgtacaggggttccggcaagtatatcagcattaaggtagacaagagcaaccatatacacctttccttctttaacagcgtctacaataagatggtgtattactataccagtggcagaggcactatcaacgtaaacaaccctgtcaaccctggaaccgctgccaattccaatcctagaatgttcaccgttgacagtgtggcaacaaccaatggcttctggacagacatttcggtagacgataacggcaaccccttgattgtgtacggcgacaacaaccgcaccggcaactatgacggtgtgcgtatggcgtaccggagcgccacgggcattaataacagcatacagttcaccggaacgctgacctgtccggttaccaaggcggacattaccaattgggaagctctgaccatgccggcaaactttgtggtcaacaacgaccgcctcaacattgaggcatggccgccaaccaacagggcaggaggcacactcggcacccgtcccgcaaccgacacctggcacgccgccatcggttatgccagcgacatgtaccgcgttggttatttcacctatcccacctataaggggtataccagcaacacaacgaattag

SEQ ID NO: 59832 - protein, 806 aa, Unknown
  Obtained from environmental sample
  misc_feature (1)..(806): Xaa is any amino acid
MYNAGTAREMVKSGFINPRGGSTALTPVNSSGVTLPDYPLRVASDTVTRTDTVVADRDIDQVSGKIILRGLAWDDQLIDEIQVSISGTSTTILKLQDTGEEDSYKNAIWKMRPVGSAQAFAAETLNWKTGHTVEWAYVWDASAVNPGTSVLIQVTVRDVKGTTVPPPGDPTPTRLPSANVTVAQENASPATAKVYHSQISVNIVPYITGFERHKPQFTTKRSLQGWYSFYQGEGLETAPNVVNTIKVLGYNFGTGDASMTXSGDTLTVTGNGTTERTFRIPDNGKAGAILMTTSGTAAYNNSVDVASVTATTGSKSWNREYSSFTPGSDLWVNRPYAHIWRTTQSNDAPRTLIGNTPEQSSGLNHPGMALEYIGNPGTLHGTWAVYGKANVFYGTNGTSNNFYSLHGNGTTAQMPGEPFSTPDISIYNGGGADTANVGYTHQPDGRAILLVKSNITTYSHHTDVANVNIIQASTVYGSTQRWQNIRISKAAANTSTTEANVGKIYMTAYNADYKSLWYGSRNNNNNTTMIIDGGSVTGINNIGNSGLAAAANAGEFSAVDYDNVGPIIAYYDASNDTVRVALGANDNPGTGNWTRSYLLPSGNALYRGSGKYISIKVDKSNHIHLSFFNSVYNKMVYYYTSGRGTINVNNPVNPGTAANSNPRMFTVDSVATTNGFWTDISVDDNGNPLIVYGDNNRTGNYDGVRMAYRSATGINNSIQFTGTLTCPVTKADITNWEALTMPANFVVNNDRLNIEAWPPTNRAGGTLGTRPATDTWHAAIGYASDMYRVGYFTYPTYKGYTSNTTN

SEQ ID NO: 59833 - DNA, 2040 bp, Unknown
  Obtained from environmental sample
  misc_feature (1)..(2040): n is a, c, g, or t
atgcgaagcgctaattttacatatccccgctttgaggccgccctgcgctcgctgaggcgcatgggtaaaaaaacctatgtgacggtgaatacggtttttgagcagcgcgaagccgaccggatgtaccagcttctcaagtacctttcatcgcttgggcctgacgcgcttattgtgcaggacttcggcgttctcgcgatggtcaattcggaatttcccaaactgaaaatccacgcctccacacagatgaatatcgcttcaggcagaggggcaaacgcgctgtcacggcacggcgtttccagggttgtgctggcgcgggagctgtgtctggaagagctaaaatcgatacgggccgatacaaacgtcgagatggaagtatttacccacggcgcgttatgcgtcagcgcatccggcctctgcctgttttccagctatctgggcggcaaatcggccaacaggggaatgtgcacccaggcctgccgccgtatgtacaaccacggcgaggaatccgggaccgctcaacagagcggcttttacttcagcccggcggaccttcagcttctggagcagcttcccgatctggccgctatcgggataaacgcgctgaaaatcgaaggccgcatgaaaagcgcggattacgtcggcacggttacaagcgcctaccggctcgtgcttgacgcgattgccgaaaatgtcgccacgggcggagaaaatatcgcgcgcagcatcgccagagcgcaggaaattcttcgcggcgattttgccagaagcaagaccaaattttattttttttctgccgaagaagacaagattgactggcttaatccggagcaggacggcggaaccggcattgcccttggcgttatacgcaatgtcagaggatcggataaaagaaggcaagggtttgtcgtatctgacgatattccggcaatcgcaaaactttcagcgggcgattcgatacggctgcaccgcagcgatgattccgagcgcgtgtcgcacaaactgacttatgccgaggcccatgacggcgcttactggctttccattcctgacggcttcggccccggagacagggtctaccttatccagaacaaggccatgtcaaaacgctacaggccggtaaccggctctatttcagaaggcaaacggggaccggcttttgaaaaagccccgatcccaaaaatacctgatttatacaaaagcaaaccaacaggcagcagggcttcagtcctgcccgaaggtatctatgtgtccgtatccaatatcaacgacttgtatgtcgtacaatcatcgcgtcccgcgaaggtaatgctaaaccttagccataaaaactcagcttacattttatcggaagaaaaagatcccctccccttccggccttgcgatacaatactcgtgttgaatccgtattttccgcagaccgtgtcagagccaatggcgtccgatataagccggcttttcggtcttggctacaggcagttcgtgattaacaaccctggacacctttcccttttccgcgatttccgtgcggaaatacaattaatagctggcccctggctgtatatgttcaacacctgggctttgtcgtttatcgcttcgcttggggtcgacggctttgtatcgccgtttgaaaacaatcgacagaatttggaacgcacgcttgaccgggaaaacttacggcgtgtgcgtgaatttgtgtttgtgcctgttttcgcatggcctgttcttttccgtatccgcgccgatcttggaaagatttacggctttaaatcattccaggacagccagggcgaattattttctctttgccgcgaacgggaagagactcttgttattcccgaaaggccgttctcaataactgataaaatctcgttcctgaaggaagccggcttccggcgtttcatcattgatctcagcggacctgtcctgaaaaaaaaggcatacaaagacctgatgcgctcggcggaaaacggcgtacctttacctgacataagcaggttcaactggaaagatggattttatacagtgaacaatgaaaagtga

SEQ ID NO: 59834 - protein, 679 aa, Unknown
  Obtained from environmental sample
  DOMAIN (38)...(267): Peptidase family U32
  misc_feature (1)..(679): Xaa is any amino acid
MRSANFTYPRFEAALRSLRRMGKKTYVTVNTVFEQREADRMYQLLKYLSSLGPDALIVQDFGVLAMVNSEFPKLKIHASTQMNIASGRGANALSRHGVSRVVLARELCLEELKSIRADTNVEMEVFTHGALCVSASGLCLFSSYLGGKSANRGMCTQACRRMYNHGEESGTAQQSGFYFSPADLQLLEQLPDLAAIGINALKIEGRMKSADYVGTVTSAYRLVLDAIAENVATGGENIARSIARAQEILRGDFARSKTKFYFFSAEEDKIDWLNPEQDGGTGIALGVIRNVRGSDKRRQGFVVSDDIPAIAKLSAGDSIRLHRSDDSERVSHKLTYAEAHDGAYWLSIPDGFGPGDRVYLIQNKAMSKRYRPVTGSISEGKRGPAFEKAPIPKIPDLYKSKPTGSRASVLPEGIYVSVSNINDLYVVQSSRPAKVMLNLSHKNSAYILSEEKDPLPFRPCDTILVLNPYFPQTVSEPMASDISRLFGLGYRQFVINNPGHLSLFRDFRAEIQLIAGPWLYMFNTWALSFIASLGVDGFVSPFENNRQNLERTLDRENLRRVREFVFVPVFAWPVLFRIRADLGKIYGFKSFQDSQGELFSLCREREETLVIPERPFSITDKISFLKEAGFRRFIIDLSGPVLKKKAYKDLMRSAENGVPLPDISRFNWKDGFYTVNNEK

SEQ ID NO: 59835 - DNA, 621 bp, Unknown
  Obtained from environmental sample
  misc_feature (1)..(621): n is a, c, g, or t
ttgcacatttacgccctatatagggtatcacagacagaattatgcagactgtgtacgttgtatacaatctgcatgctgtccatgaccggaggccatgtgccgccggatttgccattatggaggcgttttatgaacaacctcaacagcattcttatcgaggggaacatggtgcgcgacccgcagtaccgcaccactcccagggggacgccggtctgcaatttcagcctggcttccaaccgttatttcaggcaggaaaacggttatgaaagggaagtatcctttttcgatgtcgaaacctgggcaaagctcgcggatacctgcaacaacctgggcaagaaagggcgcggcgtaagggtggtaggccgcttgaaacaggacagatggacaggaaacgacggtaagccccattcgcgtatttccattgtcgctgaacatgttgaattccgccctgaattcaaaaaagaggctgcagaaaagatcaatgatgccgcttacagtgataaccttgccgaggaagtttcggcttcagaagaagccgccgaagtagtacaggattatgaggaagcggcggntatgactgaatacgaggagtccccggtattggcggagatggtgttttaa

SEQ ID NO: 59836 - protein, 206 aa, Unknown
  Obtained from environmental sample
  DOMAIN (47)...(149): Single-strand binding protein family
  misc_feature (1)..(206): Xaa is any amino acid
MHIYALYRVSQTELCRLCTLYTICMLSMTGGHVPPDLPLWRRFMNNLNSILIEGNMVRDPQYRTTPRGTPVCNFSLASNRYFRQENGYEREVSFFDVETWAKLADTCNNLGKKGRGVRVVGRLKQDRWTGNDGKPHSRISIVAEHVEFRPEFKKEAAEKINDAAYSDNLAEEVSASEEAAEVVQDYEEAAXMTEYEESPVLAEMVF

SEQ ID NO: 59837 - DNA, 693 bp, Unknown
  Obtained from environmental sample
  misc_feature (1)..(693): n is a, c, g, or t
atggaaaaagacccggagtacgaaaaactgctgaaaaaactgaccaataacagtaatccggttatgctgaccgttcttgcggaccagaaactcctttggagttatcaggaactggaaagttcgctgggaacagtcccccaggatatgcgcctgttcaaccacggcgcgctgcttcctttatatgccctttactcgttaaggcgcaaggatgtcattgaggaaataaaatccgatcttccaatctggtactcaaatcccatcctccttgcttttataaaatttttcaagagttttagaaaaaaaagaccgcagagccatttggatgacgatgaaaaaccggctgcacctggcaaaaaagtcgacaagatgcagagtagcgccctgcggatcaagtctgacatcgtgccggaagggaagaccgtcgatgagtacattacggaactggaagatcgctggtgcagccttcgcgacgatgatacccgtaagaacttgattctgggcgttaaggcgcttatgaaagacaaactccgccaaaacatcagattaaagaaactgacatcaataaagcgaagcgatctgcgggaaatagccgactacattatcaacgagaacagcaccctggttaaactgaaagatcaggagtcccttcgcacgtatatggaactgtatatgcttaaactggtgctaagatag

SEQ ID NO: 59838 - protein, 230 aa, Unknown
  Obtained from environmental sample
  misc_feature (1)..(230): Xaa is any amino acid
MEKDPEYEKLLKKLTNNSNPVMLTVLADQKLLWSYQELESSLGTVPQDMRLFNHGALLPLYALYSLRRKDVIEEIKSDLPIWYSNPILLAFIKFFKSFRKKRPQSHLDDDEKPAAPGKKVDKMQSSALRIKSDIVPEGKTVDEYITELEDRWCSLRDDDTRKNLILGVKALMKDKLRQNIRLKKLTSIKRSDLREIADYIINENSTLVKLKDQESLRTYMELYMLKLVLR

SEQ ID NO: 59839 - DNA, 456 bp, Unknown
  Obtained from environmental sample
  misc_feature (1)..(456): n is a, c, g, or t
atggaaccgtccaattcgctgacaaatttaaaagagtccgcagacgaagttataaacgcttattccggctcatacccaaatgtaaaattcaatattgcgcatattcaggatattcagataaaaattgacaaacacaggctttcgcaaattcttacaaaccttgtgataaacgccgttgattcaatgtcgggaaacggagaaattgaattgcgttccgatattgtaaaaaaaagggaagtttgttactgtagaataagcgtcaaggattcgggcaagggtatcggcgaagaggaaggcaaacaaatttttactccctattttacgactaaagcgtcaggcacaggattagggcttcccattgttgagcgaattgttacggatcatggcggaacaatctggtttgattcggcgctcggtataggatcaacattttatatcgatctgccgtcagcttga

SEQ ID NO: 59840 - protein, 151 aa, Unknown
  Obtained from environmental sample
  DOMAIN (42)...(151): Histidine kinase-, DNA gyrase B-, and HSP90-like ATPase
  misc_feature (1)..(151): Xaa is any amino acid
MEPSNSLTNLKESADEVINAYSGSYPNVKFNIAHIQDIQIKIDKHRLSQILTNLVINAVDSMSGNGEIELRSDIVKKREVCYCRISVKDSGKGIGEEEGKQIFTPYFTTKASGTGLGLPIVERIVTDHGGTIWFDSALGIGSTFYIDLPSA

SEQ ID NO: 59841 - DNA, 1212 bp, Unknown
  Obtained from environmental sample
  misc_feature (1)..(1212): n is a, c, g, or t
atgcgcgtcgccagtcggctggtaaagaccgggcgtgacattgaaacagagtacggaattccaatcatcaacaagcgagttgccgtaacgcctgtcgcgcttgtcgccgcttcctccggcgaggaggatttcgctccctttgcggttacgatggacgaagccgccagagagatggaaattgattttatcgggggattttcggccctggttcagaaagggtttacttccggcgacgagcggctgatcaattcgctgccagaggcgctggcgcagacggagcgggtctgcgcctcggtgaatgtggcggcaaccaagagcggcattaacatggacgcggtacgccgcatgggtgaaattatcatagacacggcgggaaaaaccgccgcccgcgacggcataggctgcgcgaagctcgttgtgttctgcaacgcgccggaagacaacccctttatggccggcgcttttcacggggtaggggaggcggagacctgccttaatgtcggcgtttcagggccgggcgttattaaagccgcgctggaaaaccaccggagcgccggttttgacgagctggccgatatcatcaaaaaaaccgcctttaagataacccgcatgggccagcttgtcggcatggaagcggcaaaccgcatgggcgtgcctttcggcatacttgacctttcgcttgcgccgacaccggcggtgggcgattccgttgcgcgtatcttagaggagatggggcttgaagccgccggaacccacggaacaacggcggcgctcgcgatgttaaccgacatggtaaaaaagggcggtattatggcgtcgacccatgtaggcggcttttccggcgcatttattcccgtctccgaggacgaaggaatggtagcggctgtaaaaagcggttcaatctcccttgataaactggaagctatgacctgcgtctgctccgtcgggctggatatgattccccttcccggagacacctcggcggctactatcgccgcgattatcgccgacgagatggctataggtatggttaacaacaagacaaccgccgtgcgtgtaattcccgttccatgcaaaaaagcgggcgagtgggcggaattcggcggtcttttgggcggctccccgataatggcggtcaacagcgcgaagagcgacgcgtttgtaaaccgaggcgggcgtattctggcgccggtgcatagttttaggaattaa

SEQ ID NO: 59842 - protein, 403 aa, Unknown
  Obtained from environmental sample
  DOMAIN (1)...(403): Uncharacterized ACR (DUF711)
  misc_feature (1)..(403): Xaa is any amino acid
MRVASRLVKTGRDIETEYGIPIINKRVAVTPVALVAASSGEEDFAPFAVTMDEAAREMEIDFIGGFSALVQKGFTSGDERLINSLPEALAQTERVCASVNVAATKSGINMDAVRRMGEIIIDTAGKTAARDGIGCAKLVVFCNAPEDNPFMAGAFHGVGEAETCLNVGVSGPGVIKAALENHRSAGFDELADIIKKTAFKITRMGQLVGMEAANRMGVPFGILDLSLAPTPAVGDSVARILEEMGLEAAGTHGTTAALAMLTDMVKKGGIMASTHVGGFSGAFIPVSEDEGMVAAVKSGSISLDKLEAMTCVCSVGLDMIPLPGDTSAATIAAIIADEMAIGMVNNKTTAVRVIPVPCKKAGEWAEFGGLLGGSPIMAVNSAKSDAFVNRGGRILAPVHSFRN

SEQ ID NO: 59843 - DNA, 675 bp, Unknown
  Obtained from environmental sample
  misc_feature (1)..(675): n is a, c, g, or t
ttgaccgccattatcggggagccgcccaaaagaccgccgaattccgcccactcgcccgcttttttgcatggaacgggaattacacgcacggcggttgtcttgttgttaaccatacctatagccatctcgtcggcgataatcgcggcgatagtagccgccgaggtgtctccgggaaggggaatcatatccagcccgacggagcagacgcaggtcatagcttccagtttatcaagggagattgaaccgctttttacagccgctaccattccttcgtcctcggagacgggaataaatgcgccggaaaagccgcctacatgggtcgacgccataataccgcccttttttaccatgtcggttaacatcgcgagcgccgccgttgttccgtgggttccggcggcttcaagccccatctcctctaagatacgcgcaacggaatcgcccaccgccggtgtcggcgcaagcgaaaggtcaagtatgccgaaaggcacgcccatgcggtttgccgcttccatgccgacaagctggcccatgcgggttatcttaaaggcggtttttttgatgatatcggccagctcgtcaaaaccggcgctccggtggttttccagcgcggctttaataacgcccggccctgaaacgccgacattaaggcaggtctccgcctcccctaccccgtga

SEQ ID NO: 59844 - protein, 224 aa, Unknown
  Obtained from environmental sample
  misc_feature (1)..(224): Xaa is any amino acid
MTAIIGEPPKRPPNSAHSPAFLHGTGITRTAVVLLLTIPIAISSAIIAAIVAAEVSPGRGIISSPTEQTQVIASSLSREIEPLFTAATIPSSSETGINAPEKPPTWVDAIIPPFFTMSVNIASAAVVPWVPAASSPISSKIRATESPTAGVGASERSSMPKGTPMRFAASMPTSWPMRVILKAVFLMISASSSKPALRWFSSAALITPGPETPTLRQVSASPTP

SEQ ID NO: 59845 - DNA, 414 bp, Unknown
  Obtained from environmental sample
  misc_feature (1)..(414): n is a, c, g, or t
gtgaaagggagcgttagtcgggggctgcttgtttatctgggcgtagcgcataatgacactgaatccgacgcggattggctttctgagaaaattgcttatcttaggatttttgacgatgaggaagggaaaatgaatctttcccttaaagacatagccgctaatgataataaggcggggcttttggctgtttcgcagtttacgttgttggcggacgcgcggaaggggagacggccgtcgtggaacggagcggcggcgcctgaaaaggcgaaacagctttatgagtattttatcggcgcggtaaggaagacggggcttgtctgcgaatgcggtgagtttcaggcgcatatgatggttaagtatataaatgacgggcctgttactattgttttggatactgaagaattatcaaagtaa

SEQ ID NO: 59846 - protein, 137 aa, Unknown
  Obtained from environmental sample
  DOMAIN (10)...(132): D-Tyr-tRNA(Tyr) deacylase
  misc_feature (1)..(137): Xaa is any amino acid
MKGSVSRGLLVYLGVAHNDTESDADWLSEKIAYLRIFDDEEGKMNLSLKDIAANDNKAGLLAVSQFTLLADARKGRRPSWNGAAAPEKAKQLYEYFIGAVRKTGLVCECGEFQAHMMVKYINDGPVTIVLDTEELSK

SEQ ID NO: 59847 - DNA, 318 bp, Unknown
  Obtained from environmental sample
  misc_feature (1)..(318): n is a, c, g, or t
atggaaaatattttagaagaaatcattggggatattcaggatgagttcgataatgaaagtgaggatgttcttgatcttggcggcggagtgtggctctgcgaaacaagggtcaatctggaagatctttccgagcgcatcgggataaaatttccggtggaaaaattcgatacccttgggggctttgtctttgaccttttcgggaaaatacctgtaaaatatgagaaggccgtttgggaaggccatgattttattatacaggatatggaaggccacaagataaattcggtgaagattatcctcagcaagaaagaggattaa

SEQ ID NO: 59848 - protein, 105 aa, Unknown
  Obtained from environmental sample
  DOMAIN (24)...(102): Transporter associated domain
  misc_feature (1)..(105): Xaa is any amino acid
MENILEEIIGDIQDEFDNESEDVLDLGGGVWLCETRVNLEDLSERIGIKFPVEKFDTLGGFVFDLFGKIPVKYEKAVWEGHDFIIQDMEGHKINSVKIILSKKED

SEQ ID NO: 59849 - DNA, 393 bp, Unknown
  Obtained from environmental sample
  misc_feature (1)..(393): n is a, c, g, or t
ttggcgcagcttgacgcggcgtttaagggagtagtcgcgggggcaaaacgaaaaacaatcatttttgccgaccgcttccctttccgttacttctccgacgcctacggattaagatattttgcggcatttcccggctgttcaacggaaaccgaaccgagcgtcgccacagtcgcatttttgatagacaaggtcaaggcggaaaaaatccctgtagtatttcacattgaactgtccaatgagcgtatggcaaatacaatatgcgccgaaacaggggcaaaaaaactgatgtttcacgcctgtcataacatctctaaaaaggattttgacgcagggcttggctatcttgaccttatgcgtgtaaatgtcgaaaatctgaaagaggcgttacgataa

SEQ ID NO: 59850 - protein, 130 aa, Unknown
  Obtained from environmental sample
  misc_feature (1)..(130): Xaa is any amino acid
MAQLDAAFKGVVAGAKRKTIIFADRFPFRYFSDAYGLRYFAAFPGCSTETEPSVATVAFLIDKVKAEKIPVVFHIELSNERMANTICAETGAKKLMFHACHNISKKDFDAGLGYLDLMRVNVENLKEALR

SEQ ID NO: 59851 - DNA, 696 bp, Unknown
  Obtained from environmental sample
  misc_feature (1)..(696): n is a, c, g, or t
atgctgataaactgtcaaaacctttctttcgggtatgacggacatattgtcgtctccggtttgaacttttcggtacagaccggggattttcttcttattgccggcgagaacggctcaggaaaatccacgcttgtaaaaggcttgctgcgtatcctgccccctatggaagggacaatcacttttagtcccgattacaaacagtctgaaacaggctatctttcccaacaaacagccgccaaacaggattttccggcgggagtttttgaaatcgtattgtcgggaaatttgggaaagaaagggttttggcccttatacacccattccgaaaaacaaaaagccgaagaaaaactgcgcttgcttgacattgaggatttaaaggacagatgtttccgggagctttcaggcggacagcaaaggcgcgtcttgcttgcgcgttccctttgcgcggcggaaaaacttcttgtgctggacgaacctttcgccggccttgacccgctgattagcgcgcagttgtaccgcctgcttaaaaaaattaacaaggaaacaaacataacgataattatggtttcccatgacattacagccgccgactgcgtaaaaaatgttttgcatttgcgggaaaaacaggtttttttcggcagtatggaagaatacagaaaaagcgagccgggcagaaaatttttaggagaactctga

SEQ ID NO: 59852 - protein, 231 aa, Unknown
  Obtained from environmental sample
  DOMAIN (28)...(208): ABC transporter
  misc_feature (1)..(231): Xaa is any amino acid
MLINCQNLSFGYDGHIVVSGLNFSVQTGDFLLIAGENGSGKSTLVKGLLRILPPMEGTITFSPDYKQSETGYLSQQTAAKQDFPAGVFEIVLSGNLGKKGFWPLYTHSEKQKAEEKLRLLDIEDLKDRCFRELSGGQQRRVLLARSLCAAEKLLVLDEPFAGLDPLISAQLYRLLKKINKETNITIIMVSHDITAADCVKNVLHLREKQVFFGSMEEYRKSEPGRKFLGEL

SEQ ID NO: 59853 - DNA, 579 bp, Unknown
  Obtained from environmental sample
  misc_feature (1)..(579): n is a, c, g, or t
atggaggtaggttcctttatcgggcttgccgccgtcaccggaggggatctccacatagaagggacgcggccccaggatttgcgcccggcgaaaatcgcctttggcaagctgggcatttcctgggcgcatgagggaacaactatccatgtcccgcaaaaacagccgttggaggttaactgcgatattggcggcatgataccaaaaatcgacgacgcgccctggcccggcttcccccccgaccttaccagcattatcaccgttgttgccacgcaggtaaaaggaacggtgttaatccacgaaaaaatgtttgaatcgcggatgttctttgtggacaagctcatcggcatgggcgcgcggatagtgttatgcgatccccacagggccgtggtttcaggcccggcgaagctgcacggctccgagcttaccagccccgacgtacgcgccggcatggcaatgctcattgccgccctctgcgccgagggcagaagcgttatacgcaacgtctaccagatcgagcgcggctacgagcgcctcgtggaaaggctttccgcccttggcgcgttacttgtccggcattaa

SEQ ID NO: 59854 - protein, 192 aa, Unknown
  Obtained from environmental sample
  misc_feature (1)..(192): Xaa is any amino acid
MEVGSFIGLAAVTGGDLHIEGTRPQDLRPAKIAFGKLGISWAHEGTTIHVPQKQPLEVNCDIGGMIPKIDDAPWPGFPPDLTSIITVVATQVKGTVLIHEKMFESRMFFVDKLIGMGARIVLCDPHRAVVSGPAKLHGSELTSPDVRAGMAMLIAALCAEGRSVIRNVYQIERGYERLVERLSALGALLVRH

SEQ ID NO: 59855 - DNA, 2040 bp, Unknown
  Obtained from environmental sample
  misc_feature (1)..(2040): n is a, c, g, or t
gtgaaccggcccttatatgatctgccccttccaaaaaaagggaacgtggaagtccttacccttaccgactccgaactgaccgccgcttatatcaacctttattttaagcgcggcccgcaggcgaggcgggacgatctctcgtattaccgcggcgaaatcatcgactacctcatcgacactatgctgagtctgcgttttgaagaggcgctcctgaaaccggaaacgcctcacgtaagcgttaacgccggaaccgtaagttacgcgacatcctcgcggttttatgttttgctgtcccagccgaaaaccggcggcgtagaggcaagccttgaggatttactgagaataaaagagactatgctccgttacggctttaccgattcggagatgaaaaccgcggcggatacgctggtttcggatttgcagaagctggttcaggaaaaggacaagcagcaatcgcaaaaatatattgactcgctgactgactattatcttaaaggcgggaattacgcggatgttgaatgggaactgaacgcggtccggcaaatgctcccccatatcaccgcgaaagacattaacgccgccgttaaagattattttgcgtcaacagatattcaggtgtttgtcttcgcgccggattcggaacaggataatctgccggatgaggcacgtataaggcggatggtggcgggaagcaagaaaatgaaaatcgccgcgcccagcgcaaaagccgttgaaggcgcgcttttgtcgtctgaacctgaaaagggatctgtggtttcggaatccgttgacgcggaaacaagcgcgattttctgggaactgagcaacggggcgcgcgtgatcctcaaatcgaccaaaaacaaaaatgacgagattgttatgcaggcgatggccctcggcggaacaagcagcgtcgcgccggaagacgaagtatccgcggatctcgccatagaaatggcccaggtttccggcctcggcccatggacgcgtccggaactgacaaaaaaactcgcgggcaaacaggtttccctatcgcagtatgtgtacagttattaccgcggtttcagggggtcctccactacgggcgacttgaaaactttttttgaaatgatgtacctcagcttcacggaccagcgcatagacaatgaagccgtgcaagccatgatggatcagtacaaaacttccctcgccctcaggagggaagacccgcacgctgttttttctgacgagatcaacaggacgatatacagcggacacccgcattttaagcccctggagttgaacgatcttcccaaagccgatattgataccgctcttgcctttgtccgaaagagcctgaaccccgcggattatacttttatattcacggggaacctgaatttaaaaatgatgcgggaatatgccgaaacataccttgcttcaatcccacaaaaggaaagctggaatacatggaccgatttgaaagttacgcgcccaggaaaagttgaaaatatcgttcacaaagggaaggaagaacaaagcacggtttacatggtatggttttccaaagccccattcagcgacgagcttagcgcggcatgccaggtgttaaacgaatatcttgacataaaactggatgacgagatccgtgaaaaaatgggaggcgtctattcgatttcctccggcgtgtccgtctcgccggttccgcagggcgagctttccatgcaggtgtatttcagctgcgatccaaagcgggcaacggaacttcaaaccgccgttatcgcgttattgaaccaggcggcgggcggcgttattgacaatgacacatttacaaaggccatggaagccccaaagaaagagtgggaagtctctattcagagcaacgcctacatcgcccagagttacgccaattcgtcggtactgctgaaccttccgctgtcgcggctggacaagcggccaaaattgtttgacgccgtaacccaggctgacattcagagggtatgctcccagcttttacggagcgacggcccggcgattgtggtgttaatgccggacaagtaa

SEQ ID NO: 59856 - protein, 679 aa, Unknown
  Obtained from environmental sample
  DOMAIN (432)...(610): Peptidase M16 inactive domain
  misc_feature (1)..(679): Xaa is any amino acid
MNRPLYDLPLPKKGNVEVLTLTDSELTAAYINLYFKRGPQARRDDLSYYRGEIIDYLIDTMLSLRFEEALLKPETPHVSVNAGTVSYATSSRFYVLLSQPKTGGVEASLEDLLRIKETMLRYGFTDSEMKTAADTLVSDLQKLVQEKDKQQSQKYIDSLTDYYLKGGNYADVEWELNAVRQMLPHITAKDINAAVKDYFASTDIQVFVFAPDSEQDNLPDEARIRRMVAGSKKMKIAAPSAKAVEGALLSSEPEKGSVVSESVDAETSAIFWELSNGARVILKSTKNKNDEIVMQAMALGGTSSVAPEDEVSADLAIEMAQVSGLGPWTRPELTKKLAGKQVSLSQYVYSYYRGFRGSSTTGDLKTFFEMMYLSFTDQRIDNEAVQAMMDQYKTSLALRREDPHAVFSDEINRTIYSGHPHFKPLELNDLPKADIDTALAFVRKSLNPADYTFIFTGNLNLKMMREYAETYLASIPQKESWNTWTDLKVTRPGKVENIVHKGKEEQSTVYMVWFSKAPFSDELSAACQVLNEYLDIKLDDEIREKMGGVYSISSGVSVSPVPQGELSMQVYFSCDPKRATELQTAVIALLNQAAGGVIDNDTFTKAMEAPKKEWEVSIQSNAYIAQSYANSSVLLNLPLSRLDKRPKLFDAVTQADIQRVCSQLLRSDGPAIVVLMPDK

SEQ ID NO: 59857 - DNA, 1746 bp, Unknown
  Obtained from environmental sample
  misc_feature (1)..(1746): n is a, c, g, or t
atgattaacgaaaacaacgccgaagcaaaacctgattctccgggaacggatttcataagtgaatttataaaagaagacttagcggcaaaaagatacagttatgtgcatactcgcttcccgcccgaacccaacggctggctgcacatcggtcactgcaaggcgttctatatcgactttagcatggctgagcgtttcggcggcaaatgcaatctgcgctttgacgacaccaaccccgaaaaagaagacatctcctacgttgaggcaatcaaacgtgacataaaatggatgggctacgattgggaagaccgtgaatattacgcttccgattattacgattacctttatgacctggcggtgaaaattatcaaaaagggaaaagcctatgttgacgatttaaccgataccgaaatgagcgaataccggggaacggcggttgccgacaagaacaatatcaccataacgccgccgggcaaaaacagtccttacagagatcgttctgtgnaggaaaaccttgacctcttcgcaagaatgcgggggggcgaattcgccgacggagagaaaactctgcgagcgaaaatcgacatgactcaccctaatctgcttttgcgtgatcctgtcatgtaccgaatacgacgcgaaacccattaccgcaccggcaattcatggtgtatctatccaatgtacgattttcagcacccgctttccgacgcaaaagagggaatcacccactctctctgttcgcttgaatacgaaattcaccgcccattgtacgaatggtttatccaggaagctgaagttttcccttcacgccagatagaattcgcccgtcttaatttgagccataccgttatgagcaaacgctggcttttaaaacttgtgcaggaaaaatatgtttcaggctgggatgatccaagaatgccgacaatagccggtcttcgcagacgaggttacactcccgaagctatccgcagttttgtttcgcagattggcattgcaaaaacggacagcatggtagacatcgcctttcttgaatactgccttcgtgaagatttaaacaaacgcgctatgcgtgtaatgacagtcctgcgccctctcaaattaatcatagaaaattttgacgaaggcaagaccaatgaaatggaagcagtaaataaccccgaagacgagggcgcgggaaaacgccatgtgccattctcccgcgaattatggattgagcgtgaagattttgaagaagtcccgccgccaaaatatttccgtctttttcccggaaactccgtccgtctgcgttacgcatacattgttacctgtaccggctttgacaaagacgcaaacggtaacattacagccgtgcggtgtacctacgacccggaaacaaggggcggtaacgctaaggataacaaaaaagtaaaaggtacaattcactgggtttcggcagcgcattccgtcccaatacaagcccgtatttacgattatttgttcggcgtagaaaagccaatggaagttcctaaccgccccgacggctctcccggggaatttaccgacaacttaaaccccaattcgctggaagtaattgaaaacgcacaggctgaaccatcgctcgcaaatgtttcgccgggcaaagttttccaatttgaacgcctgggctattttgtccgtgatccggacgcttctgcgaacgggaaacctgtttttaacaagacaatcggtcttcgtgacacttgggcgaaaattgtaaataagaattag

SEQ ID NO: 59858 - protein, 581 aa, Unknown
  Obtained from environmental sample
  DOMAIN (355)...(553): tRNA synthetases class I (E and Q), anti-codon binding domain
  misc_feature (1)..(581): Xaa is any amino acid
MINENNAEAKPDSPGTDFISEFIKEDLAAKRYSYVHTRFPPEPNGWLHIGHCKAFYIDFSMAERFGGKCNLRFDDTNPEKEDISYVEAIKRDIKWMGYDWEDREYYASDYYDYLYDLAVKIIKKGKAYVDDLTDTEMSEYRGTAVADKNNITITPPGKNSPYRDRSVXENLDLFARMRGGEFADGEKTLRAKIDMTHPNLLLRDPVMYRIRRETHYRTGNSWCIYPMYDFQHPLSDAKEGITHSLCSLEYEIHRPLYEWFIQEAEVFPSRQIEFARLNLSHTVMSKRWLLKLVQEKYVSGWDDPRMPTIAGLRRRGYTPEAIRSFVSQIGIAKTDSMVDIAFLEYCLREDLNKRAMRVMTVLRPLKLIIENFDEGKTNEMEAVNNPEDEGAGKRHVPFSRELWIEREDFEEVPPPKYFRLFPGNSVRLRYAYIVTCTGFDKDANGNITAVRCTYDPETRGGNAKDNKKVKGTIHWVSAAHSVPIQARIYDYLFGVEKPMEVPNRPDGSPGEFTDNLNPNSLEVIENAQAEPSLANVSPGKVFQFERLGYFVRDPDASANGKPVFNKTIGLRDTWAKIVNKN

SEQ ID NO: 59859 - DNA, 351 bp, Unknown
  Obtained from environmental sample
  misc_feature (1)..(351): n is a, c, g, or t
ttgttaataaagaaaacatgggtggaaaaagccgatgaaatccgcaaaggaaaattgcatgacgatattccgttgtttatgaaaactgtcgaacagcccaattacataaaagcaatagaagaattcagcgtgattcttgatgagttggcttatctttttttcggcgctcaaagcgaaaaagaagattttgccgagtacaccttccgcattgacgcgcaaatgggacttttctggtggtacggaagcaaacttactttattaaaagaattagaaaataaaaatattgaccaaaacgataaatgcttatgggcggttttacttcttggtctgtgttatctgacaaatttttaa

SEQ ID NO: 59860 - protein, 116 aa, Unknown
  Obtained from environmental sample
  misc_feature (1)..(116): Xaa is any amino acid
MLIKKTWVEKADEIRKGKLHDDIPLFMKTVEQPNYIKAIEEFSVILDELAYLFFGAQSEKEDFAEYTFRIDAQMGLFWWYGSKLTLLKELENKNIDQNDKCLWAVLLLGLCYLTNF

SEQ ID NO: 59861 - DNA, 645 bp, Unknown
  Obtained from environmental sample
  misc_feature (1)..(645): n is a, c, g, or t
ttgaacagcatgaaaaactgcgcgggcaaaccggttctattgaagatggttgccgttatacagcaaaacaaggattatctgggcgaagttgacggacttatcggcgacggggatcacggtatgaacatgaataaaggttttaccatgttcggcgatcagatcagggaaaaggatattgattttaccgccggcctgaatgatctggggaatctgcttttctcacagatcggcggttccatggggcctatttacggaactatgttcatgggaatggccgaggccggagaaagatttgatgttattgatgtttacaactttgcggccatgcttgacgcgggattaagcaatctgcaggaagtggtgcaggccagggtcggggataaaacattgatagacactcttgtgccggccaatgacgccgttcagaaagcggccaaagagggaaagagctttgcggacgccctgaaagacatgaaagccgccgccgaagcgggccgtgatttcacaaaaaatctactttcaaagttcggccgttccagccgtctgggcgagcgttcccgaggcgtactggacgccggttccgtttcatgctgcctgattctctgcgctatggcggacggtattcttgaactgctcggagactga

SEQ ID NO: 59862 - protein, 214 aa, Unknown
  Obtained from environmental sample
  DOMAIN (33)...(206): DAK2 domain
  misc_feature (1)..(214): Xaa is any amino acid
MNSMKNCAGKPVLLKMVAVIQQNKDYLGEVDGLIGDGDHGMNMNKGFTMFGDQIREKDIDFTAGLNDLGNLLFSQIGGSMGPIYGTMFMGMAEAGERFDVIDVYNFAAMLDAGLSNLQEVVQARVGDKTLIDTLVPANDAVQKAAKEGKSFADALKDMKAAAEAGRDFTKNLLSKFGRSSRLGERSRGVLDAGSVSCCLILCAMADGILELLGD

SEQ ID NO: 59863 - DNA, 477 bp, Unknown
  Obtained from environmental sample
  misc_feature (1)..(477): n is a, c, g, or t
ttgcnggtctcacaaaaggccatagacaacacacgcagcgtcggcatcggactcactccctgcaccctgccagcggtggggcatcctaatttcgaaatcaaagacggaaccatggaagtcggcataggccatcacggggagccggggattgaagtctgtccgcttgagaccgcggcgcaaatggcaaaacggatggttgatgttgtgcttcccgactatccttttaaggccggcgatgaagtagttgtactggtatcgggacttggcgcgaccccaataatggaactgtatgttctttatgatgagatcgaaaaactcatcaccgcaaagggaatcaggatacaccggagttatacggggaattattttacatcccttgaaatgatgggcgctacccttacagttatgaaacttgacgacgaactcaaaaagctcgttgacatgccctgttacagcgtgggcctcaaacagaattaa

SEQ ID NO: 59864 - protein, 158 aa, Unknown
  Obtained from environmental sample
  DOMAIN (2)...(155): Dak1 domain
  misc_feature (1)..(158): Xaa is any amino acid
MXVSQKAIDNTRSVGIGLTPCTLPAVGHPNFEIKDGTMEVGIGHHGEPGIEVCPLETAAQMAKRMVDVVLPDYPFKAGDEVVVLVSGLGATPIMELYVLYDEIEKLITAKGIRIHRSYTGNYFTSLEMMGATLTVMKLDDELKKLVDMPCYSVGLKQN

SEQ ID NO: 59865 - DNA, 483 bp, Unknown
  Obtained from environmental sample
  misc_feature (1)..(483): n is a, c, g, or t
ttgcttaccaacgccatcaaatacaggaatgagggaagcgtagagctcaaggtgcgctgtgagcgtgaaaacgatacggtgtggattaacgccgccatcagcgataccggcataggcatctccgaagaggccatgaaagacctgttccaggattatcacaggatcgattccaaatccaaccatcatgttgagggtacaggcctgggcttgtccatcaccaaaaaacttgtggaaatgatggacggagaaatcaaagtggaaagcgagatcggcaaaggctcgacattcagtttccgcataaagcacgcccctgtcggcgatgcggttcttggagcggacatttccgacaaactgcgcaacttctgctacactgacgacaagcgcgttgtctcgcaaaaactggtaaggatcgatttgagctacgccaaggtgctggtagtagacgacattacaccaatctggacgtggcggcgggtattttaa

SEQ ID NO: 59866 - protein, 160 aa, Unknown
  Obtained from environmental sample
  DOMAIN (2)...(103): Histidine kinase-, DNA gyrase B-, and HSP90-like ATPase
  misc_feature (1)..(160): Xaa is any amino acid
MLTNAIKYRNEGSVELKVRCERENDTVWINAAISDTGIGISEEAMKDLFQDYHRIDSKSNHHVEGTGLGLSITKKLVEMMDGEIKVESEIGKGSTFSFRIKHAPVGDAVLGADISDKLRNFCYTDDKRVVSQKLVRIDLSYAKVLVVDDITPIWTWRRVF

SEQ ID NO: 59867 - DNA, 927 bp, Unknown
  Obtained from environmental sample
  misc_feature (1)..(927): n is a, c, g, or t
ttgcatgttgactgtttaaccaacggacctgccgctatcgaaagaatacggtcaggaacacccgtttacaatgcaatcttcatggatcacatgatgccgggaatggacggcatagaaacggtggacaaaatccgagcgttaggcacggagtacgcgaagaaaatacccattatagcgcttaccgccaacgccattaagggaacggaaaagattttcttcgagcatgattttcaggcgttcatatctaaacccatcgacgttacggaaatggacgcggctttaaagaaatgggtgcgcgacaacacccgcgccgaagttgtaatcgaagacaaaccttccgagacagagcttcaatctgaaaatctgattatagaaatccccggagtggacacgaataaagggctttccctctacgccggagagaagaagctttatctgcccatgctccattcttacgcccacaacactccaaaagtgttggaaaaactgcgctccgtctcggcggagaatttgcacgactacgttatcacagtccacgggctgaaaggcacgagcgccgccatcggcgcggagcacattcgcattgccgctttggaacttgaaaacctttcaaggggcggcgacttgcagggcgttctcgccaaaaacgacaagctcattgccgaagcggaaatcattgtcaaaaacgtacaagagtggctggatcaaaacgacaccaagaaaccgcgccaaaaagcccccgaccgcgaacttctggcacggctgcggcaatattgtgaaagttacgatatgtccggcatagatgaagtaatgttggatatggataaatttgactacgatgaagacgctgaattaattgcatggataagggaaaagatcagcatttcaaaattaaacgaaattgcacagcggcttgcgcagtattaa

SEQ ID NO: 59868 - protein, 308 aa, Unknown
  Obtained from environmental sample
  DOMAIN (1)...(95): Response regulator receiver domain
  misc_feature (1)..(308): Xaa is any amino acid
MHVDCLTNGPAAIERIRSGTPVYNAIFMDHMMPGMDGIETVDKIRALGTEYAKKIPIIALTANAIKGTEKIFFEHDFQAFISKPIDVTEMDAALKKWVRDNTRAEVVIEDKPSETELQSENLIIEIPGVDTNKGLSLYAGEKKLYLPMLHSYAHNTPKVLEKLRSVSAENLHDYVITVHGLKGTSAAIGAEHIRIAALELENLSRGGDLQGVLAKNDKLIAEAEIIVKNVQEWLDQNDTKKPRQKAPDRELLARLRQYCESYDMSGIDEVMLDMDKFDYDEDAELIAWIREKISISKLNEIAQRLAQY

SEQ ID NO: 59869 - DNA, 429 bp, Unknown
  Obtained from environmental sample
  misc_feature (1)..(429): n is a, c, g, or t
atggtaaacattaagataaacggaataccccttcaagttgaggaagaaaccaccgttctggatgccgccagaaaagtgaatataaaaattcccacactttgctacaacccggatctgcctgcctgggcctcctgcggtctttgcatagtccgaaccgccggtgcgggttctccgcgcatggcaagggcctgttcaactccggtggccgaaaacatggacataattacccacgatccggaacttatcgccacgcggcgggtagtgctggaacttatcatgtccaatcaccctgcggactgcctccagtgcccgaggaacggaaactgcgaactgcaaaccctggccgccgaattggcatcagggagctgccctttaagcatatttccaacgggctttcaattgacgattccaacccggcaattgtgctga

SEQ ID NO: 59870 - protein, 142 aa, Unknown
  Obtained from environmental sample
  DOMAIN (4)...(70): 2Fe-2S iron-sulfur cluster binding domain
  misc_feature (1)..(142): Xaa is any amino acid
MVNIKINGIPLQVEEETTVLDAARKVNIKIPTLCYNPDLPAWASCGLCIVRTAGAGSPRMARACSTPVAENMDIITHDPELIATRRVVLELIMSNHPADCLQCPRNGNCELQTLAAELASGSCPLSIFPTGFQLTIPTRQLC

SEQ ID NO: 59871 - DNA, 702 bp, Unknown
  Obtained from environmental sample
  misc_feature (1)..(702): n is a, c, g, or t
atgggaaccaccctgcgggagatcatctttgagataggcggtggcattaaaggcggcaagaagttcaagggcgttcagaccggcgggccttccggcggtattctcaccgaaaaagctctggatctgccgattgactttgacacattgtcggccaacggctccatgatgggttcaggcggcatgatagtcatggacgaagacgactgcgtggttgacgttgcgcgcttctacatggatttctgcgttgacgagtcttgcggcaaatgctccccgtgccgaatcggcacttcgcaggttcttcacattttggagaaaattgccgccggtaacggcgaggaagaagaccttgagaggcttgaagtcattggtaaagctatggccaaggcatccctctgcgctttgggccagacagcgcccaatcctactctttccactgtaaagaattttagggaagagtacatggaacacatccatgacaagaaatgccgttccggcaagtgcaagaaactgatacgtttcttaatcgatatagaaaaatgtatcggctgcggcgcttgttcgaaaaaatgccctgccgcctgcattactcaggttcagggaaccgacaaaaagcggccgccctaccagatcgaacatgaggattgcttgaagtgcggtgaatgcttcaagacctgtaaattcaacgccatatccaagggctag

SEQ ID NO: 59872 - protein, 233 aa, Unknown
  Obtained from environmental sample
  DOMAIN (208)...(231): 4Fe-4S binding domain
  misc_feature (1)..(233): Xaa is any amino acid
MGTTLREIIFEIGGGIKGGKKFKGVQTGGPSGGILTEKALDLPIDFDTLSANGSMMGSGGMIVMDEDDCVVDVARFYMDFCVDESCGKCSPCRIGTSQVLHILEKIAAGNGEEEDLERLEVIGKAMAKASLCALGQTAPNPTLSTVKNFREEYMEHIHDKKCRSGKCKKLIRFLIDIEKCIGCGACSKKCPAACITQVQGTDKKRPPYQIEHEDCLKCGECFKTCKFNAISKG

SEQ ID NO: 59873 - DNA, 534 bp, Unknown
  Obtained from environmental sample
  misc_feature (1)..(534): n is a, c, g, or t
atggaccgttccaccatcgaaggcgatccccactcggttatcgaaggcatgatcaccgccggcaaggctatcggcgcccatcagggttttgtatacattcgcgccgagtatccgctggctattgaccggctgagaatagcgttgaaacaggcgcaggattacggcctgttgggaaaaaatatccttggatcgggttttgattttgacattgagatacgcctgggcgccggggcctttgtctgcggcgaggaaaccgctctgatcaagtctgtcgagggcaaccggggaatgccggtgcccaagcccccgttcccggcgaataagggcctgtggggaaagcccacgattatcaataacgtggaaacccttgcgaacgtccctgtgattaccgccagaggcggggcctggcttgccaaacttggaaccgaaaaatccaagggaaccaaggttttcgcccttatcggaaaagtcaagaactccggcctggtggagttccaatgggaaccaccctgcgggagatcatctttgagatag

SEQ ID NO: 59874 - protein, 177 aa, Unknown
  Obtained from environmental sample
  DOMAIN (1)...(174): Respiratory-chain NADH dehydrogenase 51 Kd subunit
  misc_feature (1)..(177): Xaa is any amino acid
MDRSTIEGDPHSVIEGMITAGKAIGAHQGFVYIRAEYPLAIDRLRIALKQAQDYGLLGKNILGSGFDFDIEIRLGAGAFVCGEETALIKSVEGNRGMPVPKPPFPANKGLWGKPTIINNVETLANVPVITARGGAWLAKLGTEKSKGTKVFALIGKVKNSGLVEFQWEPPCGRSSLR

SEQ ID NO: 59875 - DNA, 633 bp, Unknown
  Obtained from environmental sample
  misc_feature (1)..(633): n is a, c, g, or t
ttggaactccaccaggccggagttcttgacttttccgataagggcgaaaaccttggttcccttggatttttcggttccaagtttggcaagccaggccccgcctctggcggtaatcacagggacgttcgcaagggtttccacgttattgataatcgtgggctttccccacaggcccttattcgccgggaacgggggcttgggcaccggcattccccggttgccctcgacagacttgatcagagcggtttcctcgccgcagacaaaggccccggcgcccaggcgtatctcaatgtcaaaatcaaaacccgatccaaggatattttttcccaacaggccgtaatcctgcgcctgtttcaacgctattctcagccggtcaatagccagcggatactcggcgcgaatgtatacaaaaccctgatgggcgccgatagccttgccggcggtgatcatgccttcgataaccgagtggggatcgccttcgatggtggaacggtccatatacgcgcccgggtcgccttcgtcagcgttacagataacgaatttaacgtcgccctgggcttttctcgcaaggtcccatttcagccaggtgggaaacccgccccgccccgccctcgcatacctcggccgatctga

SEQ ID NO: 59876 - protein, 210 aa, Unknown
  Obtained from environmental sample
  misc_feature (1)..(210): Xaa is any amino acid
MELHQAGVLDFSDKGENLGSLGFFGSKFGKPGPASGGNHRDVRKGFHVIDNRGLSPQALIRRERGLGHRHSPVALDRLDQSGFLAADKGPGAQAYLNVKIKTRSKDIFSQQAVILRLFQRYSQPVNSQRILGANVYKTLMGADSLAGGDHAFDNRVGIAFDGGTVHIRARVAFVSVTDNEFNVALGFSRKVPFQPGGKPAPPRPRIPRPI

SEQ ID NO: 59877 - DNA, 531 bp, Unknown
  Obtained from environmental sample
  misc_feature (1)..(531): n is a, c, g, or t
gtgaaaagtggggaaataaaaccacctgcggcttgcaaggtgtataagcacgtgataggcggaatgcttgttcaagatagggatattgaatgttgggaaaaatttgagtgcccaacaacatcgaaatttccaaaggaaaaagaggcactggcaaaattctcttggcttgtttgcaaacacaccaaatccaatgcaatagttatgtgttatgaatataaagctggtttttttatgatactcgggcttggacctgggcagccaaaccgcatagattcaaacctgcgcttgtgccagccaagagtggcggataatgttaaacgcatgaatttgccagaaagcgtttggggtaatttggtgatggcatcggatgcttttttcccttttgcagacaatgtagatgtctccaattctgttggcataaagtatattgtgcagcccggcggttcaaaaagagacaatgaggttatagaagcctgcaataaatttggcattgcaatggcatttacaggaactaggcatttcagacactga

SEQ ID NO: 59878 - protein, 176 aa, Unknown
  Obtained from environmental sample
  misc_feature (1)..(176): Xaa is any amino acid
MKSGEIKPPAACKVYKHVIGGMLVQDRDIECWEKFECPTTSKFPKEKEALAKFSWLVCKHTKSNAIVMCYEYKAGFFMILGLGPGQPNRIDSNLRLCQPRVADNVKRMNLPESVWGNLVMASDAFFPFADNVDVSNSVGIKYIVQPGGSKRDNEVIEACNKFGIAMAFTGTRHFRH

SEQ ID NO: 59879 - DNA, 1062 bp, Unknown
  Obtained from environmental sample
  misc_feature (1)..(1062): n is a, c, g, or t
atgaacactcaaatagcggttttaggcgcgggcgcctgggggacggcaatagcaaaggtcattgctgaaaaagaaaaagatgtccttatctggagttttgagactgaggtaagggacgatataaacaataaaaaccagaattccagatatttgccgggtgtagatttacccaaaaaaataaaagcgacctctgatatcgaagaagcctcggaagggaaacaattccttatttacgccgtaccgtctttattcctgcttgatacgttgaaaaaaactctttccgtaaattccattagggatggaaaaaccataatcgccgtaataacaaaaggctttttacccaccgaaaacggcccccggctgattcttgaaaccatggaagattatctgcccggttttttccgccaatccctggtttacatttccggtccaagccacgccgaggaagtatcgcggggaaaagttaccgggcttatagccgccagtgaaaatcccaagaactcaatccgttttagggatttaataagaggcccgcatttactggtttattcatcgcttgatgtcaggggggtacaggcggcggcggcggcaaagaatgttattgcaatttcgtttgggttgttagacgcaatgaaaaccatcggcaaaatggatatgttcggtgacggcactgaatcacttctgcttgcggcgggactaaacgagatacagattctaggcaaagcgttaggcgcgactcataccgagacatttacttccatttccggaattggcgatttagacgttacgtgccgttctatttatggaagaaacaggcgttttggcagggaaataatcgagaaaaacattcttaaaccatttaaaaatattgacgatcttctttcccgaatcggtgaaattggctatttgccggaaggcgttgccgcggccaaatatgtccatattctggcggagaaacacaagcttaaaatgcccgtctccatcggattatgcagacttttaaacagggagattgatcctcangagtactgtgaaactcttttggcggattgggttaaataa

SEQ ID NO: 59880 - protein, 353 aa, Unknown
  Obtained from environmental sample
  SIGNAL (1)...(18)
  DOMAIN (186)...(347): NAD-dependent glycerol-3-phosphate dehydrogenase C-terminus
  misc_feature (1)..(353): Xaa is any amino acid
MNTQIAVLGAGAWGTAIAKVIAEKEKDVLIWSFETEVRDDINNKNQNSRYLPGVDLPKKIKATSDIEEASEGKQFLIYAVPSLFLLDTLKKTLSVNSIRDGKTIIAVITKGFLPTENGPRLILETMEDYLPGFFRQSLVYISGPSHAEEVSRGKVTGLIAASENPKNSIRFRDLIRGPHLLVYSSLDVRGVQAAAAAKNVIAISFGLLDAMKTIGKMDMFGDGTESLLLAAGLNEIQILGKALGATHTETFTSISGIGDLDVTCRSIYGRNRRFGREIIEKNILKPFKNIDDLLSRIGEIGYLPEGVAAAKYVHILAEKHKLKMPVSIGLCRLLNREIDPXEYCETLLADWVK

SEQ ID NO: 59881 - DNA, 744 bp, Unknown
  Obtained from environmental sample
  misc_feature (1)..(744): n is a, c, g, or t
atgaatctttcttactcccttatatttttacgggtccggcgttatataattattatatttgccgaatgtatggtaaaattttccagtaatcgcaaattaagaaaaatattttgtgcgattttaatcactgtatttgtattgcttatttcagattttatatattcattaaataaaagcgggagtaattttacggaatacaggatgatttggcctataatttccacgttgtttctttttatatatttatttatcattctaaaagaaaataaaaccgattatttaactggtttggacaaccgatacagtttctttgaatttgtacataaatttacacataacaagcgcggcaaatccctaataattgccatgattgatatattaaattttaaatctataaatgagtcttacggccatattgaaggtgataacgccctgcgtaatatggcgcaaataattaaattttgcgtaaagaaatcagatttttccgcgcgttatggcggggacgaatttgtacttgcagtaaaaactgaaacagacattgacgatttattggacaagattaatgaaagtttaaacctgtacaataaaaataacggaagaaattatgagataaaaataatctacggatttgacacgtactcttcagatgacaccagacggatagatgattttttaaatcacattaacaacctaatgcgcatgaataccgaagaaaaacgccgtgcgggagattataaaatatga

SEQ ID NO: 59882 - protein, 247 aa, Unknown
  Obtained from environmental sample
  DOMAIN (85)...(242): GGDEF domain
  misc_feature (1)..(247): Xaa is any amino acid
MNLSYSLIFLRVRRYIIIIFAECMVKFSSNRKLRKIFCAILITVFVLLISDFIYSLNKSGSNFTEYRMIWPIISTLFLFIYLFIILKENKTDYLTGLDNRYSFFEFVHKFTHNKRGKSLIIAMIDILNFKSINESYGHIEGDNALRNMAQIIKFCVKKSDFSARYGGDEFVLAVKTETDIDDLLDKINESLNLYNKNNGRNYEIKIIYGFDTYSSDDTRRIDDFLNHINNLMRMNTEEKRRAGDYKI

SEQ ID NO: 59883 - DNA, 372 bp, Unknown
  Obtained from environmental sample
  misc_feature (1)..(372): n is a, c, g, or t
atgctctacgcgggaatcacggaccccttccctatccgcatgcagggggcctttgtatccgaagaagaagtcgaggcggtggtcacccatgttaaaacattcggcggaccggattatattgacgacgagatattttttgacgaggaagaggaagaagccgagccgtctcttttttccggcgccgatgatcccctgtacgaaaaagccctggagatcgtgcttcagcagggaaaggccagcgccagctacatacagcgccgcctgaaaatcggctacaaccgctccgcccgcttggtagaagaaatggaacacaggggcgtcgtcggtccggcgcaagggtcaaagccaagggaactgctgcggggagtgtaa

SEQ ID NO: 59884 - protein, 123 aa, Unknown
  Obtained from environmental sample
  misc_feature (1)..(123): Xaa is any amino acid
MLYAGITDPFPIRMQGAFVSEEEVEAVVTHVKTFGGPDYIDDEIFFDEEEEEAEPSLFSGADDPLYEKALEIVLQQGKASASYIQRRLKIGYNRSARLVEEMEHRGVVGPAQGSKPRELLRGV

SEQ ID NO: 59885 - DNA, 885 bp, Unknown
  Obtained from environmental sample
  misc_feature (1)..(885): n is a, c, g, or t
gtgcgtattgtcgcgcctatccctgggaagcatgccgtgggtattgaggttcccaacgcaaaaaggcacattgtttcgttcagggaaattatcgaaggcgagcttcagcgcgagggcaaacggccggagattcccgtcgttatgggaaaggacgtttcaggcgatacggcgctgactatcgatctgacacagatgccccacctgttgattgccggagctaccggctcaggtaaatcggtctgcgtcaattcgctgatcctttcaatactgtaccagcttcccccttcggagtgccgcctaattctcatcgatccaaaaattgtagaactgaaactctacaatgatatcgcgcatctgctgactcccgtaatcaccgagccgaaaaaagcgtttcaggctttgcagtactgcatttatgaaatggaacgacgctatgcctgccttgattcaatgggggtgcgggacatacgcaattacaacaaacgtattaaggaaagaaacatagcccaggaacatatgccttatatcgttgtaattattgacgagtttgcagaccttatggcgaccacaggcaaggagcttgagtcaactctggcccgacttgccgcaatgagccgcgccgtgggcatacacctggttctggcgacgcagcgtccctcaattgacgttatcaccggccttatcaaagccaatatccccagccgcatcgccttcatggttgccagcaagatggacagccgcataatcatcgacgcggtgggcgcgggaaaagcttctgggcaagggcgatatgctctacgcgggaatcacggaccccttccctatccgcatgcagggggcctttgtatccgaagaagaagtcgaggcggtggtcacccatgttaa

SEQ ID NO: 59886 - protein, 294 aa, Unknown
  Obtained from environmental sample
  DOMAIN (26)...(221): FtsK/SpoIIIE family
  misc_feature (1)..(294): Xaa is any amino acid
MRIVAPIPGKHAVGIEVPNAKRHIVSFREIIEGELQREGKRPEIPVVMGKDVSGDTALTIDLTQMPHLLIAGATGSGKSVCVNSLILSILYQLPPSECRLILIDPKIVELKLYNDIAHLLTPVITEPKKAFQALQYCIYEMERRYACLDSMGVRDIRNYNKRIKERNIAQEHMPYIVVIIDEFADLMATTGKELESTLARLAAMSRAVGIHLVLATQRPSIDVITGLIKANIPSRIAFMVASKMDSRIIIDAVGAGKASGQGRYALRGNHGPLPYPHAGGLCIRRRSRGGGHPC

SEQ ID NO: 59887 - DNA, 1617 bp, Unknown
  Obtained from environmental sample
  misc_feature (1)..(1617): n is a, c, g, or t
atggcggtgtgcagagccaaaactgcaccctggctaaaacctataatgaaaatattttcggactttatgcctttttctatttctgcatctattagctctgctattgattttgaactttcttctatgccttttatgtctggtttttccaaatcaaaacttactccgtcatccataaaaaaaaggtcgcaccaggcttgcatttttttgccattgtgggcttttatggactttattggagcatcggggaaaataaatctgatagccgcattagggggcagttctagtttgggaactttgtctgcaaaatgctgtgcatcggaaccaagcccgtgcaaccagataaccgaagctgttgcattctccgctgtttcttttattatggattctagcacttggcaaagatataaatttttcacttactatatttccaatatggaatacgatatcagcgataagctaaaaaacgttcacggtagcgcaataagggaaatttttgacctattgaaaagggggaatatcatatcttttgccggcggaatgccagctacgcaaaccttgccctcaaagcaaatagagggaattttgcaaaacatcatctcaaaatatggtgttatagagtgccttcaatacgaatccacgcttggtaaagcattgctcttggagcaattaaaaagttttctcgctgagtataaaggcataaataccgagctgcaaaatatgattgttctctctggtgggcagcaaggcattgaatttatgtgcaaaactttcgtgaataaaggcgatgtggtgctggtggaaaaccccacatatttatccaccttgcaaattatccaaacttacgaagcaaaagcggtagggattagctctaataacgaggggcttgatttagccgatttggaagaaaaaatcaaaacgcacaaaccgaaatttttatacacagtgccaacattcggtaaccctacaggcggcacttacagcatagagaaccgccaaaaaattgccgaaatcaccgcaaaatacggagtaatggttttggaagacgacccctattcgcaaatacgttttgaaggcgaggctgtgccatctattaaatgttttgacaaatgtgaaaacgtggtgtatttggcgagcttctccaaaatcatagcccctgccatgcgtattgcggtagcggttgcgaatcctgctataatcgggcggttcaacatatccaaacaatctacggatgtttgttcgtcatccataagtcaaattgtagtggcggagttcatcaaaaataatttagccgagcatttgaaaaacattatcccgatatacaaggaaaaacgcgaccaaatggtgaattgcattgaaaagtattttccaaaatctttcaaatatcaagttccgaatggcggtatgtttgtatggggttattttgacaatgaacgcgatttgcttgcgtgtttcaaagagatagttgatcttggcgtggcatatttgccaggcacgcattttttcccagacggtggtgggaagaatactatgaggctgaatttttcaaatgctacgcttgagcagatagagaaggggattaaaattattggggagtattttgggggagggaacaaatga

SEQ ID NO: 59888 - protein, 538 aa, Unknown
  Obtained from environmental sample
  DOMAIN (171)...(529): Aminotransferase class I and II
  misc_feature (1)..(538): Xaa is any amino acid
MAVCRAKTAPWLKPIMKIFSDFMPFSISASISSAIDFELSSMPFMSGFSKSKLTPSSIKKRSHQACIFLPLWAFMDFIGASGKINLIAALGGSSSLGTLSAKCCASEPSPCNQITEAVAFSAVSFIMDSSTWQRYKFFTYYISNMEYDISDKLKNVHGSAIREIFDLLKRGNIISFAGGMPATQTLPSKQIEGILQNIISKYGVIECLQYESTLGKALLLEQLKSFLAEYKGINTELQNMIVLSGGQQGIEFMCKTFVNKGDVVLVENPTYLSTLQIIQTYEAKAVGISSNNEGLDLADLEEKIKTHKPKFLYTVPTFGNPTGGTYSIENRQKIAEITAKYGVMVLEDDPYSQIRFEGEAVPSIKCFDKCENVVYLASFSKIIAPAMRIAVAVANPAIIGRFNISKQSTDVCSSSISQIVVAEFIKNNLAEHLKNIIPIYKEKRDQMVNCIEKYFPKSFKYQVPNGGMFVWGYFDNERDLLACFKEIVDLGVAYLPGTHFFPDGGGKNTMRLNFSNATLEQIEKGIKIIGEYFGGGNK

SEQ ID NO: 59889 - DNA, 459 bp, Unknown
  Obtained from environmental sample
  misc_feature (1)..(459): n is a, c, g, or t
gtggttgtctgcgaggatgtgctgtctgtcgtcgcaaggcttctgcagattgataccatgctgttgttgggcaagggcgaggaactttcaggcgggcgggaaaaaaaggcaattctcgccgacactctggaagctcttatcggcgcgctgtaccttgactcaggctatacggcggcctttgactttattgaacgttgttttgctactgaaatagaccgcgtcacggaaaaagattatcaccgtgattacaaatcgctgctgcaggaaatatgccagcacaactacggctcttacccgcaataccgcctgattaagcgttccggccccgatcacgagcgcgtttactggatagaggtcagcgcgggcggcgttgtgtacgggccagggacaggccggaacaaaaaaagcgccgagcaggaagccgcccgcatggcatatcaggcaatggctaacacttga

SEQ ID NO: 59890 - protein, 152 aa, Unknown
  Obtained from environmental sample
  DOMAIN (1)...(55): RNase3 domain
  misc_feature (1)..(152): Xaa is any amino acid
MVVCEDVLSVVARLLQIDTMLLLGKGEELSGGREKKAILADTLEALIGALYLDSGYTAAFDFIERCFATEIDRVTEKDYHRDYKSLLQEICQHNYGSYPQYRLIKRSGPDHERVYWIEVSAGGVVYGPGTGRNKKSAEQEAARMAYQAMANT

SEQ ID NO: 59891 - DNA, 594 bp, Unknown
  Obtained from environmental sample
  misc_feature (1)..(594): n is a, c, g, or t
atgacaacagatgaaatgatgcgtttaagggaaatccggcttgcaccttatatacagttggcgactttccttataggaaaagcgcggtccggcggcggcaatatgttcaggcatcagcttgacaccatggcgatccttattgactacagttatgtcgactccgttcttatcaaagcttcccttgtgcatgatattcttgaagacatacctgattttaaccataatcagcttctgtccattgacttcgaaagccacgcggtctatgagctgtccggggaagtcacccgcaagccggaggaaggcaagatcgaatttcttacccgcattttgcaaaccggctcgcataacgcaaaaatcctgaaggttgcggatcgaatttccaatatgatttccctgggatttgtaaacgacctggaatttgtcagccgttacaccaccgagaccgaaaaacatatttatccgatggcggaacaggtaaacggatatatgctgatggaactgcggtatctggttgaatcgcggcgcaggtatcttgaggtttattcaaaaatcagatcggaagagccttataccgattctaccagttttctgtaa

SEQ ID NO: 59892 - protein, 197 aa, Unknown
  Obtained from environmental sample
  misc_feature (1)..(197): Xaa is any amino acid
MTTDEMMRLREIRLAPYIQLATFLIGKARSGGGNMFRHQLDTMAILIDYSYVDSVLIKASLVHDILEDIPDFNHNQLLSIDFESHAVYELSGEVTRKPEEGKIEFLTRILQTGSHNAKILKVADRISNMISLGFVNDLEFVSRYTTETEKHIYPMAEQVNGYMLMELRYLVESRRRYLEVYSKIRSEEPYTDSTSFL

SEQ ID NO: 59893 - DNA, 1884 bp, Unknown
  Obtained from environmental sample
  misc_feature (1)..(1884): n is a, c, g, or t
gtgtttgacacctatgttgatcgcgcctttggaacaggtgttgtgaagatcacccccgcccatgatcccaatgactgggaagtggcaaaacggcatgatcttccggtaattaatatactcaaccccgacggaactctgaataacgaggttcccgtcaaatacaggggcttaagcgtaaaaaaagccagggacgcggtgcttgaagacttaaaggccggcggctggtatataaaggaagaaagcattacccacgcggtggggcattgttaccgctgccatacaataatagaacctttcctttccgagcagtggtttgtcaggatgaagccccttgcggaaaaagcccttgccagttggcggcgcggggaactgatcttctacccccgcaaatgggaacacacataccagcgctggctggaaaacatacgcgactggtgcataagccgccagctctggtgggggcacagaatccccgcatggacttgtgcggactgcggcaaaataacagtttcacgtaacgatattgacatatgcccccactgcaagagcaaaaaaatagagcaagaccccgacgtgcttgatacctggttttcaagttggctttggcctttcagcactttaggctgggaaaacgcggattgcgataccgatgattttaagaaattttacccgaccaccgcccttataaccgcttacgatattattttcttctgggtttccagaatgatcatggcggggcttgagtttaccggcaaggcgccgttccgcgacatttacatccacggccttatacgggacaagcagggccgcaaaatgagcaaaactctgggcaacgggattgacccgttggaagtggtggacgaatacggcgcggacgcgctcaagtttaccctggcttttatgtgcgcccagggacaggacatcctcgttgataaagaatcttttaagatgggttccaaattcgccaataaaatctggaatgccagccgttatattttaatgaatctggaaggattgaatttagttcaaaatcccggactgctccccgtggacaaatggatatactcgcagctgaacgcggcagcaaaaaaaatggaagaagcgttcctctcctaccgctacaacgacgccgcgcagacagcctatgagtatttctggaatgatttttgcgactggtatgtcgaggcgaccaagctgtctatgaaaacgggagacggcgcaaacgcggccgagaaagaccgcgccgtcacggtattgcttgacgtcctttcggaatctctgcggctcctgcaccccctcctgcccttcgtcaccgaggaaatctacggcaagctgcccaacacggacggtcttttgatcacagccccgtatcccaggttcagcgaaggacgccgttatccggcggaggaaaaagattttgccttcctccaggaatttgtccgcatgatccgcactatgagaagcgaatgtacgattacccaggaaaagaaactccgggtcatggcaaggatgggaagcgaacaggaacggacgctgaagcaaaacgaagcgctggtaaaactcctcgcgggaatcggggaactggaaattaagggccccgtaaaggaatcgggcgagcgcccggcagggtccatcggcatggcgggcgcgggttttgaaattttcgtctttatcggcgaggcggttgatattgcggcgctcaggaagaaatttgaaaaggacctcgcccgcgataacgcctttgtccagggcttgcgggcaaaactcgccaatgagcaattcgtgaaaaacgccccgccggaactggttgccgccgaaaaactaaagctggaagaaggtcttgcccgtaccggcaagattgaatcttatcttcgcggactgtaa

SEQ ID NO: 59894 - protein, 627 aa, Unknown
  Obtained from environmental sample
  DOMAIN (1)...(311): tRNA synthetases class I (I, L, M and V)
  misc_feature (1)..(627): Xaa is any amino acid
MFDTYVDRAFGTGVVKITPAHDPNDWEVAKRHDLPVINILNPDGTLNNEVPVKYRGLSVKKARDAVLEDLKAGGWYIKEESITHAVGHCYRCHTIIEPFLSEQWFVRMKPLAEKALASWRRGELIFYPRKWEHTYQRWLENIRDWCISRQLWWGHRIPAWTCADCGKITVSRNDIDICPHCKSKKIEQDPDVLDTWFSSWLWPFSTLGWENADCDTDDFKKFYPTTALITAYDIIFFWVSRMIMAGLEFTGKAPFRDIYIHGLIRDKQGRKMSKTLGNGIDPLEVVDEYGADALKFTLAFMCAQGQDILVDKESFKMGSKFANKIWNASRYILMNLEGLNLVQNPGLLPVDKWIYSQLNAAAKKMEEAFLSYRYNDAAQTAYEYFWNDFCDWYVEATKLSMKTGDGANAAEKDRAVTVLLDVLSESLRLLHPLLPFVTEEIYGKLPNTDGLLITAPYPRFSEGRRYPAEEKDFAFLQEFVRMIRTMRSECTITQEKKLRVMARMGSEQERTLKQNEALVKLLAGIGELEIKGPVKESGERPAGSIGMAGAGFEIFVFIGEAVDIAALRKKFEKDLARDNAFVQGLRAKLANEQFVKNAPPELVAAEKLKLEEGLARTGKIESYLRGL

SEQ ID NO: 59895 - DNA, 1530 bp, Unknown
  Obtained from environmental sample
  misc_feature (1)..(1530): n is a, c, g, or t
ttgtgccgtcagcggtctttgttccgctgtgtggacgattgtcagggaaactgcgagatttttaaggcgacattcaggggcagggaacttatctatcccggtcctttcggcagtgttacagccggcggagacaaagattaccctgtcgattattcccacttgaacattcagggctatgctactggagccagaggtttgccgcagggcgttgccgcagaaccggatgccgctctttttgcgtcggtcaacaccgaaaccgaatacggctgggagaaaaaagtaaaaatgcgcgcgcctgtttttacgggtgctttaggctcaacagagattgcccgtaaaaactgggaacattttgccgttggttccgcattagccggcgttacgctggtttgcggcgaaaatgtctgcggtatcgaccctgcgcttgaattggacggacaaaaaaaagtaaagaaagcgccggatatggatcgccgtatcgaaaattacaaacgctaccattccggttacggcgaaattcttattcagatgaacgttgaggatacccgcctcggcgtcgctgaatacataattgaaaaacacaaaattgataccattgaactgaaatggggacagggagcgaaagatatcggcggcgaaataaaagtcggctcgcttgagcgcgcgcttgaattacagcgcaggggctatattgttacgcccgatccgtccaaccccatcaaccaggcggcttttaaggcgggagccattaaagaatttgaacgccacagccgcattggttttattgaggaagatgccttttatgcggaagttgagagactgcgcaagttaggatacaaacgcgtaacgcttaaaaccggcgcttataacctgcgcgatctcgcaaaagcgattaaatggtctgcaaaagcgcatatcgatctcctgactattgacggagcatccggcggaacaggcatgagtccatggcgcatgatggaagaatggggcgttccgtcgatctatctgcacagcgcagcttatgaatacacgtccattcttgccgctaagggcgaaaaaacttcggatattgcctttgcaggcggattcagttcggaagacggcatattcaaagcactggctctcggttcgccgtatgttaaagccgtatgtatgggcagggcgttgatgattccgggaatggtcggcaaaaacattgaacaatggataaaagaaaacaatttgccgaagtctgtaagcgaattcggaagcaaggttgaagagatttttgttaattacgaacaagtaaaatccatagtaggctcagaagagataaagaaaattcctctgggtgctattggtatttacagttatgctgacaaactcaaagtcggtttgcaacagtttatggcaggcgctcgctgtttcaacctcgcttcaatcgctcgcaccgacattatgtcgctgacggaagaatgcaccaaagtaacaggcatcccctacttaatggaatgttaccgcaaagaagcgttggacattctaaacaaataa

SEQ ID NO: 59896 - protein, 509 aa, Unknown
  Obtained from environmental sample
  DOMAIN (45)...(439): Conserved region in glutamate synthase
  misc_feature (1)..(509): Xaa is any amino acid
MCRQRSLFRCVDDCQGNCEIFKATFRGRELIYPGPFGSVTAGGDKDYPVDYSHLNIQGYATGARGLPQGVAAEPDAALFASVNTETEYGWEKKVKMRAPVFTGALGSTEIARKNWEHFAVGSALAGVTLVCGENVCGIDPALELDGQKKVKKAPDMDRRIENYKRYHSGYGEILIQMNVEDTRLGVAEYIIEKHKIDTIELKWGQGAKDIGGEIKVGSLERALELQRRGYIVTPDPSNPINQAAFKAGAIKEFERHSRIGFIEEDAFYAEVERLRKLGYKRVTLKTGAYNLRDLAKAIKWSAKAHIDLLTIDGASGGTGMSPWRMMEEWGVPSIYLHSAAYEYTSILAAKGEKTSDIAFAGGFSSEDGIFKALALGSPYVKAVCMGRALMIPGMVGKNIEQWIKENNLPKSVSEFGSKVEEIFVNYEQVKSIVGSEEIKKIPLGAIGIYSYADKLKVGLQQFMAGARCFNLASIARTDIMSLTEECTKVTGIPYLMECYRKEALDILNK

SEQ ID NO: 59897 - DNA, 738 bp, Unknown
  Obtained from environmental sample
  misc_feature (1)..(738): n is a, c, g, or t
ttggacttcttgatatattttgtgcttggcgttgttgtaacttttataaacaacatcgcaggcggagctagcactcttagcttgcctatcatgatacttttgggtttgccgcccaccgttgcaaatggaacaaatcgcttggggatactcataggtgctataagctccgctctccacatgaaacgctatggctatttgcggatggacattgcaaaagttcttttagtgccaactcttgcgggggccttgttcggaaccctgctcgctgttgccattgacgattctcattttcagggcttgctcgccgttgttatggtggcagttgcaattatgagttctcttggtacagacccttttggaaaaccgccggaagctccgccggcaaagccggggataaaaggaattctcggttttttggcggttggtctttatggcggatttttgcaggttggcgttggcttcattcagatttttgccattcgcaaatataccggctttgatttaaaacaggtgaacgcgattaagaattttttgacagtttggtttttgcttttgagttccgctggtttgttttttgcgggcaaggtagtttttgagcttgctatctgtatgggtttgggcggtattttgggcggttatctgggcagcaaattccagcacaagcacgaccatatttggataaagagaatcattcaggttgctagcatcggacttgcggtgaaactgatagttagctag

SEQ ID NO: 59898 - protein, 245 aa, Unknown
  Obtained from environmental sample
  DOMAIN (4)...(243): Domain of unknown function DUF81
  misc_feature (1)..(245): Xaa is any amino acid
MDFLIYFVLGVVVTFINNIAGGASTLSLPIMILLGLPPTVANGTNRLGILIGAISSALHMKRYGYLRMDIAKVLLVPTLAGALFGTLLAVAIDDSHFQGLLAVVMVAVAIMSSLGTDPFGKPPEAPPAKPGIKGILGFLAVGLYGGFLQVGVGFIQIFAIRKYTGFDLKQVNAIKNFLTVWFLLLSSAGLFFAGKVVFELAICMGLGGILGGYLGSKFQHKHDHIWIKRIIQVASIGLAVKLIVS

SEQ ID NO: 59899 - DNA, 552 bp, Unknown
  Obtained from environmental sample
  misc_feature (1)..(552): n is a, c, g, or t
atggaatggagggctgcaatgaaatgcagacctgcttatgttcgccggaagaaattttcccgatactggcgcagattcggcggcgcgcttcttgaccgtatcgagattcgtgtcgcagttattcccccaggcgttaatgaaatcggcataacaggcaacagcgcaggcgaacctcaaccgagcccgcttgcgggcgaaggttcccctcttgaagaacgcagcgcggacattgccatgcgggtaaaggccgccgttgaaatccagcagctgcggtataaaggcatggggatacgccgcaacgcgctaattcccgcgggaaaaatcgaaaatttttgcgccatgaatcaacaggcccgagacgcgttccataaggcccttgcccggcttgggctttcaggccgcgcctaccacagcattctgcgggtagcgcggacaatagccgaccttgagggcaaggaaaccattggcacggaacatattctggaagcggtacagcaccgccgttacggggaagatccttacgagattgtcacaatgagcagtgagcagtga

SEQ ID NO: 59900 - protein, 183 aa, Unknown
  Obtained from environmental sample
  misc_feature (1)..(183): Xaa is any amino acid
MEWRAAMKCRPAYVRRKKFSRYWRRFGGALLDRIEIRVAVIPPGVNEIGITGNSAGEPQPSPLAGEGSPLEERSADIAMRVKAAVEIQQLRYKGMGIRRNALIPAGKIENFCAMNQQARDAFHKALARLGLSGRAYHSILRVARTIADLEGKETIGTEHILEAVQHRRYGEDPYEIVTMSSEQ

SEQ ID NO: 59901 - DNA, 1221 bp, Unknown
  Obtained from environmental sample
  misc_feature (1)..(1221): n is a, c, g, or t
gtgagtgtaatggcttatgcgccttatggcgcgggtggggttattatccgtgtggaagcggatatacggcgggggattcccggtatcgacattagcgggcttgccgaaggagcggttcgtgaagcaaaggaaagggtaagggcggcgttcagaaattccgggtttactttcccgctggacaggattctgatcaacctggcgccggcgggactgcggaaagacggggccgcgctggatctgccgattgcgctggcggtaatggcggcggcgggacttgtgccggagcctccgaacatccttgttatgggggaactggagctttcgggaaatatacgcccggtgcgcggcgttctggcggcaatcgccggcggcctggaggaaggcattaccgaattcatcgtaccggctgaaaacaagggggaagccgcgatattatacggggcgggagggaaccctgttatgcgattcaaggcggtgtcttccctgcgcgaggcggttgacgcgctttttatccgtgaagaaaccggcgcgctccccgttcccgaagaatcgccgaatgtcaatgattgcgtttcacagggatcaagaggaggcgacgggacagcagattttgccgatgtgcggggtcaggctgtttacaaacgggctttggaaatagccgccgcagggggacacaatatgcttgttttcgggccgccgggcgcgggcaagaccatgctggcaaggcggctgccttccatcatggctccgctgactcccgatgaagcggttgaagtcacgcggctttacagtcttgcggggccctataagacggggaacggcttcatcgacaaattaatcgcccagccgccgttccgttctccgcaccattcggcaagcgccgagggtattctgggcgggggaagaaccccgcgcccgggcgagattagccttgctcatttcggcgtgttgttcctcgacgaagccccggaattcaggatcaatgtgcttcaggccctgcgcgaaccgctggaagaccgggtgataagcatttcccgcgcggaaggccctctgcggcttcccgccgaatttcagatgatattggcgactaacgcctgtccctgcggaagactggggataaggcataatggaatggagggctgcaatgaaatgcagacctgcttatgttcgccggaagaaattttcccgatactggcgcagattcggcggcgcgcttcttga

SEQ ID NO: 59902 - protein, 406 aa, Unknown
  Obtained from environmental sample
  DOMAIN (207)...(367): Sigma-54 interaction domain
  misc_feature (1)..(406): Xaa is any amino acid
MSVMAYAPYGAGGVIIRVEADIRRGIPGIDISGLAEGAVREAKERVRAAFRNSGFTFPLDRILINLAPAGLRKDGAALDLPIALAVMAAAGLVPEPPNILVMGELELSGNIRPVRGVLAAIAGGLEEGITEFIVPAENKGEAAILYGAGGNPVMRFKAVSSLREAVDALFIREETGALPVPEESPNVNDCVSQGSRGGDGTADFADVRGQAVYKRALEIAAAGGHNMLVFGPPGAGKTMLARRLPSIMAPLTPDEAVEVTRLYSLAGPYKTGNGFIDKLIAQPPFRSPHHSASAEGILGGGRTPRPGEISLAHFGVLFLDEAPEFRINVLQALREPLEDRVISISRAEGPLRLPAEFQMILATNACPCGRLGIRHNGMEGCNEMQTCLCSPEEIFPILAQIRRRAS

SEQ ID NO: 59903 - DNA, 540 bp, Unknown
  Obtained from environmental sample
  misc_feature (1)..(540): n is a, c, g, or t
ttgacattcggcgattcttcgggaacggggagcgcgccggtttcttcacggataaaaagcgcgtcaaccgcctcgcgcagggaagacaccgccttgaatcgcataacagggttccctcccgccccgtataatatcgcggcttcccccttgttttcagccggtacgatgaattcggtaatgccttcctccaggccgccggcgattgccgccagaacgccgcgcaccgggcgtatatttcccgaaagctccagttcccccataacaaggatgttcggaggctccggcacaagtcccgccgccgccattaccgccagcgcaatcggcagatccagcgcggccccgtctttccgcagtcccgccggcgccaggttgatcagaatcctgtccagcgggaaagtaaacccggaatttctgaacgccgcccttaccctttcctttgcttcacgaaccgctccttcggcaagcccgctaatgtcgataccgggaatcccccgccgtatatccgcttccacacggataataaccccacccgcgccataa

SEQ ID NO: 59904 - protein, 179 aa, Unknown
  Obtained from environmental sample
  misc_feature (1)..(179): Xaa is any amino acid
MTFGDSSGTGSAPVSSRIKSASTASRREDTALNRITGFPPAPYNIAASPLFSAGTMNSVMPSSRPPAIAARTPRTGRIFPESSSSPITRMFGGSGTSPAAAITASAIGRSSAAPSFRSPAGARLIRILSSGKVNPEFLNAALTLSFASRTAPSASPLMSIPGIPRRISASTRIITPPAP

SEQ ID NO: 59905 - DNA, 582 bp, Unknown
  Obtained from environmental sample
  misc_feature (1)..(582): n is a, c, g, or t
atggataaatgggttgggattggggatagcggaaacgaggtagaaatggctaagatagctgttgaaaagacaattatttcgatcattcaagtaaatgaagaagactttatctcactcaccgatattgctaaattcaaatccgatgaacccaatgccgtaattgggaattggatgcggaaccggaatactattgagtatttgggtatctgggaaattctatataatccggaatttaaacccctcgaattcgaggggtttagaaaacaagctggcttgaacgcttttgttttgtcgccccagaagtggattgaagctaccggggcaaggggaataatttccaagtctggacgtaatgggggaacttttgctcataaggatattgcatttaaatttgcaagttggatttctaccgagtttgaactgtattttatccgcgaaatccagcgccctgaagatgccgaacaanaattattgggttgggtccgcccaacgggaattggcaaaaatcaattacatattcccacggatgccgtgaaacagaaccttatcccaaaagaacttacaccgaaacaggtgccgtaa

SEQ ID NO: 59906 - protein, 193 aa, Unknown
  Obtained from environmental sample
  DOMAIN (15)...(150): KilA-N domain
  misc_feature (1)..(193): Xaa is any amino acid
MDKWVGIGDSGNEVEMAKIAVEKTIISIIQVNEEDFISLTDIAKFKSDEPNAVIGNWMRNRNTIEYLGIWEILYNPEFKPLEFEGFRKQAGLNAFVLSPQKWIEATGARGIISKSGRNGGTFAHKDIAFKFASWISTEFELYFIREIQRPEDAEQXLLGWVRPTGIGKNQLHIPTDAVKQNLIPKELTPKQVP

SEQ ID NO: 59907 - DNA, 1353 bp, Unknown
  Obtained from environmental sample
  misc_feature (1)..(1353): n is a, c, g, or t
atgatagttatgaaattcggaggaagctccgtagcggacgcaacaaggcttcgtcatattgcggaaataattaaactttacattaagaacaaacccgctctgattttatcggcaatgggagacacaactgatcatcttcttgaggctggagacatggctcttacgcagggaaaggttgacataaaaaatgttgaaaaactgcaccttgcgacaatcaaaactttaaaactaccgattcaaaaagaaattaacagcctgtttgacgagcttacccgtcttttatcgggcattgccctgcttcgggaacttactccgcgcacaaaggattaccttgtatcctttggcgaaaggctttccgtgcggattgcggccgcttattttcagtcccttaaaattaacgcaaaagcctttgacgcgtttgaccttggatttctttccaattcaaattacacccaggccgaacttgcaaaggaatcgtgggatttaattccgcaaaaaattctgcctcttataaaaggcaatgttgtccccgtcataaccggatttatcgcaaaggatgaaaagggcaatattacaacacttgggcgcggcggctccgatcttacggcgacaatggttgccgccgcatgcaaagcggaagaaatccaggtatggaaagatgttgacggcattctgaccgcggacccgcgtattgtaaaaaacgcgaagcccgttcaaaacgttacttacgaagaagcgtccgagcttgcatattacggcgcgcaggtgctccaccccagggcgatgcagccatgcatgaaaacaggaacacctgtacttgtaaaaaattcctacaacattgaagcgcccggcacgcgaattgaacattcgcatgcctcttcggcaaaaaacagaccggtgcgcgcaattacttcccgccgcaatgtaacgcttgttgacgttgtttctacaagaatgttagggcagcacggatttttagcggaagttttttcgctctttgcaaggcacaatatttccatagatatggtcgcaaccagcgaagtttctgtttcgcttacgctggacaccaactacgaccttaccgaaataaaaaaagaactggataaaatcgcccatgtggatattaaaaaagaaaaagcaattgtttccatcattgggaatgttaaacgctcttcggaaatcttggtcagggcattcaggatatgccagtttatcggcgttactgtgcaaatgatttctcagggcgcaagcaaagtaaatatcagttttattgtaaacgataccgaagcggcggaagttgtcaaagctcttcatttggacttttttgaagatacggaaaaacctgccgcctaa

SEQ ID NO: 59908 - protein, 450 aa, Unknown
  Obtained from environmental sample
  DOMAIN (382)...(447): ACT domain
  misc_feature (1)..(450): Xaa is any amino acid
MIVMKFGGSSVADATRLRHIAEIIKLYIKNKPALILSAMGDTTDHLLEAGDMALTQGKVDIKNVEKLHLATIKTLKLPIQKEINSLFDELTRLLSGIALLRELTPRTKDYLVSFGERLSVRIAAAYFQSLKINAKAFDAFDLGFLSNSNYTQAELAKESWDLIPQKILPLIKGNVVPVITGFIAKDEKGNITTLGRGGSDLTATMVAAACKAEEIQVWKDVDGILTADPRIVKNAKPVQNVTYEEASELAYYGAQVLHPRAMQPCMKTGTPVLVKNSYNIEAPGTRIEHSHASSAKNRPVRAITSRRNVTLVDVVSTRMLGQHGFLAEVFSLFARHNISIDMVATSEVSVSLTLDTNYDLTEIKKELDKIAHVDIKKEKAIVSIIGNVKRSSEILVRAFRICQFIGVTVQMISQGASKVNISFIVNDTEAAEVVKALHLDFFEDTEKPAA

SEQ ID NO: 59909 - DNA, 846 bp, Unknown
  Obtained from environmental sample
  misc_feature (1)..(846): n is a, c, g, or t
ttgctttgtttttttgatcctggcaattttgatattggggacagcgttaatgatgtagaagtaaaattcaaccgcgcatggacttcggtaatcgggacaaagatcgattttgccgaaaagtacagcattaacattgaagggtactacaaatatgtttttgatcgcggttatattaccgccgatacatcaaccggaacaataactccttcattcaattttgacggcgttggcaaagtttgggggtttgacattcagcttcaaaaattggaatcgcgttattgggacggctggatatcctacacatatacatgggcaaagtataacgatccgtccggcggcaataatggtataagcaacggaagtaccaatacgatcaatgattcatggtactatccgtcatttcaccgttttcataactttaatcttgttcttaatatcaagcctctgctctggttcaatattgctctccgttttggttttgcgtctgggcagccaagaagaaggatagacaataaaatatatccctaccccgtactgatagtcaatgaagataacgaaatggttattcttcaaaaatacagacgtaattcatggtatgatgaaaacgagcggactccgtggtcttttccgcttgatataaaattttcgttcttccctgtcaacaaaaacggcaggacaagcatggaaatatacgcagcaggagaaaatatgatgtcgcttttttacagtccgccgggccgcacaacttttaaccagtacacaggcaaggaagatcaaggcagcagttcaggttcgttcgacctgccgataccaatggtttctttcggcataaaatggaggtattaa

SEQ ID NO: 59910 - protein, 281 aa, Unknown
  Obtained from environmental sample
  misc_feature (1)..(281): Xaa is any amino acid
MLCFFDPGNFDIGDSVNDVEVKFNRAWTSVIGTKIDFAEKYSINIEGYYKYVFDRGYITADTSTGTITPSFNFDGVGKVWGFDIQLQKLESRYWDGWISYTYTWAKYNDPSGGNNGISNGSTNTINDSWYYPSFHRFHNFNLVLNIKPLLWFNIALRFGFASGQPRRRIDNKIYPYPVLIVNEDNEMVILQKYRRNSWYDENERTPWSFPLDIKFSFFPVNKNGRTSMEIYAAGENMMSLFYSPPGRTTFNQYTGKEDQGSSSGSFDLPIPMVSFGIKWRY

SEQ ID NO: 59911 - DNA, 852 bp, Unknown
  Obtained from environmental sample
  misc_feature (1)..(852): n is a, c, g, or t
atggaaataaaatcactcgaaacaacaaatcttgaaaccataatcaaagcgtttgctcaggcttttgccgattatgatgttcagttgaatgcagccgaactccaaaccatgtggaaaaggcgcggttttaattccaatttgtcgtttgccgcatttgagggggaagacattgttgcatttacactaaatggagttggaaatttcaacggaatgaaaatggcttacgatacaggaacaggaacgttgaaagagtatagaggaaagggcttggcaacggaaatttttgaatattcaatcccctatttgaaagaggctaatatcagccattatctgttggaggtattgcagcataatacgaaagcgatttcggtttatcgaaatattggttttgaggtaacacgcgaatttaactattttgtgtggaacaatgaagaaatcaataatgaagtaaaaaatattgaaattccttgtttcattgaaaacattggaattgaaaaatacccttctgtttcagatttttgggatttttatccttcgtggcagaacagttttgagtcaatccaaagagcaagcggagactttatcactcttggcgcatttattgacgggaaattagcaggttattgcgtttttgagcctaattcgggtgatattactcaaattgccgttgacaaaccttttagaagaaacggaattgcttcgttattgcttcacgaagcacagaaacttaataagattgcaaaaatgaagttagtaaatgcagatatttcttgtatttcaatggttgatttttttaaatcgaaaaacattgaaatattagggaaacaatttgagatgataaaaaagatataa

SEQ ID NO: 59912 - protein, 283 aa, Unknown
  Obtained from environmental sample
  DOMAIN (197)...(271): Acetyltransferase (GNAT) family
  misc_feature (1)..(283): Xaa is any amino acid
MEIKSLETTNLETIIKAFAQAFADYDVQLNAAELQTMWKRRGFNSNLSFAAFEGEDIVAFTLNGVGNFNGMKMAYDTGTGTLKEYRGKGLATEIFEYSIPYLKEANISHYLLEVLQHNTKAISVYRNIGFEVTREFNYFVWNNEEINNEVKNIEIPCFIENIGIEKYPSVSDFWDFYPSWQNSFESIQRASGDFITLGAFIDGKLAGYCVFEPNSGDITQIAVDKPFRRNGIASLLLHEAQKLNKIAKMKLVNADISCISMVDFFKSKNIEILGKQFEMIKKI

SEQ ID NO: 59913 - DNA, 303 bp, Unknown
  Obtained from environmental sample
  misc_feature (1)..(303): n is a, c, g, or t
atggaaacttttggtgaatatatcagacagttacgaacaggtgcaaacttgccaatacggaaaattgcagcgcaattagacattgacgcgacacttttgggaaaaattgaacgtgatgaacgacctgcaaacagagaggttattgcaggaattgcaaaaatcttcaatcaaaacgaaaaagatttgtttaacagatttttgagtgaccgtatcgcatataanatcattgacgaagatgcagatattaatgtattgaaagttgcagaaaaaaaaatcgagtatctaaaatctaaaattaaataa

SEQ ID NO: 59914 - protein, 100 aa, Unknown
  Obtained from environmental sample
  DOMAIN (8)...(62): Helix-turn-helix
  misc_feature (1)..(100): Xaa is any amino acid
METFGEYIRQLRTGANLPIRKIAAQLDIDATLLGKIERDERPANREVIAGIAKIFNQNEKDLFNRFLSDRIAYXIIDEDADINVLKVAEKKIEYLKSKIK

SEQ ID NO: 59915 - DNA, 2433 bp, Unknown
  Obtained from environmental sample
  misc_feature (1)..(2433): n is a, c, g, or t
atgcagtatggacattttgacgatgacgcgagggaatatgtaattacccgccccgatacgccgtatccctggattaactatcttggatgcgaggattttttcgggcttttttccaacacctcgggcggttattgtttttaccgcgacgcgaggatgttacggctgacgcgctaccgctacaacaatgtcccgaccgactttggggggcggtatttttacctgcgcgacggcgatgtttggactccctcgtggatgccgatgaaatccaggctcgaccgttacgagtgccgccacggaatgggctattccaaaatttcctcatcgcgtaacggtctcgcgttttctcaagtttcatttgtgccgttacacgacacctgcgagatacataaggttactttgaccaacgaatcaaatattgataaacgcattgatatgttttcttttatcgaattttgtctgtggaacgcaaatgacgatatgaccaacttccagcgcaatttcagtattggcgaggttgagattgacggttcgcgcatttatcacaaaaccgagtatcgagagcggcgcaatcattacgcggtatgggcggtcaatgttccaatcgagggttttgataccgacaggcagacattccttggtctttacaacggctttgatcatccgcaggcggtttttgaaggagaggcaaaaaattcaattgcttcagggtgggcgcctgtcggctcccatcacatcaaggcgcggcttgcgccgggtgaatctaaaacttttgtgtttgttctaggttactgtgaaaatcacgaggatcaaaagtgggagcgtccgggagtgataaataaaaaacccgcgaatacgctccttgaaaaatacgatacgcctgttgatgcagacaaggctcttgccgcgcttaacgagtactggaaaagtcttcttggacgctttaccgtggacgcggaagacaaaaaaatggcgcgtatggcgggtatttggaaccaataccagtgtatggtaacgttcaatatgtcacgcagcgcgtcctattttgaatccggcatcgggcgcggtatgggtttccgcgattcanatcaggacttacttggctttgttcatcttgttcccgaacgcgcccgttcccgcattttggacattgccgcgactcagtttcccgatggcagcgcgtatcatcaataccagccgcttacaaagcgcggtaacaacgaggtcggttcccggcttcacgacgatcccctttggctgatctgcggtgtggcggcgtacatcaaggagacaggcgacttcggcatccttgatgagaaagtacccttcgataacaaagaggagttagcggatagcttgtttatccatttaaagcgttcttttgattttaccgttacgcataccggcccccacggcctgccgctgattggccgcgccgactggaacgattgtttgaacctcaactgcttttccaagacaccgggcgaatccttccaaaccactgccaattttgaaagcggcgtcgcggaatcagttttaatcgcggcgatctttgtgttcaccggtcccgattatgtcgagatttgccgccgcacgaaacgcgaggaagaagccgcgtacgccgccaaggcaattgccactatgaccgagacgatcaagcagcacggctgggatggaaactggttcctgcgcgcttatgacgcttacggtcataaaattggcagtcatgaatgtgaggacggccagatatttatcgaatccaacggattcgctgtgatggcaggaatagggcttgatgatggacgcgctaaaaaagcgcttgactcggtgaaggataagctggacacaaaatacggcatcgtgcttcaacagccagcgtacaaggaatatcaccttgagctgggcgaagtctcgtcctacccgccgggttataaagagaacggtggtatcttctgccacaacaacccctgggttacgatagccgaaaccaaactaggccgtggtacgcgcgcgtttgaaacctatacgaaaatttgccccgcctaccgcgaggacgacagcgacctccgccgtctggaaccctatgtgtacgcgcagatggtcgccggaaaggacgcaccacgtttcggcgaggcgaaaaattcctggctaaccggaaccgccgcctggacttttgtcagtatctctcagtatattctgggcgtgcgtccggtgttcgacggcctgctaatcgacccatgcatcccttcaaccatgaaaagtttttccgttattcgtcattttcaaaacgcggtgtaccgtattactgtggacaatagcgcaggtgtggagaaaggtgttaaatcgcttacgcttgacggaaaaccgctggatggctctgtattgccagcgctgggtgatggaaagacgcatgaagttaatgtgatgatggggtga

SEQ ID NO: 59916 - protein, 810 aa, Unknown
  Obtained from environmental sample
  DOMAIN (1)...(64): Putative carbohydrate binding domain
  misc_feature (1)..(810): Xaa is any amino acid
MQYGHFDDDAREYVITRPDTPYPWINYLGCEDFFGLFSNTSGGYCFYRDARMLRLTRYRYNNVPTDFGGRYFYLRDGDVWTPSWMPMKSRLDRYECRHGMGYSKISSSRNGLAFSQVSFVPLHDTCEIHKVTLTNESNIDKRIDMFSFIEFCLWNANDDMTNFQRNFSIGEVEIDGSRIYHKTEYRERRNHYAVWAVNVPIEGFDTDRQTFLGLYNGFDHPQAVFEGEAKNSIASGWAPVGSHHIKARLAPGESKTFVFVLGYCENHEDQKWERPGVINKKPANTLLEKYDTPVDADKALAALNEYWKSLLGRFTVDAEDKKMARMAGIWNQYQCMVTFNMSRSASYFESGIGRGMGFRDSXQDLLGFVHLVPERARSRILDIAATQFPDGSAYHQYQPLTKRGNNEVGSRLHDDPLWLICGVAAYIKETGDFGILDEKVPFDNKEELADSLFIHLKRSFDFTVTHTGPHGLPLIGRADWNDCLNLNCFSKTPGESFQTTANFESGVAESVLIAAIFVFTGPDYVEICRRTKREEEAAYAAKAIATMTETIKQHGWDGNWFLRAYDAYGHKIGSHECEDGQIFIESNGFAVMAGIGLDDGRAKKALDSVKDKLDTKYGIVLQQPAYKEYHLELGEVSSYPPGYKENGGIFCHNNPWVTIAETKLGRGTRAFETYTKICPAYREDDSDLRRLEPYVYAQMVAGKDAPRFGEAKNSWLTGTAAWTFVSISQYILGVRPVFDGLLIDPCIPSTMKSFSVIRHFQNAVYRITVDNSAGVEKGVKSLTLDGKPLDGSVLPALGDGKTHEVNVMMG

SEQ ID NO: 59917 - DNA, 387 bp, Unknown
  Obtained from environmental sample
  misc_feature (1)..(387): n is a, c, g, or t
gtgcttcagactctcatagacgagtaccatcttaaccccttttcactttctaaagagattcacctaagccattccgcggttcgcctacttgtcattggaaaggcaaaaataactgtatccacagccttgcgtcttgccaagttttttggtcaaactcccgcctattggcttgacctgcagcgcgaagcagaccttaacgaagcttctaaagataaggaattacaggaattattaaagaaaataaccaaagcgaaaaaacccgccgccaaaaaaacggaaaccgcaaaaaagcccgttaaaaaacaaacgctttccgataagcgcaaaaaagccgctaaaatcccgggtgcaaaagccgccaaaggcacacgccctaaaaagcgctag

SEQ ID NO: 59918 - protein, 128 aa, Unknown
  Obtained from environmental sample
  DOMAIN (2)...(56): Helix-turn-helix
  misc_feature (1)..(128): Xaa is any amino acid
MLQTLIDEYHLNPFSLSKEIHLSHSAVRLLVIGKAKITVSTALRLAKFFGQTPAYWLDLQREADLNEASKDKELQELLKKITKAKKPAAKKTETAKKPVKKQTLSDKRKKAAKIPGAKAAKGTRPKKR

SEQ ID NO: 59919 - DNA, 729 bp, Unknown
  Obtained from environmental sample
  misc_feature (1)..(729): n is a, c, g, or t
atggaaacaaaaaacggcgtattcacaaggcttttccgttcgctgcacatggtgatattcgtcgccgccgtagtaattttgaccgtcgtatatattcccattgtttttctgaccgtgccggtctcccgcaagctctctcgcaaattcgcgcgcctctggagccgccacgtgctggcgatgggcggcgtgagggtgaaggtcgccggcgcggataagcttgacgataaggagcggtacatctttatgtccaaccaccaaagcgctctagatattccaatcatatacgtcggcctaagcgagcagataagcttcatcgccaaaaaagaactcttcatgataccgttcttcggttggggcatgtgggcggtgggacacataagcatagaccgtcaaaacgcccgcaaagcgcacgcctccatcgccaaagccgtgcaacgcctcaacaaggagaacgtctcgctgatactctttccggagggcacacgctccaaagacggcaaagtgctggactttaagacggcaagctttaccttggcgctgcaagcgggcgtcaaattggtccccgttgcgataaaaggcgcaatagaccgcctgccgccgaagagcagccgaatagtgcccggagaggtggattttatagtcggcgacccgataccggttgaagaactgaaagggatgagcaagggagaggtttgcgggagggtgcgtgaagcgatgtggctatggtga

SEQ ID NO: 59920 - protein, 242 aa, Unknown
  Obtained from environmental sample
  DOMAIN (64)...(192): Acyltransferase
  misc_feature (1)..(242): Xaa is any amino acid
METKNGVFTRLFRSLHMVIFVAAVVILTVVYIPIVFLTVPVSRKLSRKFARLWSRHVLAMGGVRVKVAGADKLDDKERYIFMSNHQSALDIPIIYVGLSEQISFIAKKELFMIPFFGWGMWAVGHISIDRQNARKAHASIAKAVQRLNKENVSLILFPEGTRSKDGKVLDFKTASFTLALQAGVKLVPVAIKGAIDRLPPKSSRIVPGEVDFIVGDPIPVEELKGMSKGEVCGRVREAMWLW

SEQ ID NO: 59921 - DNA, 1629 bp, Unknown
  Obtained from environmental sample
  misc_feature (1)..(1629): n is a, c, g, or t
atgaaagaatatctgcgcaaactcaagccgacgcgcatagaagacctaatagcgatgacggcgctctataggccggggccgatgaactatatagacacgtttataaatcgcaaacacggtaaggaggagatcaaatacctccacccgatgctagagaatattctcagcgtaacctacggcgttatcgtttatcaggaacaagtaatgcgcattgcgcaggtgatgggcggtttttcgcttggcggcgcggatattctacgcaaagcgatgggcaagaaagacgcggagaagatggcaaagcagggcgacaagttcattgagggcgccgtggcgaagggtatagacagaaaaaccgctcgcgacgtgttcgacctaatggcgaagttcgccgagtacgggttcaacaaggcgcacgcgacggtatacgcgtatttgtcatatcaaaccgcgtacctaaaggttcattaccctatcgaatacatgacagccttcctctcggcgtaccttgggaaaatggacgacttcttgatgatgaggaacgaggccgagcgattaggcgtacacgtattgccgcccgacgtgaacaagagcgattacgacttcggcgttgacggcaactcgatacgcatcggtctcggggcggtaaagaacgtcggcaaggcggctgaactgataataaaggcacgagaggataaagggcggttcacgtctatttttgacgtatgtagatcgaccgataaccgcattgtcaacaagaaggcgttggagtcgttgatttgcgccggcgccctcgactgtttcggcgggtcgcgggcgcagcatataaacgcggtcgccaaagcgctcgagtacggcgccagcagccaaaaggaacgcgcgtccggtcaagtaaatcttttcgacaatctcttaggcgcgccggacgcggccgcccactccgcgaccgaaccgcaacttccggccggagcggagtggccgctgaatatcaaactgcaaaacgaaaaagacgtactgggcttctacacaagcggccaccctatcgaccaatacagggacgacatctccgctttcgccaccgccgacattgcctctgaggagtttaaaaacataaatgacggcgagcatgtaactataggcggcctcataacaaccgtaaaaccgcacgtccaaaaaaacgggaagaagatggccttcttaacattagaggccctcgacgccacaatagaggtaatagccttcgcggaggcgttcgacaaatgcaaagacatcataataccggataacatggtgctggcgtccggatgcgttatgaataggaacgaaccgaaaccgaaattacgcttagaaagctgcgtcccactatcgatagctcgcagcacattcgctaaaagcgtacaaatagacatatcgacaaacgggattgacactcggataattgacgatgtccgcaaatgctgcgaagagtttccgggagactgttacttagtgatgaacgtaacaacaacagacaacagcgcctacaagataagggcgggaaatatcagcatgtctccgacaaacgaggcattgagcaggctacgcgaattggttggaaatgaaaatgtgaggattgctaagactattagttga

SEQ ID NO: 59922 - protein, 542 aa, Unknown
  Obtained from environmental sample
  DOMAIN (1)...(113): Bacterial DNA polymerase III alpha subunit
  misc_feature (1)..(542): Xaa is any amino acid
MKEYLRKLKPTRIEDLIAMTALYRPGPMNYIDTFINRKHGKEEIKYLHPMLENILSVTYGVIVYQEQVMRIAQVMGGFSLGGADILRKAMGKKDAEKMAKQGDKFIEGAVAKGIDRKTARDVFDLMAKFAEYGFNKAHATVYAYLSYQTAYLKVHYPIEYMTAFLSAYLGKMDDFLMMRNEAERLGVHVLPPDVNKSDYDFGVDGNSIRIGLGAVKNVGKAAELIIKAREDKGRFTSIFDVCRSTDNRIVNKKALESLICAGALDCFGGSRAQHINAVAKALEYGASSQKERASGQVNLFDNLLGAPDAAAHSATEPQLPAGAEWPLNIKLQNEKDVLGFYTSGHPIDQYRDDISAFATADIASEEFKNINDGEHVTIGGLITTVKPHVQKNGKKMAFLTLEALDATIEVIAFAEAFDKCKDIIIPDNMVLASGCVMNRNEPKPKLRLESCVPLSIARSTFAKSVQIDISTNGIDTRIIDDVRKCCEEFPGDCYLVMNVTTTDNSAYKIRAGNISMSPTNEALSRLRELVGNENVRIAKTIS

SEQ ID NO: 59923 - DNA, 447 bp, Unknown
  Obtained from environmental sample
  misc_feature (1)..(447): n is a, c, g, or t
ttgaggccgcttaccttattcagcttttgccttctttttcatggtcggttaaggcgcaaagcctttcacccaaaaaggtatatatcgccgaatacagggttgataaaaaccggcgccgtttccttcagcggcaactatggggcattgcttgaaaatcatgtatttaacagcctgcggataaaagccggcgcttcggggacggatatatattactttaccgggaaaaacggcggtgagtgtgattttattatcggcccgcgcgggaagccgtcctgcattcaggtttgttgggaattaacccatgataatcaggacagggaaataaacggcctgcttgaagccatggatttcttcaatcttaaaatcgggacaatcattacatttgatactgaagatattattcaaaccgccgggaagaaaataaaagtaataccggcatggaaataa

SEQ ID NO: 59924 - protein, 148 aa, Unknown
  Obtained from environmental sample
  misc_feature (1)..(148): Xaa is any amino acid
MRPLTLFSFCLLFHGRLRRKAFHPKRYISPNTGLIKTGAVSFSGNYGALLENHVFNSLRIKAGASGTDIYYFTGKNGGECDFIIGPRGKPSCIQVCWELTHDNQDREINGLLEAMDFFNLKIGTIITFDTEDIIQTAGKKIKVIPAWK

SEQ ID NO: 59925 - DNA, 795 bp, Unknown
  Obtained from environmental sample
  misc_feature (1)..(795): n is a, c, g, or t
gtggtaagcggaatccggcgttgcggaaaaagcacgctgctgcgccagtttgtccataagcttaaaaggccctggttttaccttaattttgacgacgttcgtcttgcctctttttctcatacggattttgtcctgctcgataaggtaatcgcggaatccggcgcgaatctgattttttttgacgagattcaaggcgcgcagagttgggaactttatgtaaggcagaaactggacgaaggttttcaactggcgattaccggttcaaacgcttcccttcttagccgggagcttggtacccgcctgacaggccgtcatatttcaaaagagctttttcctttttcctataaagagttttgcgattttcttaaaataaaaacaggctcggaatctttagcggactaccttgaaaaaggcggttttcccgaatatctaaaaacaggcaacacggacattctcgcccagcttcagtcggacatattataccgggatatcgcggtacggtacgggattcgtgacgcggcgtctctgcggcggctttttgtgtatcttgtgtctaatcccgcccagcttttctcgcccagcaagttgaccggcgttgtcggagtaaaatcacctactacggttctggaatatatttcttattttgaggccgcttaccttattcagcttttgccttctttttcatggtcggttaaggcgcaaagcctttcacccaaaaaggtatatatcgccgaatacagggttgataaaaaccggcgccgtttccttcagcggcaactatggggcattgcttga

SEQ ID NO: 59926 - protein, 264 aa, Unknown
  Obtained from environmental sample
  misc_feature (1)..(264): Xaa is any amino acid
MVSGIRRCGKSTLLRQFVHKLKRPWFYLNFDDVRLASFSHTDFVLLDKVIAESGANLIFFDEIQGAQSWELYVRQKLDEGFQLAITGSNASLLSRELGTRLTGRHISKELFPFSYKEFCDFLKIKTGSESLADYLEKGGFPEYLKTGNTDILAQLQSDILYRDIAVRYGIRDAASLRRLFVYLVSNPAQLFSPSKLTGVVGVKSPTTVLEYISYFEAAYLIQLLPSFSWSVKAQSLSPKKVYIAEYRVDKNRRRFLQRQLWGIA

SEQ ID NO: 59927 - DNA, 663 bp, Unknown
  Obtained from environmental sample
  misc_feature (1)..(663): n is a, c, g, or t
ttgtgcatgggcgcgggtattaccatagcccaaggcctaaagcgcgttgagctggacgcggttcatttcgcctttatcggggattcaactttctttcacgccgggattaccggggtaataaacgccgtatacaaccaaaccgacattattgtagttgtactggataactcaacaacggcaatgacgggaaaccagccgcatccgggtacgggcgttacaatgatgcacactcaaacacaaaaaatggacattgaaaaaatcgtaaaagcgttaaatgtttccaatgtagtaaaagtaaacccttttgatcaaaaaacgaccaaagacgctgttaacactttaattggtcaaaagggagtccgtgtacttttgtttgaagcgccctgcgtcgccatttcaaagcccgcgggaaaatcaacagtaaacatagacaagtgtacaggctgtcagctctgcataaaaaaattgggctgtccagctttaggctttgagaacaacaaagctcttgtcaactccagtctttgtacaggttgcggcctgtgcgctaccgtttgtggaacagacgcaattacggcagacgagaaatcaatttttcctccgcacctttgcgcctctgcgcctctgcgtgaggaattgggagtaatttcgaaaaatgacgtttaa

SEQ ID NO: 59928 - protein, 220 aa, Unknown
  Obtained from environmental sample
  DOMAIN (1)...(125): Thiamine pyrophosphate enzyme, C-terminal TPP binding domain
  misc_feature (1)..(220): Xaa is any amino acid
MCMGAGITIAQGLKRVELDAVHFAFIGDSTFFHAGITGVINAVYNQTDIIVVVLDNSTTAMTGNQPHPGTGVTMMHTQTQKMDIEKIVKALNVSNVVKVNPFDQKTTKDAVNTLIGQKGVRVLLFEAPCVAISKPAGKSTVNIDKCTGCQLCIKKLGCPALGFENNKALVNSSLCTGCGLCATVCGTDAITADEKSIFPPHLCASAPLREELGVISKNDV

SEQ ID NO: 59929 - DNA, 354 bp, Unknown
  Obtained from environmental sample
  misc_feature (1)..(354): n is a, c, g, or t
ttggcaaggccgacgcgtctcatcggttttgaaccggcggaaacagtgcgccaacttcccttccttcgtaaagacggctctgtaattgtttttaacagcggaaacggggatatgatccaatacttaaaagaaaatgtacaaaagcttactgtaatagaagcacggcgtttgacggcccatagcgtaaaaacattgaatgtgtttcttttgggagccgcggttcaaagcggtatattaccgtttgacgcggaaacattaaaacaggttttaacggaaatgctgccggagcgttttcttgaaatgaacttaaaagcttttgaagggggattatatggacacgctggatcagattaa

SEQ ID NO: 59930 - protein, 117 aa, Unknown
  Obtained from environmental sample
  misc_feature (1)..(117): Xaa is any amino acid
MARPTRLIGFEPAETVRQLPFLRKDGSVIVFNSGNGDMIQYLKENVQKLTVIEARRLTAHSVKTLNVFLLGAAVQSGILPFDAETLKQVLTEMLPERFLEMNLKAFEGGLYGHAGSD

SEQ ID NO: 59931 - DNA, 1236 bp, Unknown
  Obtained from environmental sample
  misc_feature (1)..(1236): n is a, c, g, or t
ttgaagggggattatatggacacgctggatcagattaagaaggcgataaaacacgcaatgagcagcgagttttacaaaaaatactacgcgggaattaatgtaaatgatataaaatccatggatgatttcagaaagctgccctttacggacaaggaagacttaagggacgcgtatccgcttgggcttatggcggtttccgacgagaaaatagtccgtattcactcgtcgtcaggcacaacaggcgctcctgtaattatcccctatacgcaaaaagatgtgcatgactgggcggttatgttcaaacgctgttatgaaaccgctggatgtactagcaaggatcgtattcatataacgccgggatacgggctttggacggcgggaataggttttcaggcgggcgctgaactgctcggcgctatggcgattccgatggggcccggcaacacagacaaacagattaaaatgatgatcgatatgcaatcaacggttatttgcgcgacatcttcctacgcgcttctgttagctgaagaaatagaaaaacgcggcgtcaaaaataaaattcaccttaaaaaaggtgttatcggctccgagcgctggggcgaaaaaatgcgaaagcgtattgccaacgaactcggcgttgaactgtacgacatttacggtttaacggaaatttacggccccggtattggtattaactgtcaaaaacaggacgccatgcacatgtggaccgactatttttattacgagattatcgatccaaaaacaggcgaggttttacccgaaggcaaaacaggcgaaattgtcataacaacactgtgcaaggaaggcgctcccctcattcgctacaggacgcatgacctcacaaaggcgattcccggcaagtgtgaatgcgggcttgagtatccgagaatcggcacgatcatcgggcggagcgacgacatggtcaaggttcgcggcgcaattatttacccaagccgcgtggacgaacttcttgccaccgttgagggcgtaagcagcgaatatcaaatcatgatcgatcatctgaacggaaaagatatacttacccttttctttgaaacgcgtgaaacaggcgatgccgcccacaatctggtaaaaatcgttgagcatgaattcaaggaaagaatcggtattacgccaaaggcaaaagccgtcggcatgggcgaacttccgagaagcgagaagaagtcaacgcgggtgtttgataacaggtattag

SEQ ID NO: 59932 - protein, 411 aa, Unknown
  Obtained from environmental sample
  DOMAIN (4)...(342): AMP-binding enzyme
  misc_feature (1)..(411): Xaa is any amino acid
MKGDYMDTLDQIKKAIKHAMSSEFYKKYYAGINVNDIKSMDDFRKLPFTDKEDLRDAYPLGLMAVSDEKIVRIHSSSGTTGAPVIIPYTQKDVHDWAVMFKRCYETAGCTSKDRIHITPGYGLWTAGIGFQAGAELLGAMAIPMGPGNTDKQIKMMIDMQSTVICATSSYALLLAEEIEKRGVKNKIHLKKGVIGSERWGEKMRKRIANELGVELYDIYGLTEIYGPGIGINCQKQDAMHMWTDYFYYEIIDPKTGEVLPEGKTGEIVITTLCKEGAPLIRYRTHDLTKAIPGKCECGLEYPRIGTIIGRSDDMVKVRGAIIYPSRVDELLATVEGVSSEYQIMIDHLNGKDILTLFFETRETGDAAHNLVKIVEHEFKERIGITPKAKAVGMGELPRSEKKSTRVFDNRY

SEQ ID NO: 59933 - DNA, 528 bp, Unknown
  Obtained from environmental sample
  misc_feature (1)..(528): n is a, c, g, or t
atgatggccgaggtcgtatggtcagagaatttttcccgtgaaaccgccgccgaattcggcgtggaaaaaacggactacgccattgacgccattgacacatttccccataaactcgatttgattgaatttcttttcaacgcgggggtaaaattcttttcatcaatgggcatggcgctcaagctcgatcctacccgtataaaaaccggcagtatatgggaatccaggggctgcgcacttgcaagacttgtacggcagggcttgcgcagacggggctttgccggcagctttaccgtagtgtacagcgacgaaccgccgattaacgccgatcagaacccggcgggcaacaacccgtcagaggaaagcacggacgaaggagctctgtcaggcaaaaaaagaatcaacggcagttgcgtcaccgttaccgcatcggcgggcatggcgctggcaagccttgtgttacgcgacattgcggacaaatgtccggtggggcgaagccccgttaaccagggttcggcagggaagcaatga

SEQ ID NO: 59934 - protein, 175 aa, Unknown
  Obtained from environmental sample
  misc_feature (1)..(175): Xaa is any amino acid
MMAEVVWSENFSRETAAEFGVEKTDYAIDAIDTFPHKLDLIEFLFNAGVKFFSSMGMALKLDPTRIKTGSIWESRGCALARLVRQGLRRRGFAGSFTVVYSDEPPINADQNPAGNNPSEESTDEGALSGKKRINGSCVTVTASAGMALASLVLRDIADKCPVGRSPVNQGSAGKQ

SEQ ID NO: 59935 - DNA, 402 bp, Unknown
  Obtained from environmental sample
  misc_feature (1)..(402): n is a, c, g, or t
atgagccacagatttatgcgaaggacaagtcccggtgtcgtaatacaaaaattaacaataaaagcagtgctggaacggaaactgatctgcgacggtgacaggatactcatagcggtatcgggcggcaaggattcgaccgtgcttgcctgggcgctttcctcgatacgccccgcattaaagacaaactacgaacttgccgccattcacatatccaccgatttttgctcctgctgtaaaaagccagtactctcggagcggctcgccgaatggggcatacccttcaatgatctctttgttcctgtcatcggcaggctgaaagaaggcgaaaaaatgaactgctactggtgttccacccagcgccgcgccgaactgctaaagtacgccgtggaaaaacggttttaa

SEQ ID NO: 59936 - protein, 133 aa, Unknown
  Obtained from environmental sample
  misc_feature (1)..(133): Xaa is any amino acid
MSHRFMRRTSPGVVIQKLTIKAVLERKLICDGDRILIAVSGGKDSTVLAWALSSIRPALKTNYELAAIHISTDFCSCCKKPVLSERLAEWGIPFNDLFVPVIGRLKEGEKMNCYWCSTQRRAELLKYAVEKRF

SEQ ID NO: 59937 - DNA, 750 bp, Unknown
  Obtained from environmental sample
  misc_feature (1)..(750): n is a, c, g, or t
atgacagattcngccgagtattcttgttacattcttatcatgggatggatgggcattaagatactcattacctttgttttttccgccgccgccctaatccgcgtgctttatcccatgctcctgcgcggctatgacccgattttcggcgcgttaatcataacgctgttaattaccgcccttatcatgtttctggtcgccggtctttctcgccgcgctcttaccgcgttcttgggggccgcaagcggcgttgtttttacctcgattcttgcgttttcctttaccggctggtttaagattcacggagcggtacgcccttttactgaaagcctgctcttttccggctacggccacttaaacctttcgcacctgtttatcgccggtgttttcatagccgcttccggagccatgatggacctatctatggatgtagccgccgccatggatgaaatcaaaatacaacaacccgccattacccgcataggtcttatgcgttcaggctttaccgtagccaggcaagccgccggaaccatgtccacgacccttttacttgcctattccgccgaatataccgccatgataatgacctttatcgcccagggcgtcccccttgaaaacgtaataaacatggtctgggtctcctcagaaatagtacacaccctggtaggctgcttcggcctaatgctggtcgccccgttaaccgtctttgccgggggtatgctgcttggcaggcaatccggcggaaatatataa

SEQ ID NO: 59938 - protein, 249 aa, Unknown
  Obtained from environmental sample
  DOMAIN (4)...(240): YibE/F-like protein
  misc_feature (1)..(249): Xaa is any amino acid
MTDSAEYSCYILIMGWMGIKILITFVFSAAALIRVLYPMLLRGYDPIFGALIITLLITALIMFLVAGLSRRALTAFLGAASGVVFTSILAFSFTGWFKIHGAVRPFTESLLFSGYGHLNLSHLFIAGVFIAASGAMMDLSMDVAAAMDEIKIQQPAITRIGLMRSGFTVARQAAGTMSTTLLLAYSAEYTAMIMTFIAQGVPLENVINMVWVSSEIVHTLVGCFGLMLVAPLTVFAGGMLLGRQSGGNI

SEQ ID NO: 59939 - DNA, 1371 bp, Unknown
  Obtained from environmental sample
  misc_feature (1)..(1371): n is a, c, g, or t
atgaaagtgcttataacggcaaaagaagtggaagtccgggaacaggttgatgttctggttgtcggcggagggcctgcgggtattggggccgcggtttcagctgccagaaccggcggcaaggtgctgctgctggaaaaaagggcttttctgggcgggaacataacttcagcctatgtggaaacctgcaactggtttttgaataataccttgttttcggtttgtggcctttacagggaaatagaagacggttataaggccgagtacgggcgcgggcatgaaatacgtgattatgcgccattccgctttaacggggaatacctcaaaatttttctggatgaattaatggccagggaaaatgttagggtgcttttttattcgtttgtaaatgatgtggtaatcgaaaacaaacgcatcaaagcggtaatcatccagaccaagagcggcccaatggcggtaagcgcccaggtgattattgacgccaccggtgacggggatgtggctttcgcggcgggaatccccttcaggcagggacgggacaaggacggctactgtcagcccggcacgctgaatctacggcttgcgggggtggatgccaaattttttgctcaggggccagtggaacaggacaaactaaaagccattgacaaaaaatttcaacaagattacgacgcggggaaaattcaccttgactgtaaacggcgcgaattcattatggggcggctgacctcaggtggtgttatcggcagttttaattatccttgttcgtatatgattgatcctacaagttctgtcgatcttacaaaaggcgaaatggaatgtcgtcggtacatcaaacaagtccttcactggatgcgggtgaatctgggcggctttgaaaagcttgagctggtttccatcgcaccggaacttggctttcgggacagcaggcgaattgagggaaagtatacattaacaacggaagatatcgaaagcaacagatcgtttgacgacactatctgtgttttcccgcgtgtatacgacatgcttgcccctgacggaaacatgggcggtaacggcgcgctggaaggagagggctacaagggacatatctttgttgtgcttgaacccaacagtacccgctcctataacattccctaccggactatgcttcctgtgagtatcgacaatctcctgatttcagggcgctgtatttcatcaacccatgtggcacagtcaagcatccgggccgtctatgcctgtatgttgacagggcaggctgcggggacagccgccgccctgtcgattcgtgataactgcgttcccgaaaaggtcaatatccgtaagctacaagaccatctggtaaagcagggaatcgaaattcccaaaaactga

SEQ ID NO: 59940 - protein, 456 aa, Unknown
  Obtained from environmental sample
  DOMAIN (3)...(207): Thi4 family
  misc_feature (1)..(456): Xaa is any amino acid
MKVLITAKEVEVREQVDVLVVGGGPAGIGAAVSAARTGGKVLLLEKRAFLGGNITSAYVETCNWFLNNTLFSVCGLYREIEDGYKAEYGRGHEIRDYAPFRFNGEYLKIFLDELMARENVRVLFYSFVNDVVIENKRIKAVIIQTKSGPMAVSAQVIIDATGDGDVAFAAGIPFRQGRDKDGYCQPGTLNLRLAGVDAKFFAQGPVEQDKLKAIDKKFQQDYDAGKIHLDCKRREFIMGRLTSGGVIGSFNYPCSYMIDPTSSVDLTKGEMECRRYIKQVLHWMRVNLGGFEKLELVSIAPELGFRDSRRIEGKYTLTTEDIESNRSFDDTICVFPRVYDMLAPDGNMGGNGALEGEGYKGHIFVVLEPNSTRSYNIPYRTMLPVSIDNLLISGRCISSTHVAQSSIRAVYACMLTGQAAGTAAALSIRDNCVPEKVNIRKLQDHLVKQGIEIPKN

SEQ ID NO: 59941 - DNA, 984 bp, Unknown
  Obtained from environmental sample
  misc_feature (1)..(984): n is a, c, g, or t
atgaaaaaagctcttatcactggcatcacaggtcaagatggttcgtttttagctgagtttttgcttgaaaaaggctatgaagttcacggcattatgcgccgtagcagttcgttcaacacggggcgcatagagcatctttatttggatgaatgggtacgcgatatgaagcaaaagcggcttgtgaatttgcattatggcgatatgaccgattccagttcgctgattcgcattttgcaattggttaagccagatgaaatatacaacctagcagcgcaaagccatgtaaaagtttcttttgacgtgccagaatataccgcagaggcagatgccataggaacccttaggcttttagaagcggtgcgcattttgggtatggaaaaacaaacccgcatttatcaagcaagcacaagcgaactttatggcttggtacaagaaattcctcaaaaagaaaccactcctttttatccgcgttctccttatggcgttgcaaaactctacggtttttggataacaaaaaattaccgcgaaagctatggaatgtatgcggttaatggcattctatttaaccacgaaagtgagcggcgcggcgaaacttttgtaaccagaaaaattacacttgcagtagcacgtatttctttgggtttgcaaagcaagctatatttgggcaatttggattctttgagagattggggatatgcaagggattatgttgagtgcatgtggctaattttgcagcacaaagaacccgaagattttgttatagccacaggtgaatatcattccgttagagaatttgcaactcttgcattcaagaatgcaggaattgaactcaaatgggaaggaaagggaatggaagaaaaaggcattgatgttaaaacagggggtgttattgttgaggttgacccaaaatactttagaccagcagaggttgaacaactattaggcgatccaaccaaagccaaacttgctcggctggaatcctaa

SEQ ID NO: 59942 - protein, 327 aa, Unknown
  Obtained from environmental sample
  DOMAIN (4)...(255): NAD dependent epimerase/dehydratase family
  misc_feature (1)..(327): Xaa is any amino acid
MKKALITGITGQDGSFLAEFLLEKGYEVHGIMRRSSSFNTGRIEHLYLDEWVRDMKQKRLVNLHYGDMTDSSSLIRILQLVKPDEIYNLAAQSHVKVSFDVPEYTAEADAIGTLRLLEAVRILGMEKQTRIYQASTSELYGLVQEIPQKETTPFYPRSPYGVAKLYGFWITKNYRESYGMYAVNGILFNHESERRGETFVTRKITLAVARISLGLQSKLYLGNLDSLRDWGYARDYVECMWLILQHKEPEDFVIATGEYHSVREFATLAFKNAGIELKWEGKGMEEKGIDVKTGGVIVEVDPKYFRPAEVEQLLGDPTKAKLARLES

SEQ ID NO: 59943 - DNA, 894 bp, Unknown
  Obtained from environmental sample
  misc_feature (1)..(894): n is a, c, g, or t
atggaaaaagcatctaaaatttatattgctggacatcgtgggcttgtaggctctgcaatttggcgttctttgcagagtaaaggctatgccaatttaataggcaaaagccatgcagagcttgatttgcttaattcaaatgcggtaaaagatttttttgacaaggaacagcctgagtttgtggttttggcggcggcaaaagttggtggaataattgccaataacacctaccgcgcagattttatttatgaaaacttgcaaatacagcaaaatgtgattggtgaaagttttaggcacaatgtgaagaaacttttgttcttgggcagcacttgcatttatcccaaaaatgccccacagccaataccagaaagtgctttgctaaccggcgaattggaacctactaatgaaccttatgccatagcaaaaattgctggcttaaaaatgtgcgagagtttcaatttgcaatatggcacaaactatatagccgttatgccaacaaatctctacggtccaaacgacaatttccacccagaaaacagccatgttttgccagcaatgatttacaaaatacataaggcaaaatgcgaagaggcagatgttttggaactatggggaactggcgagcctttgcgtgagtttttgtggagcgaagatatggcagatgcctgtgtttattgcttagaaaacataaattacgcagatgtcaaaagccatataaatataggaacaggaaaagaaataagcatagcaaatttggcagcacttgtagcaaagacaataggctacaatggcaaaattatttttgacagctcaaaacctaatggcacaatgcgaaaactctgcgatgttagcaaaattcaatctatgggctggcatcacaaactcggcccaatctga

SEQ ID NO: 59944 - protein, 297 aa, Unknown
  Obtained from environmental sample
  DOMAIN (7)...(241): NAD dependent epimerase/dehydratase family
  misc_feature (1)..(297): Xaa is any amino acid
MEKASKIYIAGHRGLVGSAIWRSLQSKGYANLIGKSHAELDLLNSNAVKDFFDKEQPEFVVLAAAKVGGIIANNTYRADFIYENLQIQQNVIGESFRHNVKKLLFLGSTCIYPKNAPQPIPESALLTGELEPTNEPYAIAKIAGLKMCESFNLQYGTNYIAVMPTNLYGPNDNFHPENSHVLPAMIYKIHKAKCEEADVLELWGTGEPLREFLWSEDMADACVYCLENINYADVKSHINIGTGKEISIANLAALVAKTIGYNGKIIFDSSKPNGTMRKLCDVSKIQSMGWHHKLGPI

SEQ ID NO: 59945 - DNA, 624 bp, Unknown
  Obtained from environmental sample
  misc_feature (1)..(624): n is a, c, g, or t
atgctaagaaaaatacttgttggcgtttttgtaatattttgcattacaattactgtaataataattcagcggaaacgccaacacagtatttttcagaatgttcaatacattcaggaagatatgatactcccttatatgaaagatggcgatattatttgccgcctgggtgacagggtttggtcaatgtattttaaggaattgtcacccaatgataaaagattttcacaccttggaatagtcagaataaggagcgacgtggtttcagtaataaacgcggaaggcttggcaaatgaaaggaaagattttgttaatgaagtatcattaaatgatttcctgaaatgtgcccaaaaaataggaatatacagattgaagaatattgaaggggaaatggtttctgatacggctttagattatgttggagttccttttgattggcaattcgatatggaagatgacagcaaattgtattgttctgaattattatatgtattattaaaaaatgtaaatcctgacattgttttaaataaagcatttataaaagaaattggtaaaaacataatcccattggatgtatgctctcaaaccgaatattttacagaaataggctattggggccggtattaa

SEQ ID NO: 59946 - protein, 207 aa, Unknown
  Obtained from environmental sample
  misc_feature (1)..(207): Xaa is any amino acid
MLRKILVGVFVIFCITITVIIIQRKRQHSIFQNVQYIQEDMILPYMKDGDIICRLGDRVWSMYFKELSPNDKRFSHLGIVRIRSDVVSVINAEGLANERKDFVNEVSLNDFLKCAQKIGIYRLKNIEGEMVSDTALDYVGVPFDWQFDMEDDSKLYCSELLYVLLKNVNPDIVLNKAFIKEIGKNIIPLDVCSQTEYFTEIGYWGRY

SEQ ID NO: 59947 - DNA, 780 bp, Unknown
  Obtained from environmental sample
  misc_feature (1)..(780): n is a, c, g, or t
atggttgaaaacccgctgattgttcaaggtgacaggaccctgctgctcgatgttcacgcgaaaaaggcggaacaggcaagagccgcggttattccttttgcggaactggaaaaatcacctgaacatatccatacctaccgtataacgcctctgtctctgtggaacgccgcaagcgccgggttcaaacctgaggatattgcgaaagtccttgccgaatacagccgctattcagtgccatcaggcattattgaaagtttttccgataccatgtcccgttacggaaagatcaggatgatcgccgcgcctaaacccgccgaaaacaatgacatgctgtttcttgaaatcgccgataagtcggtgctggcggaagtcgaagccgtaaaaacccttgaaaaatatttaataaaaaccggggaaggtttcctcttgaggctggttgacaggggaactgtaaagcaggagcttatcaggaaaggatggccagtacaggacgaagcgccgcttgtttcaggagacagtctggaaattacgcttagagacaaatgcctgtcaggaaagcccttcactcccagggattaccaaattgaggcggctagatcggtgcttggagacggaaggccggggactggttacggcgttgtggccttgccctgcggttccggaaaaacaattgtgggcatggttataatgtcattgttaaaaaccaatacgctgattctgactacaatgtcgcggctgtgcaccaatggatcgaggagttggttgataaaacagaattaa

SEQ ID NO: 59948 - protein, 259 aa, Unknown
  Obtained from environmental sample
  misc_feature (1)..(259): Xaa is any amino acid
MVENPLIVQGDRTLLLDVHAKKAEQARAAVIPFAELEKSPEHIHTYRITPLSLWNAASAGFKPEDIAKVLAEYSRYSVPSGIIESFSDTMSRYGKIRMIAAPKPAENNDMLFLEIADKSVLAEVEAVKTLEKYLIKTGEGFLLRLVDRGTVKQELIRKGWPVQDEAPLVSGDSLEITLRDKCLSGKPFTPRDYQIEAARSVLGDGRPGTGYGVVALPCGSGKTIVGMVIMSLLKTNTLILTTMSRLCTNGSRSWLIKQN

SEQ ID NO: 59949 - DNA, 954 bp, Unknown
  Obtained from environmental sample
  misc_feature (1)..(954): n is a, c, g, or t
gtgcaccaatggatcgaggagttggttgataaaacagaattaagccgcgggcagatagccgaatactccggggacacaaagtccgtggcgcctgtcacaatcgccacataccagattataacatggcggcccggccgcgacgccgatttcccccatttcaggctgttcagggaacatcattgggggcttataatttatgacgaggtgcatcttttgcccgctcccgtattccgcgtaacggctgaattgcaggccgtcaggcgtttggggctcaccgctaccttgatccgcgaagacggcgcggaagacgcggtattcagcctggtggggccgaagcgttacgacgtgccgtggaaggaacttgaaggcaaaggctggattgccgaagcggtctgtacggaaatcaggattgatctgcctgaggagttaaagataccttatgccgtagcctcacagcgcgagaagtaccgtatcgccagcgagaacccgttaaaagaagaaattgtcgcccagttaatcgagaaccacagtgaagatcagattctcgtaatcggccaatacctttcccagctcgattcgctggcgaaactgcttaaagtgccgttaatcaccggaaaaacacctaacgcggagagggacaggatatataacgaattcaagcggggagagagcaggatcatcgtggtctcgaaggttgccaattttgccatcgatctgccggacgcttcaatggcggttcaggtttccggctccttcggctcgcggcaggaagaagcccagcgtttggggcgaatccttaggccaaaagacaaaaacgcgaaacaccataacgcgctgttcttcacccttgtctcgcgttatacagtggaagaagatttcgcggcaaaccggcataaattcctggccgagcagggatataaatactccattcaacactggggtacaataaaatga

SEQ ID NO: 59950 - protein, 317 aa, Unknown
  Obtained from environmental sample
  DOMAIN (197)...(269): Helicase conserved C-terminal domain
  misc_feature (1)..(317): Xaa is any amino acid
MHQWIEELVDKTELSRGQIAEYSGDTKSVAPVTIATYQIITWRPGRDADFPHFRLFREHHWGLIIYDEVHLLPAPVFRVTAELQAVRRLGLTATLIREDGAEDAVFSLVGPKRYDVPWKELEGKGWIAEAVCTEIRIDLPEELKIPYAVASQREKYRIASENPLKEEIVAQLIENHSEDQILVIGQYLSQLDSLAKLLKVPLITGKTPNAERDRIYNEFKRGESRIIVVSKVANFAIDLPDASMAVQVSGSFGSRQEEAQRLGRILRPKDKNAKHHNALFFTLVSRYTVEEDFAANRHKFLAEQGYKYSIQHWGTIK

SEQ ID NO: 59951 - DNA, 744 bp, Unknown
  Obtained from environmental sample
  misc_feature (1)..(744): n is a, c, g, or t
atgaaaaaagggatttttagatcggttgaattctggaaggcatccataatgcccctgccggatcacgccttttttgaattgctgcggactgttttcggaaaaattaaaacaccttttaataagcaaaatctggtcggcgatctggaaaaattcctgtcaaacaacgatatacaaaaaaatattgccgcttttattgacaaaaatgacgctcgtattattgccgctatcgctgtgttgaacgaaccaaccgccgcggaactgaacgccttttttgacggggagatagacaatacggaattaaatgacatggttataaatcttgaagaaaggtttattttattccgctttatggaagaaggccgaatcgaaagccgcctggcgctcaatccggtactggaacccgtattggcgcaatataccgatgacaaatcctcattgtttccctcattcagcaataaaacacctgacaaaacaggcaaacaaaatttacctttctttgacgaccgtattctggcggcgctgctttcttttgtttcccaaaatgaggtattttttatcaaagagggaagaatacgccagaaagtcatgaatacggcggcggctctgttccctgccctgcagatggaacctgtcatgggaggcttacagattttggggctgttcttcgcaaacggcgatacgctgcttcccgattttgcccgttttgcggcttttggcaaacttgacaggctggaaagaatataa

SEQ ID NO: 59952 - protein, 247 aa, Unknown
  Obtained from environmental sample
  misc_feature (1)..(247): Xaa is any amino acid
MKKGIFRSVEFWKASIMPLPDHAFFELLRTVFGKIKTPFNKQNLVGDLEKFLSNNDIQKNIAAFIDKNDARIIAAIAVLNEPTAAELNAFFDGEIDNTELNDMVINLEERFILFRFMEEGRIESRLALNPVLEPVLAQYTDDKSSLFPSFSNKTPDKTGKQNLPFFDDRILAALLSFVSQNEVFFIKEGRIRQKVMNTAAALFPALQMEPVMGGLQILGLFFANGDTLLPDFARFAAFGKLDRLERI

SEQ ID NO: 59953 - DNA, 1053 bp, Unknown
  Obtained from environmental sample
  misc_feature (1)..(1053): n is a, c, g, or t
atgtcgccgtgcttattccgcacaaagctccctacttacgcgtcatttattcataatttttatacatcgcttgatccggaacaacagtaccctcttgtaaccctgcgaaggctaatcttcatgctaggaccgaataatgttaaaattaactgcaatactcttatccaggcaatgaagcggacacggctcttgatttcatattcaaacaaacgctggaaaaagtcaccgtttaccgctgaaaccgcgatgacgaaagacactcccgctaacagcacgactatcgcgatggattcaccgttcacgctggtgatgtaccctgaaattgcgtataacgacgcggtggaacttgcctctatntcccgcgttaccggaaccgggttgaatgtcagctttgaaatagacaaagacgccgcagtctcggcgttcaaccggggtatttccgccgcctcggccatagagcttctacagcggctgacaggaaaccgtattgatgaaaacgcggcctttacgctgcttgattgggaaaaacgccacaaggagatagccttaagcaaagggctggttttgagcctttcccccgaacgccgctatcttgccgaaacaaaaccgctgtcaaaatatatcagcgcggaactggcgccgggaatatatatgcttcctgaaaacatggaagaaaaggtatataccgccctgaaaaaagccggtatcaccatttttgccaaaccgaacggcgtcggcgcgtctaacggcgcgggccaggccgatgacggcaatatattgtccggtcccgattcccgcatttttttcccgcgtgtaactccccatatcgaaaaaacccggcaattcaagacggaaataaaggaggagggggttaataataatacatcgtcatccgttccggcttcgtctgttccagctacgtccgttccggctgcggctaccttaattgaagggtttcattctataatgaacaaaatgcgtctcggggccgaacagagggacgaactgacggcgcgaattaaccgccgtctggtactgtgcgaatcgcagtaa

SEQ ID NO: 59954 - protein, 350 aa, Unknown
  Obtained from environmental sample
  misc_feature (1)..(350): Xaa is any amino acid
MSPCLFRTKLPTYASFIHNFYTSLDPEQQYPLVTLRRLIFMLGPNNVKINCNTLIQAMKRTRLLISYSNKRWKKSPFTAETAMTKDTPANSTTIAMDSPFTLVMYPEIAYNDAVELASXSRVTGTGLNVSFEIDKDAAVSAFNRGISAASAIELLQRLTGNRIDENAAFTLLDWEKRHKEIALSKGLVLSLSPERRYLAETKPLSKYISAELAPGIYMLPENMEEKVYTALKKAGITIFAKPNGVGASNGAGQADDGNILSGPDSRIFFPRVTPHIEKTRQFKTEIKEEGVNNNTSSSVPASSVPATSVPAAATLIEGFHSIMNKMRLGAEQRDELTARINRRLVLCESQ

SEQ ID NO: 59955 - DNA, 1284 bp, Unknown
  Obtained from environmental sample
  misc_feature (1)..(1284): n is a, c, g, or t
atggacggcacgcggcctgtgttggcgcacggctatgtggggattgagggccgcaaggtttcctatgtgggcgataaagctccggcggaatccgcggcccgcgtaataagcggctcgcgcaggcttctgatgccgggccttattaattcccatacccatttgcccatgtcgcttctgaggggttacgccgacgattacaacctgcaggattggctgtttgaccatattttccccgcggaagccaaaatggacgggcgctgcatagcggcgggcatacggctcggcctggccgagtgcatacgattcggagtcataagctgcaccgacatgtattaccatctgccccggatcgccgaagccgtaattgaaagcggcgtcaaggccaacataaccaactcgctcctgtgcctggacatggacaaattcgattttgagaaggatcgaagcactgttgagattcgggaagtcctcgcgcgatttaagggcaatttgagcgcgggctcaaacggggacggcaggctcgtcgttgacgcggggattcacgccgagtatacatcaggcccggcggcatggaagaaatgcgccgctttagccgaagagaacaatttgcgcatgcagatccatttgagcgagacagagacggagcacgaaaactgtaaaaaaaaatacggcaagaccccggctaagatactcagcgaaaacggcgtattcagccgcaaaacaactgccgcccactgctgctggctcagcgaagacgacatggatcttctggccgccaacggagtgacggcggcgcactgccccatcagcaacctcaaaatatccgcgggcgcggcgcaagttgttaaaatgcaacagcacgggattaacgttgcgcttggcacggacggagcctgttccaacaataacctcgatttattcgaagagattaagaccgccgcgttactgcaaaaatatctgacaaaggatcctaccgctctgcccgcgtatgaggcaatcaaactggccacggtaaacggcgcgattgggcagggccgcgaaaacgaaaccggcaaaatcaaggttggatatgacgcagaccttatcatgctgaaccttgactccccgcacctgttcccccttaacgaaccttgttcggccgtagcctactccgcaaggggcggcgacgtagacttaacaatggtgcagggaaagatcctctacgaaaacggcgaatataaaacactcgacattgagaaaatccgtcatgaggtggataactacgtcattccccggttgaaataa

SEQ ID NO: 59956 - protein, 427 aa, Unknown
  Obtained from environmental sample
  DOMAIN (42)...(363): Amidohydrolase family
  misc_feature (1)..(427): Xaa is any amino acid
MDGTRPVLAHGYVGIEGRKVSYVGDKAPAESAARVISGSRRLLMPGLINSHTHLPMSLLRGYADDYNLQDWLFDHIFPAEAKMDGRCIAAGIRLGLAECIRFGVISCTDMYYHLPRIAEAVIESGVKANITNSLLCLDMDKFDFEKDRSTVEIREVLARFKGNLSAGSNGDGRLVVDAGIHAEYTSGPAAWKKCAALAEENNLRMQIHLSETETEHENCKKKYGKTPAKILSENGVFSRKTTAAHCCWLSEDDMDLLAANGVTAAHCPISNLKISAGAAQVVKMQQHGINVALGTDGACSNNNLDLFEEIKTAALLQKYLTKDPTALPAYEAIKLATVNGAIGQGRENETGKIKVGYDADLIMLNLDSPHLFPLNEPCSAVAYSARGGDVDLTMVQGKILYENGEYKTLDIEKIRHEVDNYVIPRLK

SEQ ID NO: 59957 - DNA, 408 bp, Unknown
  Obtained from environmental sample
  misc_feature (1)..(408): n is a, c, g, or t
ttgatacaagcagttgaaaattttttacctattgatacagtcgctctggatgaggaaagaaaagccttaaagataattgatcagacattgcttcccggagaattgaagatcctgcacctgaccgctcaggatgaaatttatcaggctatccgtcagttgaaagtccgcggcgcgccggcaataggcgtggccgccgccatcggggtgtacctcgctgctttggaaattaacgctgacacttacgaagcgttttacagccgttttatggaagcaaaaaattttcttgcgtcttcaaggcccacggcggtaaatcttttctgggcattggggcgcatggaaaagaccgtgttgaataatcccggcgcgcgccccgcgaaactcaaagactcctgcatgacaaggcgctga

SEQ ID NO: 59958 - protein, 135 aa, Unknown
  Obtained from environmental sample
  misc_feature (1)..(135): Xaa is any amino acid
MIQAVENFLPIDTVALDEERKALKIIDQTLLPGELKILHLTAQDEIYQAIRQLKVRGAPAIGVAAAIGVYLAALEINADTYEAFYSRFMEAKNFLASSRPTAVNLFWALGRMEKTVLNNPGARPAKLKDSCMTRR

SEQ ID NO: 59959 - DNA, 2100 bp, Unknown
  Obtained from environmental sample
  misc_feature (1)..(2100): n is a, c, g, or t
atgtcgatgcaacagcttaccatgcaccccgaaaaactgtaccttgtcgataacgggagaacaattatcgcgctgaacagattaggagcggcgagtattcccgtatcagggggacttccgactccgcttcccgtatatccttctttcgcgtcaggcaatacgccgttaagaggacggcttcaggatttagccgcttccgccgacggtcgctgggttttgatcgtagagccgataagtcccggctacggaaatttatttttagtcgatcttgcaaacggaacaaaaaaaattgtctgtgaaaaaattgaattgcccaacgcggaattccccgcaaagtggagtcccgactcgcggatttttgtttacgcaaaaggcggcaggcttttttacttccccattctaaacgatctatccgtacttgtagatgaacgctttagaatgattggatcgggcggaattgaatcggtcttatgggatcaacttggtgttttttattacatgaccggaaacactttataccgcgtaaccaaccccgaactttttacgcggacaatttatggggactttctcgccatcggctctgtcgccgccgttcttccgctggattttaattccggctttgatcgttactggatttcgccggactcaggttcaattttaataaacaagagcggcaagggattatttttctttttgctgggagaaaatcaaacaagcgccgttgattcggcaagcacaatacttccccatgtccttaccccaaacggagcanacaattttaatgttctctggcctgncatcgaacaggaacagagcgcggttaattcggcgcgaccgggacgcaaaataacttccggcaatcttaccgtaatttattccatgcgcggtgaaacttttgttttacgctttaacgttaacggcagaacaattacctctttgcccaacaatagtttcccgttagcgccttcttgcgcgctgtcgcccgacggaacaaaagcggtattctggggagagaacggacttgagctttgggattacacaaactggcggttaatccaaagactgagcaatagtcccgtcttttcctgcgtgtggattaacaacagacaattaattaccggaaactcaagatttatagaagacataaatatttcaagttcttcctacccgcgcaggagaatttgtctttcatccgcggacgaatacggttttgaggaaggctccaatcctccgcaaattgtcgtaagagcggggaatgaatggttttcaagcgacggaaaaaattcatggattcagataacaaatgcgcagttaagagcgcctattttgtattcggatcgttaccgcgtttttcttgaacctcaaatgacgggacattacagtaatattcccatgatacgcaatacgcgcgcgacaggcactttatctcttgtatcaaaatatacggtaaataaatcatatactctcggacgttccatgcctgtcgctctctgctttgatctctacgacgacgacacgggattatcgcaagtattagccgcattgcgccgtttaaacataaaagcgacattctttttaaacggcgaatttatacgccgaaacccccacgccgcagcggctatcgccgaagccggacatgaaacagcctcgcttttttacaccccgattgatctttcggacacgcgttaccgcattaccaatgaatttatcacacgcggactcgcgcgcaacgaagacgaattcaacaaagctacggggaaagagctttctatcctctggcatcctccgttctaccgcagttccaacgcagtaaacgcaaacgccgccgccgcaggatacatcacggtaaacagaagcgtcgatcccggcgattgggtatccagagaagaagcgttaaggctcaacctgcggcaaatcccgccttcggaaatgatagagcagattatccaaaaaagagaatcgggagccgtcattcccatacgccttggacttcttccgggcggcagggacgaatatctgttccagcggatagaagcgcttcttgacgcgttactgcgttcagggtacgaaatagtcccggtctcatcggtcatcagataa

SEQ ID NO: 59960 - protein, 699 aa, Unknown
  Obtained from environmental sample
  DOMAIN (488)...(616): Polysaccharide deacetylase
  misc_feature (1)..(699): Xaa is any amino acid
MSMQQLTMHPEKLYLVDNGRTIIALNRLGAASIPVSGGLPTPLPVYPSFASGNTPLRGRLQDLAASADGRWVLIVEPISPGYGNLFLVDLANGTKKIVCEKIELPNAEFPAKWSPDSRIFVYAKGGRLFYFPILNDLSVLVDERFRMIGSGGIESVLWDQLGVFYYMTGNTLYRVTNPELFTRTIYGDFLAIGSVAAVLPLDFNSGFDRYWISPDSGSILINKSGKGLFFFLLGENQTSAVDSASTILPHVLTPNGAXNFNVLWPXIEQEQSAVNSARPGRKITSGNLTVIYSMRGETFVLRFNVNGRTITSLPNNSFPLAPSCALSPDGTKAVFWGENGLELWDYTNWRLIQRLSNSPVFSCVWINNRQLITGNSRFIEDINISSSSYPRRRICLSSADEYGFEEGSNPPQIVVRAGNEWFSSDGKNSWIQITNAQLRAPILYSDRYRVFLEPQMTGHYSNIPMIRNTRATGTLSLVSKYTVNKSYTLGRSMPVALCFDLYDDDTGLSQVLAALRRLNIKATFFLNGEFIRRNPHAAAAIAEAGHETASLFYTPIDLSDTRYRITNEFITRGLARNEDEFNKATGKELSILWHPPFYRSSNAVNANAAAAGYITVNRSVDPGDWVSREEALRLNLRQIPPSEMIEQIIQKRESGAVIPIRLGLLPGGRDEYLFQRIEALLDALLRSGYEIVPVSSVIR

SEQ ID NO: 59961 - DNA, 1158 bp, Unknown
  Obtained from environmental sample
  misc_feature (1)..(1158): n is a, c, g, or t
atgataacgaacagtaatccccactccccactccccactccccactcccctttggaacttctctgtctgggcaacgccattattgacatattcgcgtccgtcaattctgcctggcttgacgggatggggataacggagccggtgcagcatatttcccgggaccttgcccagcggatgctggaagcctttgtcactgaaaaagatacggtaataggttccgggggaacggcggcgaatgtggcaaaaatcgccgccatgctggatattaaaagcgcttttgccggctgtgtgggtgcgtcaacttgcgttgacgatttaaccaaggctgacctgttaagcgacattgacatttcaaaagtcgcctcaggcgacaatcttgccgccatatttaaaaacgaccttgaaagcgccggagttgttcccctcctttcagagggcaaagggaaaaccggcctgtgtttcgcgtttaactgcggcgaatctacccgcatagccgcttcgcccggcgcggctctggaattctccgaagccgatgtgccggcggatctgattccccgggccgaggcgcttgtgctggacggctatatgctcgaccgccgccccctggtgcggcatattatggagttggcaagccgccacggaatccccgtcgccctggacgccgcctcggtattccagataaaggaaaaaaccgaggacattctccaatacagccgaaattatcccctgatcgtctttatgaacgccgatgaggcaatcgtgttctataacaacatccgaaagagctctgaaagactggaaacctccggcgagcgggaaaaagagacaatgatcctgaaggagatctgccccgtgctgaagtgcatcaccgaaggggaaatcttccccatcatcgtcataaagctggggggaaggggggccgtagttcttgccgggggcaatatctaccgggaagagacctttacaatcatcccccggaacaccgtcggcgcgggagacgctttttgcgcggcttttatgtccgcatggatccgtcataagtcgattcaggaatgcgccgcgctgggaaacaaagtcgcaagagaaattttgctggttccgggcacaaatatcgagaaaggcaagctgcgggcgtttgcaaagctgctacgaaagtga

SEQ ID NO: 59962 - protein, 385 aa, Unknown
  Obtained from environmental sample
  DOMAIN (65)...(376): pfkB family carbohydrate kinase
  misc_feature (1)..(385): Xaa is any amino acid
MITNSNPHSPLPTPHSPLELLCLGNAIIDIFASVNSAWLDGMGITEPVQHISRDLAQRMLEAFVTEKDTVIGSGGTAANVAKIAAMLDIKSAFAGCVGASTCVDDLTKADLLSDIDISKVASGDNLAAIFKNDLESAGVVPLLSEGKGKTGLCFAFNCGESTRIAASPGAALEFSEADVPADLIPRAEALVLDGYMLDRRPLVRHIMELASRHGIPVALDAASVFQIKEKTEDILQYSRNYPLIVFMNADEAIVFYNNIRKSSERLETSGEREKETMILKEICPVLKCITEGEIFPIIVIKLGGRGAVVLAGGNIYREETFTIIPRNTVGAGDAFCAAFMSAWIRHKSIQECAALGNKVAREILLVPGTNIEKGKLRAFAKLLRK

SEQ ID NO: 59963 - DNA, 435 bp, Unknown
  Obtained from environmental sample
  misc_feature (1)..(435): n is a, c, g, or t
atgagcaaatttagaattggtgacggagatgaatacgagggcgatgtcgtcaacggacaaccaaacggtaaaggcatatatacgttgacggcatacggctccgtgtacgaaggcgatttcgtagacggcaagccccacggtaatgggaaatttacatggccggaaggctccgtatacgaaggcggttgggtaaacggcaaacccaacggcaaagggaaaatgacgctcaatgacggaacggtgtacgaaggcgattgggttgacggaacggagaacggcaaaggcaaaataacatttgcggacggcaattcttacgaaggcgatttcgtcaaccgcaagtgccacggcagagggaaaatgacttatgccgacggcacagttgaagaaggaagatttgagaacaacaaatttgttgaaggagaaaaacatggctaa

SEQ ID NO: 59964 - protein, 144 aa, Unknown
  Obtained from environmental sample
  DOMAIN (12)...(34): MORN repeat
  misc_feature (1)..(144): Xaa is any amino acid
MSKFRIGDGDEYEGDVVNGQPNGKGIYTLTAYGSVYEGDFVDGKPHGNGKFTWPEGSVYEGGWVNGKPNGKGKMTLNDGTVYEGDWVDGTENGKGKITFADGNSYEGDFVNRKCHGRGKMTYADGTVEEGRFENNKFVEGEKHG

SEQ ID NO: 59965 - DNA, 1893 bp, Unknown
  Obtained from environmental sample
  misc_feature (1)..(1893): n is a, c, g, or t
ttgggaactactaactcatgtgtggccgtccttgaagggggcgagcctgtggtaatccagaattcagagggggatcgcacaactccgtccattgtaggttttaccagcaaaggggacagggttgtcggcgctccggccaaaaatcagatgattaccaatccggaaaatacggtttattcaattaaaaggtttatgggcaggcggtattccgaggtaacaagcgaaatgaagcgcgtaccttaccgcatagtggagcagggggatgatgtaagggtaaaaatcgacgacaagccctattccccgcaagaaatttccgctttcgtgttacaaaagatgaagcagactgccgaggattacctgggcgagtccgtcaccgaagcggtcattaccgttcccgcttacttcaacgacgctcagcgccaggcgacaaaagacgccggtaaaatcgcgggtctggacgtaaaacgtatcatcaacgagccgaccgccgcgtcgctggcctttggctttaataaagaccaaaagaaagagaaaactatcgccgtgtacgatcttggtggcggcactttcgatatttcgattctggaacttggggaaggggtttttgaggttaaatccacaaacggggacacccacctgggaggggacgacttcgacctaaaagtccttgattggctaattgatgaattcaagaaagataccggcattgaccttggcaaagatcgtatggcccttcagcggcttanggaagcttcggaaaagcaaagagggaactttcttcgacccagaccacgggaaatcaccctgccttttatcaccgccgaccagaacggccccaagcatcttcaaaaaagccttacaagggcgaaattcgagcagatggtgtcggatcttctggagaggacaaaggagccctgccgcaaagcccttgcggatgctgaacttacagaagatcaaattgacgaggttatccttgtgggcggttctaccagaatccccgcagttcaggcgattgtaaaagatctcttcaaaaaggagccaaacaaaggcgttaaccccgatgaggcggttgccgtcggagccgccattcagggtggtatcctgggcggcgacgtgaaggatgtgatcctgctggacgttacgccgctttctctgggcattgagaccctgggtcacgtgatgacgcggcttattccccggaacaccacaattccttggaaaaaaagccagattttctccaccgccgatgacggacagaccgctgtttctatccatgtgcttcagggcgaaagggaaatggccgcccagaaccgtacgctgggcaggtttgatctggtcggtatcccgcccgctccgaggggaattccgcagatagaagtaacttttgatattgacgcgaacggcattgtccatgtttccgcgaaagacctcggtaccggcaaggagcagaagatccgtatagaaagctcttccggcctttcggacaacgaaatcgaccgcatggtaaaggaagcggaactccacgcggaagaagacaaaagggaaagagaaagggccgaagtccgaaacgacgcggacaacatgatctactccaccgagaaaaacatcaaagagctgggagacaagataagcggcgcggataaatccagggttgaagaagcgatagtggatctgcgtaaagctctggagggaagtgatatcgaaaatatcaaatccaagaccgaagctttaaagcagggtttcctacaagatagccgaggaagtttcaagcaggcaggcgcccagcagggcggcgcgtcaggctcttcagatggaggaggcagtgcgggagccggggataataccaaaggcgccgaagacgcggactatgaagtagtggatgacgataaatag

SEQ ID NO: 59966 - protein, 630 aa, Unknown
  Obtained from environmental sample
  DOMAIN (1)...(591): Hsp70 protein
  misc_feature (1)..(630): Xaa is any amino acid
MGTTNSCVAVLEGGEPVVIQNSEGDRTTPSIVGFTSKGDRVVGAPAKNQMITNPENTVYSIKRFMGRRYSEVTSEMKRVPYRIVEQGDDVRVKIDDKPYSPQEISAFVLQKMKQTAEDYLGESVTEAVITVPAYFNDAQRQATKDAGKIAGLDVKRIINEPTAASLAFGFNKDQKKEKTIAVYDLGGGTFDISILELGEGVFEVKSTNGDTHLGGDDFDLKVLDWLIDEFKKDTGIDLGKDRMALQRLXEASEKQRGNFLRPRPREITLPFITADQNGPKHLQKSLTRAKFEQMVSDLLERTKEPCRKALADAELTEDQIDEVILVGGSTRIPAVQAIVKDLFKKEPNKGVNPDEAVAVGAAIQGGILGGDVKDVILLDVTPLSLGIETLGHVMTRLIPRNTTIPWKKSQIFSTADDGQTAVSIHVLQGEREMAAQNRTLGRFDLVGIPPAPRGIPQIEVTFDIDANGIVHVSAKDLGTGKEQKIRIESSSGLSDNEIDRMVKEAELHAEEDKRERERAEVRNDADNMIYSTEKNIKELGDKISGADKSRVEEAIVDLRKALEGSDIENIKSKTEALKQGFLQDSRGSFKQAGAQQGGASGSSDGGGSAGAGDNTKGAEDADYEVVDDDK

SEQ ID NO: 59967 - DNA, 312 bp, Unknown
  Obtained from environmental sample
  misc_feature (1)..(312): n is a, c, g, or t
gtgggtgtccccgtttgtggatttaacctcaaaaaccccttccccaagttccagaatcgaaatatcgaaagtgccgccaccaagatcgtacacggcgatagttttctctttcttttggtctttattaaagccaaaggccagcgacgcggcggtcggctcgttgatgatacgttttacgtccagacccgcgattttaccggcgtcttttgtcgcctggcgctgagcgtcgttgaagtaagcgggaacggtaatgaccgcttcggtgacggactcgcccaggtaatcctcggcagtctgcttcatcttttgtaa

SEQ ID NO: 59968 - protein, 103 aa, Unknown
  Obtained from environmental sample
  misc_feature (1)..(103): Xaa is any amino acid
MGVPVCGFNLKNPFPKFQNRNIESAATKIVHGDSFLFLLVFIKAKGQRRGGRLVDDTFYVQTRDFTGVFCRLALSVVEVSGNGNDRFGDGLAQVILGSLLHLL

SEQ ID NO: 59969 - DNA, 849 bp, Unknown
  Obtained from environmental sample
  misc_feature (1)..(849): n is a, c, g, or t
gtggagttccgcttcctttaccatgcggtcgatttcgttgtccgaaaggccggaagagctttctatacggatcttctgctccttgccggtaccgaggtctttcgcggaaacatggacaatgccgttcgcgtcaatatcaaaagttacttctatctgcggaattcccctcggagcgggcgggataccgaccagatcaaacctgcccagcgtacggttctgggcggccatttccctttcgccctgaagcacatggatagaaacagcggtctgtccgtcatcggcggtggagaaaatctggctttttttccaaggaattgtggtgttccggggaataagccgcgtcatcacgtgacccagggtctcaatgcccagagaaagcggcgtaacgtccagcaggatcacatccttcacgtcgccgcccaggataccaccctgaatggcggctccgacggcaaccgcctcatcggggttaacgcctttgtttggctcctttttgaagagatcttttacaatcgcctgaactgcggggattctggtagaaccgcccacaaggataacctcgtcaatttgatcttctgtaagttcagcatccgcaagggctttgcggcagggctcctttgtcctctccagaagatccgacaccatctgctcgaatttcgcccttgtaaggcttttttgaagatgcttggggccgttctggtcggcggtgataaaaggcagggtgatttcccgtggtctgggtcgaagaaagttccctctttgcttttccgaagcttccntaagccgctgaagggccatacgatctttgccaaggtcaatgccggtatctttcttgaattcatcaattag

SEQ ID NO: 59970 - protein, 282 aa, Unknown
  Obtained from environmental sample
  misc_feature (1)..(282): Xaa is any amino acid
MEFRFLYHAVDFVVRKAGRAFYTDLLLLAGTEVFRGNMDNAVRVNIKSYFYLRNSPRSGRDTDQIKPAQRTVLGGHFPFALKHMDRNSGLSVIGGGENLAFFPRNCGVPGNKPRHHVTQGLNAQRKRRNVQQDHILHVAAQDTTLNGGSDGNRLIGVNAFVWLLFEEIFYNRLNCGDSGRTAHKDNLVNLIFCKFSIRKGFAAGLLCPLQKIRHHLLEFRPCKAFLKMLGAVLVGGDKRQGDFPWSGSKKVPSLLFRSFXKPLKGHTIFAKVNAGIFLEFIN

SEQ ID NO: 59971 - DNA, 303 bp, Unknown
  Obtained from environmental sample
  misc_feature (1)..(303): n is a, c, g, or t
atgttgtccgcgtcgtttcggacttcggccctttctctttcccttttgtcttcttccgcgtggagttccgcttcctttaccatgcggtcgatttcgttgtccgaaaggccggaagagctttctatacggatcttctgctccttgccggtaccgaggtctttcgcggaaacatggacaatgccgttcgcgtcaatatcaaaagttacttctatctgcggaattcccctcggagcgggcgggataccgaccagatcaaacctgcccagcgtacggttctgggcggccatttccctttcgccctga

SEQ ID NO: 59972 - protein, 100 aa, Unknown
  Obtained from environmental sample
  SIGNAL (1)...(22)
  misc_feature (1)..(100): Xaa is any amino acid
MLSASFRTSALSLSLLSSSAWSSASFTMRSISLSERPEELSIRIFCSLPVPRSFAETWTMPFASISKVTSICGIPLGAGGIPTRSNLPSVRFWAAISLSP

SEQ ID NO: 59973 - DNA, 1128 bp, Unknown
  Obtained from environmental sample
  misc_feature (1)..(1128): n is a, c, g, or t
gtggctaaaagagattattacgaagttttaggtgtccaaaagaatgcctcaaaagacgagataaaaaaagcttatcgtaagcttgccattcaataccatcccgacaagaatccgggaaacaaggctgcggaggaaaagtttaaggaagctaccgaagcttacgaagttctcgcggatgacaagaaaaagcaggcctacgatcaattcggctttgcgggcgtggaaggtatgggcgggccaacgccccatgacttctctcaggccttccacggctttgaggacatctttggcgatttttcgggcatctttgactcgatttttggcgggggtacaaggcgctcatcaggcggcggccatgggggggcaaggcaaggggccaacctccgctacgatatcgaaatatcttttaaagacgctgttttcggcactaaggttgaaatacagtacaataagaacgatgcctgcccggtttgcaaaggttcgggagcggcaagcgggacaggcagaaaggtctgccctacctgtaagggtgcgggacagatacgccagagcgcgggctttttctccatggcttcgccgtgtccgtcatgcggcggccagggtgagattattgaaaagccctgcccggaatgcgccggttcaggtacgcaaacgaaacaccagaagataatggttaccattccgccgggagtggaaaacggcaaacgggtgttggttcgcgggcagggcgatgctggaatagccggcggcccgaccggagacctttacgtttttatccgcgtaaaaccccatgagttttttgaacgccaggacgaagacctttactgcgccatcccgatttccgtaacgcaggctgctcttggcgcggagattcaggtttcaaccctcgaaggaaaatccattaaggtaaagattccgccgggaatacagaacggcaagttgctccgaatccgcgacgagggagtccctgtgtcaggccgccggggaaacctatatatcaaaatgatagttcagataccggcaaagctttcaaagcgcggcaaagagctgatggaagagcttgcccgcgttgaaggcgaaaacagcgctcccaaaccgatacccctttcggagctttcggaccgttag

SEQ ID NO: 59974 - protein, 375 aa, Unknown
  Obtained from environmental sample
  DOMAIN (142)...(222): DnaJ central domain (4 repeats)
  misc_feature (1)..(375): Xaa is any amino acid
MAKRDYYEVLGVQKNASKDEIKKAYRKLAIQYHPDKNPGNKAAEEKFKEATEAYEVLADDKKKQAYDQFGFAGVEGMGGPTPHDFSQAFHGFEDIFGDFSGIFDSIFGGGTRRSSGGGHGGARQGANLRYDIEISFKDAVFGTKVEIQYNKNDACPVCKGSGAASGTGRKVCPTCKGAGQIRQSAGFFSMASPCPSCGGQGEIIEKPCPECAGSGTQTKHQKIMVTIPPGVENGKRVLVRGQGDAGIAGGPTGDLYVFIRVKPHEFFERQDEDLYCAIPISVTQAALGAEIQVSTLEGKSIKVKIPPGIQNGKLLRIRDEGVPVSGRRGNLYIKMIVQIPAKLSKRGKELMEELARVEGENSAPKPIPLSELSDR

SEQ ID NO: 59975 - DNA, 852 bp, Unknown
  Obtained from environmental sample
  misc_feature (1)..(852): n is a, c, g, or t
ttgccagcagcaagcaccttcggtggtcgccgcgtgcgccagccggtgcagtacgtgctacaggcaacttcgctcgacaagctcaaggagttcgttccccaatttatggctaaggtaaacgaaagccacatttttcaaatggcagacgttgacctcaagttcaccaagcccgagctgcgcgtggacatcaaccgcgacaaggcaaacctcatgggtatttccaccgaaaacatagggcaaaccctacagctgggcttgagcggacaacgctttggctacttcttcatcaactccaagcagtaccaggtaatagggcaaatggagcggcagcacagcagcaaaacccttgacctgcgctccatttacgtgcgcaacaacgtaggcgagatggtgcagctcgacaacctcgtgtcgctgcgcgaggtaagcacgccgccaagcctgtaccgctacaacccggcacgaggcggtgatctcgtttactttttcggtgggaataccgaagagttccccctctattttggttgccccggctcctgtgatcaaaatccgctttatgtcgcccatcctgatcccgttttcaaggatgatcttgccaaacgcgcccgaagccgaggtaatcgcgtcctcggccctggtacttattttcttgacaaccttgccgtcttccagcgaaaccgcttttgtagtcgtacttccaatatcaataccaattatcattctaacggtccgaaagctccgaaaggggtatcggtttgggagcgctgttttcgccttcaacgcgggcaagctcttccatcagctctttgccgcgctttgaaagctttgccggtatctgaactatcattttga

SEQ ID NO: 59976 - protein, 283 aa, Unknown
  Obtained from environmental sample
  misc_feature (1)..(283): Xaa is any amino acid
MPAASTFGGRRVRQPVQYVLQATSLDKLKEFVPQFMAKVNESHIFQMADVDLKFTKPELRVDINRDKANLMGISTENIGQTLQLGLSGQRFGYFFINSKQYQVIGQMERQHSSKTLDLRSIYVRNNVGEMVQLDNLVSLREVSTPPSLYRYNPARGGDLVYFFGGNTEEFPLYFGCPGSCDQNPLYVAHPDPVFKDDLAKRARSRGNRVLGPGTYFLDNLAVFQRNRFCSRTSNINTNYHSNGPKAPKGVSVWERCFRLQRGQALPSALCRALKALPVSELSF

SEQ ID NO: 59977 - DNA, 306 bp, Unknown
  Obtained from environmental sample
  misc_feature (1)..(306): n is a, c, g, or t
atgacagattggccgagattggattctgtggatcgagggattatgccaataattgaaattaaagacatgacaagaaaagatatgcctatttattatagacgattttattccggcgtagcggtattggagcttgttaatcgtccggtggaatgtcctcttgattggcaaattgagcacaaaccaacaggacagacagaaatagcgctttcaatgaagcaaagcatggattatcctttaataccccttcaaaaggaacttaagaaatttattggcgcccttgattcagacggaaaactgccaaactag

SEQ ID NO: 59978 - protein, 101 aa, Unknown
  Obtained from environmental sample
  misc_feature (1)..(101): Xaa is any amino acid
MTDWPRLDSVDRGIMPIIEIKDMTRKDMPIYYRRFYSGVAVLELVNRPVECPLDWQIEHKPTGQTEIALSMKQSMDYPLIPLQKELKKFIGALDSDGKLPN

SEQ ID NO: 59979 - DNA, 489 bp, Unknown
  Obtained from environmental sample
  misc_feature (1)..(489): n is a, c, g, or t
ttggcgcccttgattcagacggaaaactgccaaactagcctggatttacctgcttttattatctgttctacggtggatgatactgtttctctggggaaagcgcttgcaggtttcattaaaaaaggcgatattgtagctctaaaagggcctttgggtgccggaaagacctacttcgcgaagggtttagctatggctctcggcgtaaaagacgcggttacaagccccagttacaccattgtttctgaatatgacggcgttttgcagggcaatcccataaagatattccatattgacgcctaccgccttgccgggaatgatgatttttcagcaatcggaggggaagaaatgatctttggggacggagtttccattattgaatggtgtgaacgcatcccggatttcatccgcaagggcgctttaagggttgatatacaaattacagatgacgaanagcggctttttcatgtttacctggaagacggaaaatga

SEQ ID NO: 59980 - protein, 162 aa, Unknown
  Obtained from environmental sample
  DOMAIN (28)...(154): Uncharacterised P-loop hydrolase UPF0079
  misc_feature (1)..(162): Xaa is any amino acid
MAPLIQTENCQTSLDLPAFIICSTVDDTVSLGKALAGFIKKGDIVALKGPLGAGKTYFAKGLAMALGVKDAVTSPSYTIVSEYDGVLQGNPIKIFHIDAYRLAGNDDFSAIGGEEMIFGDGVSIIEWCERIPDFIRKGALRVDIQITDDEXRLFHVYLEDGK

SEQ ID NO: 59981 - DNA, 591 bp, Unknown
  Obtained from environmental sample
  misc_feature (1)..(591): n is a, c, g, or t
atggaatgtgcggacagcctatgcaaatcggcaggcataaagccttctgatttaggtctggttgcctgtatgagagggccaggctcgtttaccgggcttaggatcgggttttccgccgggaaaggcatagcccttgcgctgggaatcccgctgatcgccgttccgactcttgattgccttgcgtattccttatcaacaaaggcgggattggtgattcctgtgctcgacgcaaaaaaaggctgcttttttgccgctttctaccgagaaggcaaacgccttacggattatcttgatgcaaacccccttgaactcttaaaaatatcgtcaaaaatcctgctccagccggaagaaaaattgctattaacaggttcgggagctgaattattgcagtccagacttaaagagacctgtcaaagtaaattaatcttaaataaaaacataaatttagacaaagaattttcacggggaagggcaagggaattgctgaaaatagtgaaagacaataatatatataaagcaaacgatatttatggtttccctgtttatttgcgaaaaagcgacgcggagttgaattacaaaaaaaatggctga

SEQ ID NO: 59982 - protein, 196 aa, Unknown
  Obtained from environmental sample
  DOMAIN (1)...(192): Glycoprotease family
  misc_feature (1)..(196): Xaa is any amino acid
MECADSLCKSAGIKPSDLGLVACMRGPGSFTGLRIGFSAGKGIALALGIPLIAVPTLDCLAYSLSTKAGLVIPVLDAKKGCFFAAFYREGKRLTDYLDANPLELLKISSKILLQPEEKLLLTGSGAELLQSRLKETCQSKLILNKNINLDKEFSRGRARELLKIVKDNNIYKANDIYGFPVYLRKSDAELNYKKNG

SEQ ID NO: 59983 - DNA, 921 bp, Unknown
  Obtained from environmental sample
  misc_feature (1)..(921): n is a, c, g, or t
atgaaaatcctttttgccaacgaagcctgcaaaaacctttttaccgggtatgtcgatctttcaggtaaatacttcgtggatgtttttggaaagcctttcgggatagatgaaattcgcgatatacacaatacaatcatagaaggcaaaaacggctatttctggaaaggtgaagtccggataaagtcaagaaacatcgtttctgcccagattaaagtctatatttttccggcgtctccggaaaaaaaggagcccgcggaattcattgttatgtttgacgatgtaacaggagaaaacaaaaagctgaccaggaatacttttataagccttcttgaagcgtcaaagctaaaagacaacgataccggcaagcatattgtcagggttagtttttattctaaaaggctttcggaagagctcttccaaagcaaaaactcaaaatacaaccgcgttgacgcggactttatagataatatcggctttcttgcttctatgcatgatgtagggaaaataggcacccctgacgatattctgaacaaggaaggccctctttccgattgggaatggtctgtaatgagggagcatacaaaaaacggcgcgtttattctttccacctaccccaatccaatggcaaaagaaattgccctttcccaccatgagcgatgggatggttctgggtacccttatcaactttcgggtgaaatgattcccctggccgcaaggattgttagcatcgcggatgtatatgacgccctccgaatggaaagaagctacaagcccggttttgatcatgatgtggcaataaaaagaatggtagaagggaaagaaacccagttcgatccattcctgatagaggttttttcttctgtcgaggatgattttagaaagatcttcgatgataaccaggatatagggaaggcttcctaa

SEQ ID NO: 59984 - protein, 306 aa, Unknown
  Obtained from environmental sample
  DOMAIN (120)...(250): HD domain
  misc_feature (1)..(306): Xaa is any amino acid
MKILFANEACKNLFTGYVDLSGKYFVDVFGKPFGIDEIRDIHNTIIEGKNGYFWKGEVRIKSRNIVSAQIKVYIFPASPEKKEPAEFIVMFDDVTGENKKLTRNTFISLLEASKLKDNDTGKHIVRVSFYSKRLSEELFQSKNSKYNRVDADFIDNIGFLASMHDVGKIGTPDDILNKEGPLSDWEWSVMREHTKNGAFILSTYPNPMAKEIALSHHERWDGSGYPYQLSGEMIPLAARIVSIADVYDALRMERSYKPGFDHDVAIKRMVEGKETQFDPFLIEVFSSVEDDFRKIFDDNQDIGKAS

SEQ ID NO: 59985 - DNA, 450 bp, Unknown
  Obtained from environmental sample
  misc_feature (1)..(450): n is a, c, g, or t
gtgaaggtattaacaaaagcatacggaacggttgatgtaaacgagcgtcagaagatcacttttccttcaggcctttttggttttgaatccctgaaagactacgtgcttttggacgcggaacagaagcctttttattggttgcagtcgcttgacgaagagaagaccgcttttattcttattgatccttttattttcaggcccgattacgaaatggatattgacaatgaagaactccgcccgattggcataaccgatcccgaaaaggccgtcatattcacaatcgttactgtacccattgataacagcccgatgaccgcaaaccttcaggggccgttggtaattaaccgcgacagccggcttggagtccaggcggtgctgaccgattccagatggaagacaaagcacgatataatagcggagcttgcatccttaaagcaggaagggcggtag

SEQ ID NO: 59986 - protein, 149 aa, Unknown
  Obtained from environmental sample
  DOMAIN (17)...(140): Uncharacterized BCR, COG1699
  misc_feature (1)..(149): Xaa is any amino acid
MKVLTKAYGTVDVNERQKITFPSGLFGFESLKDYVLLDAEQKPFYWLQSLDEEKTAFILIDPFIFRPDYEMDIDNEELRPIGITDPEKAVIFTIVTVPIDNSPMTANLQGPLVINRDSRLGVQAVLTDSRWKTKHDIIAELASLKQEGR

SEQ ID NO: 59987 - DNA, 402 bp, Unknown
  Obtained from environmental sample
  misc_feature (1)..(402): n is a, c, g, or t
ttgcctccttaccgtgatgaaaggcctgccgctgtcgataacaaggacatgcaggaagacaaggaagccgtttttgatgccgttgacacggtaaaggcatgcctgtctgttttctgcgggatgtttgagacaattacatttaacacggaaaacatgtacaaaagtgcgcttggcggctacacaaacgccactgacgcggcggactggctggtcaaaaaagggctccctttcagggaagcccacgaaataaccggcaggcttgtcttatacgccataaataaaaaagcgcggcttgaagagttaaccttagacgaattaaaatccatatcgcccgtttttgacgagacgctttaccaggctatttccattgaggcctgtgtcaaggcgaggaatctgctctaa

SEQ ID NO: 59988 - protein, 133 aa, Unknown
  Obtained from environmental sample
  misc_feature (1)..(133): Xaa is any amino acid
MPPYRDERPAAVDNKDMQEDKEAVFDAVDTVKACLSVFCGMFETITFNTENMYKSALGGYTNATDAADWLVKKGLPFREAHEITGRLVLYAINKKARLEELTLDELKSISPVFDETLYQAISIEACVKARNLL

SEQ ID NO: 59989 - DNA, 1008 bp, Unknown
  Obtained from environmental sample
  misc_feature (1)..(1008): n is a, c, g, or t
ttgagcgaaaaattatggggggggcgcttttccggccagaccgacgagctggccttatgctttcattcttccatcgcgtttgactcaaggctttacaggcatgatataaagggcagcatagcccacgcgcagatgctcggcaaacaagggatcatcacaaagcaggattcggatgcgatagtaaaatcgcttgaggctatattaactgacatcganagcggcgctctaaaaatagacatgaacgccgaggatattcattcctttgtcgagtccgagcttgtctcgcgcattggggatccgggcaggcgtctgcatacaggcaggagccgcaacgatcaggtcgcccttgatatgcggatgtatgtaaaagaagaaattgacgcggcgctcggactgcttaataaactgcttgacgcgattctcgacacggcaaaaaaacacaccgcttcgataatgcccggatacacccatctgcaaaaggcgcagcctgttacgctggcccatcatcttatggcttacgcgcagatgttcaagcgggactgcgaaaggcttaaggactgccgcgaaagaaccgatgaaatgccccttggttccggggcgctcgcctctaccagttatccgcttgacagggaatttgtcagggaaaaactcggctttgcaaggataaccgcgaacagcatggacgctgtatcagacagggatttttgcgcggaatttgttttctgcctgtctcttataatgacgcacctgagccgcttctgcgaagagcttgtgctgtggtctacggacaatttcagtttcgcggaaatttcagacgcctacgcgacaggttcctcaatcatgcctcaaaagaaaaaccccgacatggcggagctaattcgcggtaagacaggccgggtttacggcagcctgacttgcctccttaccgtgatgaaaggcctgccgctgtcgataacaaggacatgcaggaagacaaggaagccgtttttgatgccgttgacacggtaa

SEQ ID NO: 59990 - protein, 335 aa, Unknown
  Obtained from environmental sample
  DOMAIN (8)...(302): Lyase
  misc_feature (1)..(335): Xaa is any amino acid
MSEKLWGGRFSGQTDELALCFHSSIAFDSRLYRHDIKGSIAHAQMLGKQGIITKQDSDAIVKSLEAILTDIXSGALKIDMNAEDIHSFVESELVSRIGDPGRRLHTGRSRNDQVALDMRMYVKEEIDAALGLLNKLLDAILDTAKKHTASIMPGYTHLQKAQPVTLAHHLMAYAQMFKRDCERLKDCRERTDEMPLGSGALASTSYPLDREFVREKLGFARITANSMDAVSDRDFCAEFVFCLSLIMTHLSRFCEELVLWSTDNFSFAEISDAYATGSSIMPQKKNPDMAELIRGKTGRVYGSLTCLLTVMKGLPLSITRTCRKTRKPFLMPLTR

SEQ ID NO: 59991 - DNA, 1218 bp, Unknown
  Obtained from environmental sample
  misc_feature (1)..(1218): n is a, c, g, or t
atgagtgataaaattgttttagcgtattcaggcggcttggacacgacggtgatcctgccttggctcagggagaattacaaaggctgcgaggttatcgcctgctgcgtcgatgtggggcaatgtaaggattatgccctgattaaagaaaaagcggcaaaaatcggcgttggcaaggtagtgattataaacgccagggatgaatttataaccgactttatttatcccatggttaaggcgaacgccgtttacgaagggaagtaccttctgggaacctccgccgcgcggccacttatcgcgaagaagctggtcgatctcgcccttgccgaaggggcgaacaccatttcccacggggctacgggcaaaggcaatgaccagatacatttcgagctgaccattaaggcctttgcgccctcaatgaagatcatcgcgccctggcgattatgggacatcagatcccgcgaagaggaaataaagtatctgcaggaccgggggattgaagtccccatgaaaaccgagcagagttacagccgcgacgacaatatttggcatctaagccacgaggggcttgagcttgaagacccctcccaagagccggattataaaaaattattacaactgacagtcaggccggaagacgcgcctgatacgcccgagtatgtggagcttggctttgagaaaggaatccccgtcagcctgaacgggaaaaaactcgcgcctcttgaaatgctggagtcattaaataaaatcggcggcagaaacggcgtaggcatagtggatcttgtcgagaaccgcgtggtcggcatgaagtcgcgcggcgtgtatgaaacgccgggcggatgcatcgtttacgcggcgcacaaagaactggaaagtttatgccttgaccgccagacgacctcgttcaaggcgacagtcgggcaaaaactggctgaactgatctattccggcgaatggtattcgccgttaagggaagcgctgtcggcttttgtggacaaaacccaggagaccgtcaccggctccgtcaagctgaaattgtacaaggggaacatcacgccggcgggcagcaagtcgccgtattcgcttttcaacattgaactgtccagcttcacgaccggaagcctttacgaccacagggacgcggacggcttcatcaaactgcttggtctgcctatgaccgtcagggctttaatgaaaaagtctgtagaggaaaagcgttga

SEQ ID NO: 59992 - protein, 405 aa, Unknown
  Obtained from environmental sample
  DOMAIN (6)...(397): Arginosuccinate synthase
  misc_feature (1)..(405): Xaa is any amino acid
MSDKIVLAYSGGLDTTVILPWLRENYKGCEVIACCVDVGQCKDYALIKEKAAKIGVGKVVIINARDEFITDFIYPMVKANAVYEGKYLLGTSAARPLIAKKLVDLALAEGANTISHGATGKGNDQIHFELTIKAFAPSMKIIAPWRLWDIRSREEEIKYLQDRGIEVPMKTEQSYSRDDNIWHLSHEGLELEDPSQEPDYKKLLQLTVRPEDAPDTPEYVELGFEKGIPVSLNGKKLAPLEMLESLNKIGGRNGVGIVDLVENRVVGMKSRGVYETPGGCIVYAAHKELESLCLDRQTTSFKATVGQKLAELIYSGEWYSPLREALSAFVDKTQETVTGSVKLKLYKGNITPAGSKSPYSLFNIELSSFTTGSLYDHRDADGFIKLLGLPMTVRALMKKSVEEKR

SEQ ID NO: 59993 - DNA, 351 bp, Unknown
  Obtained from environmental sample
  misc_feature (1)..(351): n is a, c, g, or t
atggcgggctggttatacggatgcttcgccgtagccgaaggcgcgaatatgcccagcaccctggaagctaccgaagtatttttaaagaacaaggtgctgtttgccccgggcaaagcggctaacgccggcggcgtagcgacatcggcgctggagatgtcccagaattccatgagattgtcatggtcatttgaagaggtggatcaaaaactcaatagcatcatggtgaatatttacaacaacattgccgccgccgcaaaagaagccggctccgaggacaattttgtcgtgggggcgaatatcgccggtttcaagaaagtcgcggaggccatgaggcagcagggaacagtttaa

SEQ ID NO: 59994 - protein, 116 aa, Unknown
  Obtained from environmental sample
  DOMAIN (1)...(114): Glutamate/Leucine/Phenylalanine/Valine dehydrogenase
  misc_feature (1)..(116): Xaa is any amino acid
MAGWLYGCFAVAEGANMPSTLEATEVFLKNKVLFAPGKAANAGGVATSALEMSQNSMRLSWSFEEVDQKLNSIMVNIYNNIAAAAKEAGSEDNFVVGANIAGFKKVAEAMRQQGTV

SEQ ID NO: 59995 - DNA, 1215 bp, Unknown
  Obtained from environmental sample
  misc_feature (1)..(1215): n is a, c, g, or t
gtgcctgtgacattcagcttccgctggccggtaaaacgcgccgtggactgcttcgaagagaggcttaaaccggaagaacctatggtaacaagggtacgcctcattgacaccttcttcccggtagcccgcggcggcacctactgtatccccggccccttcggcgcgggcaagacggtcttacaacagataaccagccgcttcgccgatgttgacattgttattgtcgcggcctgcggagagcgcgccggcgaggttgtggaaaccctcaaggaattccccgaattaaaagacgaaagaacagggcgctccctcatggaacgcaccattatcatctgtaatacttcttcaatgcccgtagcggcccgcgaagcctcggtttacacagcagtgacccttgccgagtactacaggcagatgagcctgaacgtcctgctgcttgcggactcgaccagccgctgggcgcaggccatgcgtgaaatgtcaggccgccttgaggaaatacccggcgaggaagccttccccgcgtaccttgaatcgacgattgccagtttctacgaaagggcgggcatcgtaaggcttaaagacggcagtttgggctctgtaaccatcggcggcacggtcagcccggcgggcggtaactttgaggagccggtaacccaggccacgttgaaagtcgtcggggccttccacggcctgtcccgtgagcgctcggacgcgcgtaaattccccgccatccacccgctggattcctggtcaaagtacaagggcattattagcgaagaaaaagtcggttacgcccacggatttatgcgccgcggaaccgaggttgaacaaatgatgaaagtcgtcggcgaggaaggcaccagtatagaagactatgtaatctacctgaaaggcgaccttatcgactccgtgtacttccagcaaaactcctttgacgaggtagacgcggcagttaaaccggaacggcagatatacacctttgacaaactgctggcgatcctcgcctcgcagttcagcttccccgataaaaacgaagcccgcgtctggttcaacaggttaaggcagaaattcctggactacaatggttcgcattggcaggacgcccgctttaaggaactggaaaaggaaattgaggacgctgttaagaaacagtcaaaaggcctggacaaggccgcccagcatattgtggctcctgagggagccaaggcatag

SEQ ID NO: 59996 - protein, 404 aa, Unknown
  Obtained from environmental sample
  DOMAIN (30)...(252): ATP synthase alpha/beta family, nucleotide-binding domain
  misc_feature (1)..(404): Xaa is any amino acid
MPVTFSFRWPVKRAVDCFEERLKPEEPMVTRVRLIDTFFPVARGGTYCIPGPFGAGKTVLQQITSRFADVDIVIVAACGERAGEVVETLKEFPELKDERTGRSLMERTIIICNTSSMPVAAREASVYTAVTLAEYYRQMSLNVLLLADSTSRWAQAMREMSGRLEEIPGEEAFPAYLESTIASFYERAGIVRLKDGSLGSVTIGGTVSPAGGNFEEPVTQATLKVVGAFHGLSRERSDARKFPAIHPLDSWSKYKGIISEEKVGYAHGFMRRGTEVEQMMKVVGEEGTSIEDYVIYLKGDLIDSVYFQQNSFDEVDAAVKPERQIYTFDKLLAILASQFSFPDKNEARVWFNRLRQKFLDYNGSHWQDARFKELEKEIEDAVKKQSKGLDKAAQHIVAPEGAKA

SEQ ID NO: 59997 - DNA, 501 bp, Unknown
  Obtained from environmental sample
  misc_feature (1)..(501): n is a, c, g, or t
atgaaaaaggtttatagcaagattgaatccataaccggaagcgttattaccgtccgggccgaagggatccgttacggcgaccttgccgaggttgacaccgtgttcggcacctcgcttgccgaggtaaacaggctgcaggacgacatggtctccctgcaggtatttgccggcggcaggggtatatccacgggcgacacagtgcgctttttgggacggccaatgcaggttccgttttccgaaaaccttatgggcagggtattttcaggttcaggagcgccccgcgacaagggtccggccctgcgcgaaaactacatccccatcggcggcccctcggtcaacccgtccgagcgcattatcccccgcaagatgatccgcaccggcatacccatgatcgacctgtttaacacactggtcgtttcacagaagctcccgatcttctcggtatcgggcgagcctttacaacgagctgcttgcccgtatcgccatgcaggccgaggttga

SEQ ID NO: 59998 - protein, 166 aa, Unknown
  Obtained from environmental sample
  DOMAIN (8)...(71): ATP synthase alpha/beta family, beta-barrel domain
  misc_feature (1)..(166): Xaa is any amino acid
MKKVYSKIESITGSVITVRAEGIRYGDLAEVDTVFGTSLAEVNRLQDDMVSLQVFAGGRGISTGDTVRFLGRPMQVPFSENLMGRVFSGSGAPRDKGPALRENYIPIGGPSVNPSERIIPRKMIRTGIPMIDLFNTLVVSQKLPIFSVSGEPLQRAACPYRHAGRG

SEQ ID NO: 59999 - DNA, 417 bp, Unknown
  Obtained from environmental sample
  misc_feature (1)..(417): n is a, c, g, or t
ttgatggccgagcgatctgctcaagagcttcgccgcaggaaggtgcatatcgccgtggtagtggacgagtacggcggggtttccggtattgtttgtatggaagacattatagaagagattgtcggtgatatacaggacgaattcgaccatgagaccgaagacgttatctccgtcggggaaaaagcctggctttgcgatgccagggtaaacttgagcgaccttgcggaaaaaaccggccttgatctgccggcggacgattttgacacccttggcggttttgtatttgaccttttcggcaagatccccgttagatatgaaaaagccgtgtaccggggaacagagcttatcgtacatgaaatggacgggcataagataaaagcggtcaagatagtggggagtagggaacagggaaaatga

SEQ ID NO: 60000 - protein, 138 aa, Unknown
  Obtained from environmental sample
  DOMAIN (56)...(134): Transporter associated domain
  misc_feature (1)..(138): Xaa is any amino acid
MMAERSAQELRRRKVHIAVVVDEYGGVSGIVCMEDIIEEIVGDIQDEFDHETEDVISVGEKAWLCDARVNLSDLAEKTGLDLPADDFDTLGGFVFDLFGKIPVRYEKAVYRGTELIVHEMDGHKIKAVKIVGSREQGK

SEQ ID NO: 60001 - DNA, 444 bp, Unknown
  Obtained from environmental sample
  misc_feature (1)..(444): n is a, c, g, or t
atggggaaggatcttaaaattttgaaatatttgctttgcctgctgcttgttttgccaggattaggacggcttgaagcccaaacaggggcgaacgcggcgggagcggcggcgctttatgagcggggcagggaattcatggcgcgggaggaatggtactccgccgccgaagccctgcttgactgcctgcggcaaaacccggcccatgccgaggcaaccgccgcccttgcggattgttactacgagctcggcgaattcgacgaagccctggcctgggtgcgcaaagcaagggttctggcgcggaacatacctctatcgccaatctggaagccgtcacccttatcgccctgggcaagctggacgcggccgcgtcggttatcgcggaactgctctcccgcgagccgtataaccgcgaggcgctgtttaccgccggggaactggatatag

SEQ ID NO: 60002 - protein, 147 aa, Unknown
  Obtained from environmental sample
  SIGNAL (1)...(26)
  DOMAIN (69)...(94): Tetratricopeptide repeat
  misc_feature (1)..(147): Xaa is any amino acid
MGKDLKILKYLLCLLLVLPGLGRLEAQTGANAAGAAALYERGREFMAREEWYSAAEALLDCLRQNPAHAEATAALADCYYELGEFDEALAWVRKARVLARNIPLSPIWKPSPLSPWASWTRPRRLSRNCSPASRITARRCLPPGNWI

SEQ ID NO: 60003 - DNA, 975 bp, Unknown
  Obtained from environmental sample
  misc_feature (1)..(975): n is a, c, g, or t
ttgatgggcagggttcttttggcccttgcgccggcttctgttttcggcgttattctctttggcattcccgcgcttttaaccatccttgtttctgtgactgcggcggaaatcgcggaggcccttttcagaaaagctacccgccaggacatacgcaattctgatctttccgctgctgtaactggactgctcgttgccctggttttgccgccgggcatgcccctgtggatgacggcccttggggctgctttcggcatcattgtgggcaaggagttttttggcggccttggggcaaatgtctttaatccggccttggtaggcagggcgtttttggttttgagttttccggcggcggcaacaacatggtcagtgcccagggcattcttctatgccgggaatgttgccgatgccgtaacaggagctaccccgcttggcattattaaacttggcggttccgttgccgatgtgggcgcaggtcttgcctctgcgggcttggccgggggcagcgattactggtcaaccattggaagccttttcctgggtacgcgtgcagggtgcatcggagaaacttccatactgcttatccttgttggatttgtctttcttattgtatcgaanaccattgactggcgggcccctgtttccatgaccgtctcgctttttgtcttttctttcttgtttggcagggatcctctctttgcggttttgtcaggcggtttgctttttggtgcggtcttcatggccaccgattatgttaccgcccccataactgccagtggaaagctaattttcggttttggcgcgggactgataactgcccttatccgccaatgggggaattaccccgaaggcgtcacttacgccatacttataatgaacgccgtcacccccttccttaataagctgatccagaaaaagtacggttatgtgaaaccccaaaaagcaaaaaaagctgaagcggcgggagggggaaaatga

SEQ ID NO: 60004 - protein, 324 aa, Unknown
  Obtained from environmental sample
  SIGNAL (1)...(21)
  DOMAIN (1)...(309): NQR2, RnfD, RnfE family
  misc_feature (1)..(324): Xaa is any amino acid
MMGRVLLALAPASVFGVILFGIPALLTILVSVTAAEIAEALFRKATRQDIRNSDLSAAVTGLLVALVLPPGMPLWMTALGAAFGIIVGKEFFGGLGANVFNPALVGRAFLVLSFPAAATTWSVPRAFFYAGNVADAVTGATPLGIIKLGGSVADVGAGLASAGLAGGSDYWSTIGSLFLGTRAGCIGETSILLILVGFVFLIVSXTIDWRAPVSMTVSLFVFSFLFGRDPLFAVLSGGLLFGAVFMATDYVTAPITASGKLIFGFGAGLITALIRQWGNYPEGVTYAILIMNAVTPFLNKLIQKKYGYVKPQKAKKAEAAGGGK

SEQ ID NO: 60005 - DNA, 615 bp, Unknown
  Obtained from environmental sample
  misc_feature (1)..(615): n is a, c, g, or t
atgagcgggaaaaaaggcggtttcgcggggatgctgaaactcggcgttgtcctggccctttacgctgtagcggcctgtgtcggcctggcctttgtttatgccggtactgagaaagtcattgcccagcggcagcgcgccgacctggaagcgtcgttaagcgaattgtttagtgaagctgacgattttaaggcaatttccggtttaaaaagtggcgacccggcagtaaccatcgaagacgacggagccttcgcggcttataaaaacggggaagtcattggcgcggtcttgagaacttccagtgccagttataatggggcgatcaaggtcttggtaggtgtcggtactaacggcagaatcagcagggtaaaaatcctggagcacagtgatactccggggcttggggcaaacgcggcttcaagcacatactatgtggatcgggcaaaggggattcatttttacgatcaatttgcgggaaaagccgtgagcgatccctttgtgcctaaaaacgatgtgatcgcgattacagcagccaccataacaagccgggcggtggcggcttcggtcaaggcggcgggtgaagccgccttagtctggtttgccggaggcaggcggtga

SEQ ID NO: 60006 - protein, 204 aa, Unknown
  Obtained from environmental sample
  SIGNAL (1)...(24)
  DOMAIN (102)...(195): FMN-binding domain
  misc_feature (1)..(204): Xaa is any amino acid
MSGKKGGFAGMLKLGVVLALYAVAACVGLAFVYAGTEKVIAQRQRADLEASLSELFSEADDFKAISGLKSGDPAVTIEDDGAFAAYKNGEVIGAVLRTSSASYNGAIKVLVGVGTNGRISRVKILEHSDTPGLGANAASSTYYVDRAKGIHFYDQFAGKAVSDPFVPKNDVIAITAATITSRAVAASVKAAGEAALVWFAGGRR

SEQ ID NO: 60007 - DNA, 627 bp, Unknown
  Obtained from environmental sample
  misc_feature (1)..(627): n is a, c, g, or t
gtgaaaaacacgataaagcatctgggtaaaatttttgtcaacggcattttcagggaaaatccccttttgatattgatgattgggctttgttcttcccttgcggttactacggaagtagccaacgggatcggcatggggctttccatgacctttgtgcttctcatgtcggaagtggtcatcagcgtttttagaaaactgattcccgattcaatccgcattccgatttttattattgtcattgccgcgtttaccactgtgatagattatgtgctaaaggcatggtttcccgatctttcaaaagcgatgggagtattcatcccccttatcgtggtcaactgtatcatcatgggcagggtagagggcttcgcgtccaaagcgccgctcccggacgccatagccgactcatttggcatggggctgggctacacttgggtgctccttggcatctcttttatccgggagctgcttggatcgggtacaattctgggcgctcaagttctgccggacagttatgtgcccatactctttttcattatgcccccggggggctttttggtgtttgcgttgtttatcagccttaacctgtttataaaatcaaagctaaaaagcgaagggagcccttcatga

SEQ ID NO: 60008 - protein, 208 aa, Unknown
  Obtained from environmental sample
  DOMAIN (5)...(192): Rnf-Nqr subunit, membrane protein
  misc_feature (1)..(208): Xaa is any amino acid
MKNTIKHLGKIFVNGIFRENPLLILMIGLCSSLAVTTEVANGIGMGLSMTFVLLMSEVVISVFRKLIPDSIRIPIFIIVIAAFTTVIDYVLKAWFPDLSKAMGVFIPLIVVNCIIMGRVEGFASKAPLPDAIADSFGMGLGYTWVLLGISFIRELLGSGTILGAQVLPDSYVPILFFIMPPGGFLVFALFISLNLFIKSKLKSEGSPS

SEQ ID NO: 60009 - DNA, 576 bp, Unknown
  Obtained from environmental sample
  misc_feature (1)..(576): n is a, c, g, or t
atgaacctttttaagatattcatcagcgcttttttaatagataacgtggttttgatgcggtttatagcgctctgtccctttatcgggatgagtaccgacgaggacaagtccataggaatgggcctggcggttacctttgttacggtgcttgcgacctgcgttacatggccggtttataagtttattctggaacctctggggctggtgtttttacagttgttggtttttattctggttatcgcttcgctggttcaacttgtggagttttaccttaaaaaatccgcgcccgctctgtacaacgctatgggaatttaccttgccttgattacgaccaactgcgccattttggcggtaaccttggacaatatttccaatgggtataattttgccgaatctttggcttacgccatcggcattgcaatgggctttcttctttccatgctgcttttggcgggaatcaggaggaggatcaggacaagcccgattccggcatttcttaaagggacgcccatactatttgtgtgcgcctgccttctttcgcttgcctttgcgggtttctcaggtttggtaaagtag

SEQ ID NO: 60010 - protein, 191 aa, Unknown
  Obtained from environmental sample
  DOMAIN (2)...(191): Rnf-Nqr subunit, membrane protein
  misc_feature (1)..(191): Xaa is any amino acid
MNLFKIFISAFLIDNVVLMRFIALCPFIGMSTDEDKSIGMGLAVTFVTVLATCVTWPVYKFILEPLGLVFLQLLVFILVIASLVQLVEFYLKKSAPALYNAMGIYLALITTNCAILAVTLDNISNGYNFAESLAYAIGIAMGFLLSMLLLAGIRRRIRTSPIPAFLKGTPILFVCACLLSLAFAGFSGLVK

SEQ ID NO: 60011 - DNA, 504 bp, Unknown
  Obtained from environmental sample
  misc_feature (1)..(504): n is a, c, g, or t
atggtggcgatgctggcgtgccggggtactcatgaggcggcgctgttaaaaggggagtacattggcgtaaagagctgcagggccgcgaaaatttccaccggaagcatcaagcgctgtatctggggctgtcagggctttggcgactgtacaatggtatgcaaattcggcgctatcacactgggcgaagacgggctgccccgcattgacagcgaacgctgtaccggctgcagggcttgcgcgaatgaatgcccccagcacatcatctgggtaattcccagagatttgaagggttcgcgtcctcaatgctccaacttgaatgtaaacaaggcaatggtagccaagaattgcaaaagcggctgcattaaatgcgagctttgcgtaaaaaattgtcctgaacaatgtattagaatggcaaacggtataccggttgtcgataacgcgaaatgcaccggctgcggggcttgcgtcagcaagtgcccgaagaaggtaatgactttgctttag

SEQ ID NO: 60012 - protein, 167 aa, Unknown
  Obtained from environmental sample
  DOMAIN (66)...(89): 4Fe-4S binding domain
  misc_feature (1)..(167): Xaa is any amino acid
MVAMLACRGTHEAALLKGEYIGVKSCRAAKISTGSIKRCIWGCQGFGDCTMVCKFGAITLGEDGLPRIDSERCTGCRACANECPQHIIWVIPRDLKGSRPQCSNLNVNKAMVAKNCKSGCIKCELCVKNCPEQCIRMANGIPVVDNAKCTGCGACVSKCPKKVMTLL

SEQ ID NO: 60013 - DNA, 381 bp, Unknown
  Obtained from environmental sample
  misc_feature (1)..(381): n is a, c, g, or t
gtgataggggggaccatgctgaagggacgacatttaatcgagcctcttgatttttccagggaagagatggagggactatttaagcgggctgaggaaattgaaaagaacccggctcatttccgggaacagtgccgtggaaatgttctggcgacacttttctttgagccaagtacgcgaaccagactttcttttgaggcggctatgttgcgtcttgncgggagctgtctgggctttgcagaaccgggctctagttctgcagccaagggcgaatgtctggcggacacgataaggacagtggcgtggtacgctgacgcaatcgttatgcgtaatccgaaggagggggcggctcttttggcctccccgttatcgaaaattccgtga

SEQ ID NO: 60014 - protein, 126 aa, Unknown
  Obtained from environmental sample
  DOMAIN (10)...(126): Aspartate/ornithine carbamoyltransferase, carbamoyl-P binding domain
  misc_feature (1)..(126): Xaa is any amino acid
MIGGTMLKGRHLIEPLDFSREEMEGLFKRAEEIEKNPAHFREQCRGNVLATLFFEPSTRTRLSFEAAMLRLXGSCLGFAEPGSSSAAKGECLADTIRTVAWYADAIVMRNPKEGAALLASPLSKIP

SEQ ID NO: 60015 - DNA, 1011 bp, Unknown
  Obtained from environmental sample
  misc_feature (1)..(1011): n is a, c, g, or t
ttgggcaatagaagtagaaacgagatatggcaagacagagttgagggaaacttccaatccgctggaaaggtctgggaagtcaacccccgaagcagaaaagaagagggcaagcgacctaaagctcaaccacaacacattgctgataactgtaaaccagaagacagcgacggcggtgttttcgccgaaacccaaaaggaacaacctgtttgtggcacccgtgaagatagcggtgcctcgttgggccatagtcgaagactgtgcgatagacaacgcagaaatactaagaacttatccgtaaatagcggcatactatcctatgggcatggagccttggggggtagcgatgagggcgcagccatgggaagtgtcggacgagttctgggcgagggtggagccgctgatccccaaaaaggagcgcgaccccgaaaaggcatacaggcgccgccccggcgccgggaggaaggagaagcccccccgcctggtgttcgagggcatcgtgcgggtgctgcggacgggctgccagtggaagtcgctgccgagggaggtttacggcagctccagctccatacacaagtatttcctcgactgggaaaaggccgggttcttcatggacttgtggagggccgggctggccgagtacgacgagatggagggcatagcctggagctggcagggcatagacggcgccatggtgaaggcgccgaccgcgagggaggcggtggggcccagccccaccgacaggggaaaaaaatgggagcaagcgccacctgctggtggacgggcgtggggccccgctgtcgctcgtcgtggccggggcgaaccggcacgacgtcacccaggtggaggcggttctggccgccctggcctccatcggtcgcgccccagcaccggggcggaggccgcgcctgtgcgccgacgcggggtacaggggcaggaaggccggggaggccatggagcgccacgggtacgtcccaaaggcaaaggggcgcggcgatgaggcgagggagctga

SEQ ID NO: 60016 - protein, 336 aa, Unknown
  Obtained from environmental sample
  misc_feature (1)..(336): Xaa is any amino acid
MGNRSRNEIWQDRVEGNFQSAGKVWEVNPRSRKEEGKRPKAQPQHIADNCKPEDSDGGVFAETQKEQPVCGTREDSGASLGHSRRLCDRQRRNTKNLSVNSGILSYGHGALGGSDEGAAMGSVGRVLGEGGAADPQKGARPRKGIQAPPRRREEGEAPPPGVRGHRAGAADGLPVEVAAEGGLRQLQLHTQVFPRLGKGRVLHGLVEGRAGRVRRDGGHSLELAGHRRRHGEGADREGGGGAQPHRQGKKMGASATCWWTGVGPRCRSSWPGRTGTTSPRWRRFWPPWPPSVAPQHRGGGRACAPTRGTGAGRPGRPWSATGTSQRQRGAAMRRGS

SEQ ID NO: 60017 - DNA, 681 bp, Unknown
  Obtained from environmental sample
  misc_feature (1)..(681): n is a, c, g, or t
atgggcatggagccttggggggtagcgatgagggcgcagccatgggaagtgtcggacgagttctgggcgagggtggagccgctgatccccaaaaaggagcgcgaccccgaaaaggcatacaggcgccgccccggcgccgggaggaaggagaagcccccccgcctggtgttcgagggcatcgtgcgggtgctgcggacgggctgccagtggaagtcgctgccgagggaggtttacggcagctccagctccatacacaagtatttcctcgactgggaaaaggccgggttcttcatggacttgtggagggccgggctggccgagtacgacgagatggagggcatagcctggagctggcagggcatagacggcgccatggtgaaggcgccgaccgcgagggaggcggtggggcccagccccaccgacaggggaaaaaaatgggagcaagcgccacctgctggtggacgggcgtggggccccgctgtcgctcgtcgtggccggggcgaaccggcacgacgtcacccaggtggaggcggttctggccgccctggcctccatcggtcgcgccccagcaccggggcggaggccgcgcctgtgcgccgacgcggggtacaggggcaggaaggccggggaggccatggagcgccacgggtacgtcccaaaggcaaaggggcgcggcgatga

SEQ ID NO: 60018 - protein, 226 aa, Unknown
  Obtained from environmental sample
  misc_feature (1)..(226): Xaa is any amino acid
MGMEPWGVAMRAQPWEVSDEFWARVEPLIPKKERDPEKAYRRRPGAGRKEKPPRLVFEGIVRVLRTGCQWKSLPREVYGSSSSIHKYFLDWEKAGFFMDLWRAGLAEYDEMEGIAWSWQGIDGAMVKAPTAREAVGPSPTDRGKKWEQAPPAGGRAWGPAVARRGRGEPARRHPGGGGSGRPGLHRSRPSTGAEAAPVRRRGVQGQEGRGGHGAPRVRPKGKGARR

SEQ ID NO: 60019 - DNA, 426 bp, Unknown
  Obtained from environmental sample
  misc_feature (1)..(426): n is a, c, g, or t
gtggacgggcgtggggccccgctgtcgctcgtcgtggccggggcgaaccggcacgacgtcacccaggtggaggcggttctggccgccctggcctccatcggtcgcgccccagcaccggggcggaggccgcgcctgtgcgccgacgcggggtacaggggcaggaaggccggggaggccatggagcgccacgggtacgtcccaaaggcaaaggggcgcggcgatgaggcgagggagctgagggcggacccgtcgaagagggcgaggcggcgggtggtggaggcggcccacggctggttcaacaggttccgcaagctgctggtgcgctacgagaagcttgagcgctcgtgccttgccctgtgccacttggccgccgccatcatcgcattcaggaaggtcaggggggaaacaaatattatttacggataa

SEQ ID NO: 60020 - protein, 141 aa, Unknown
  Obtained from environmental sample
  misc_feature (1)..(141): Xaa is any amino acid
MDGRGAPLSLVVAGANRHDVTQVEAVLAALASIGRAPAPGRRPRLCADAGYRGRKAGEAMERHGYVPKAKGRGDEARELRADPSKRARRRVVEAAHGWFNRFRKLLVRYEKLERSCLALCHLAAAIIAFRKVRGETNIIYG

SEQ ID NO: 60021 - DNA, 330 bp, Unknown
  Obtained from environmental sample
  misc_feature (1)..(330): n is a, c, g, or t
atgaaaaacatgaacaaacttctaaggcaagccaaacaagctccgcaagcgcaaaaaatgcttacgcagctcgtcaaagcccaagaggaactgcagcgcaagcagtacgagggcgcggccggcgggggtatggtcaaggtcgtcttaaacgggaagaatgaattggtatccgtcaaaatcaacccggaggtggtcgacccgcaggacgtggagatgctcgaggacttgatcgtcgccgcacacacgagcgctttggaggctgcaaagggtgattcggagtcggtcttcgggtctatccagagcggtttagggctgccggggctgtcgtag

SEQ ID NO: 60022 - protein, 109 aa, Unknown
  Obtained from environmental sample
  DOMAIN (14)...(106): Uncharacterised BCR, YbaB family COG0718
  misc_feature (1)..(109): Xaa is any amino acid
MKNMNKLLRQAKQAPQAQKMLTQLVKAQEELQRKQYEGAAGGGMVKVVLNGKNELVSVKINPEVVDPQDVEMLEDLIVAAHTSALEAAKGDSESVFGSIQSGLGLPGLS

SEQ ID NO: 60023 - DNA, 609 bp, Unknown
  Obtained from environmental sample
  misc_feature (1)..(609): n is a, c, g, or t
atgcttgagagtttggaagaattggtaaccgcgctgagcaagctacccacgataggccgcaagagcgcgtggcgtctggcgctctacctaatggagaggccggaggcggaggcgaagcacttggccgacacggtgctgtccgtgcggaaaaaggtaaggcgttgcagcgtgtgcttcaactacagcgagggcgcggtgtgcgcggtgtgcgcctctgcggcgcgcgaccggtcgcagatatgcgtggttgagaagcccacggacgtctttacaatagagaacgccgggcgctacagaggtctgtaccacgtgctgggcgggctgttatcgccgctgaacggcataaccgcggagaagttgcagattgcgcggttgcgcgagcgccttggcggggatgggggcgatgtagaggtcaaagaggtaataataggcctaggcggcagcggtgacgccgagacgacggcgctctacttggctaaggtgcttaagggcgaaggggtgcgcgtaacgaggttcgcccgcgggctgccggccgggctggagatagagcacgtggaccagctcacgcttacccaagcgttgaatgaacgggttgatgttagcgggtga

SEQ ID NO: 60024 - protein, 202 aa, Unknown
  Obtained from environmental sample
  DOMAIN (36)...(77): RecR protein
  misc_feature (1)..(202): Xaa is any amino acid
MLESLEELVTALSKLPTIGRKSAWRLALYLMERPEAEAKHLADTVLSVRKKVRRCSVCFNYSEGAVCAVCASAARDRSQICVVEKPTDVFTIENAGRYRGLYHVLGGLLSPLNGITAEKLQIARLRERLGGDGGDVEVKEVIIGLGGSGDAETTALYLAKVLKGEGVRVTRFARGLPAGLEIEHVDQLTLTQALNERVDVSG

SEQ ID NO: 60025 - DNA, 507 bp, Unknown
  Obtained from environmental sample
  misc_feature (1)..(507): n is a, c, g, or t
atgaatacgataatccactgggtaaggaagttgggggcgtcgtgctttttcatcggctacttccctatcgcgtcgggcaccgtcggctcggcgattacgatagccattttgtactttgcccaggacaagctctcgttcatactcggcccggagaacgcgctcaactattggtgggcaattgtaacgatcacggccgtcagtttttttctgaccgataggggcaaggagatattcgggcaggacgaccccaagcagacgatatttgacgaggtggtcgggcagtttgtcaccttttttatgatcccgataaacatacgtacattggccctaggattcgtcctctttcgtttctacgatatagtaaagccctacccggtataccgtttagaagaacttgagggcggcgtgggcgttactatggacgacgtggcggccgggattttggcgaacgttacgctgatgttttcgatatgggcatataagtgggtgatggtctttttggcgtaa

SEQ ID NO: 60026 - protein, 168 aa, Unknown
  Obtained from environmental sample
  SIGNAL (1)...(26)
  DOMAIN (8)...(158): Phosphatidylglycerophosphatase A
  misc_feature (1)..(168): Xaa is any amino acid
MNTIIHWVRKLGASCFFIGYFPIASGTVGSAITIAILYFAQDKLSFILGPENALNYWWAIVTITAVSFFLTDRGKEIFGQDDPKQTIFDEVVGQFVTFFMIPINIRTLALGFVLFRFYDIVKPYPVYRLEELEGGVGVTMDDVAAGILANVTLMFSIWAYKWVMVFLA

SEQ ID NO: 60027 - DNA, 321 bp, Unknown
  Obtained from environmental sample
  misc_feature (1)..(321): n is a, c, g, or t
atgcacgagatgaagcttattatcgatcttgtaaacaggggcgggctttcttttatgcgctattcaatttccgatactgcggagtacggcgactatgttacaggaccgaagatcatcacagaggaaacaaagaacacgatgcggcaggtgttaaaaaatattcaaaacggcagtttcgcgcgggaatggattcttgaaaaccaggtgaaccgcccgttctttaaccgcatgagggcgcttgaggctgaacatccaatcgaaaaaaccggaaaagaacttcgcgggatgatgccctggttaaagaaaaacgaggaaaaataa

SEQ ID NO: 60028 - protein, 106 aa, Unknown
  Obtained from environmental sample
  DOMAIN (1)...(101): Acetohydroxy acid isomeroreductase, catalytic domain
  misc_feature (1)..(106): Xaa is any amino acid
MHEMKLIIDLVNRGGLSFMRYSISDTAEYGDYVTGPKIITEETKNTMRQVLKNIQNGSFAREWILENQVNRPFFNRMRALEAEHPIEKTGKELRGMMPWLKKNEEK

SEQ ID NO: 60029 - DNA, 585 bp, Unknown
  Obtained from environmental sample
  misc_feature (1)..(585): n is a, c, g, or t
atgtctgatttaattcctttggaaattttagacactactctgcgggacggagctcaaggcgagggaattacattctccgtgcaggacaaacttgacgtggttcgcgctctggacgatttgggaatctcgtggatcgaggctgggaatcccggaagcaacccaaaggatatggaattcttccgtcttgccggagacctgaatcttaaacacgcaaaactctgcgccttcggtccaacacgtaaaaagggagtgaaggcaggcgaagacccgggtttgttgagcctgcttgacgcgcagaccaaagcggttgtgatcttcggcaagagttgggatcttcatgtgacggaagtgctgagggtaagccatgaggaaaaccttgcgatgattgccgagacaatcgcgtttctgaaagaaaaggggaaacaggttttttacgacgccgaacatttttttgacggctggaaggcgaatcatgattatgctcttactactttgaagaccgcgttaaccccccggagcggatcgcatagtactgtgcgacacaaacggcggcgcgtttcccggtacgatagagaaggcggttaa

SEQ ID NO: 60030 - protein, 194 aa, Unknown
  Obtained from environmental sample
  misc_feature (1)..(194): Xaa is any amino acid
MSDLIPLEILDTTLRDGAQGEGITFSVQDKLDVVRALDDLGISWIEAGNPGSNPKDMEFFRLAGDLNLKHAKLCAFGPTRKKGVKAGEDPGLLSLLDAQTKAVVIFGKSWDLHVTEVLRVSHEENLAMIAETIAFLKEKGKQVFYDAEHFFDGWKANHDYALTTLKTALTPRSGSHSTVRHKRRRVSRYDREGG

SEQ ID NO: 60031 - DNA, 957 bp, Unknown
  Obtained from environmental sample
  misc_feature (1)..(957): n is a, c, g, or t
atggcgagtgctaacacgataaccgccgtccttgccggatgcagacacattcagggaacccttgtcggcttcggagaacggtgcggcaacacaagccttgcggcggttatacccagccttgaacttaaacttggtttccgctgtctgcctgagggaaagatggaaaagatttccgagataaccagaattatcgcggagacggcaaatgtcgccgtgccgggcagcatgccttatgtgggaagccatgcttttacccacaaggcgggaatgcacgcggacggaattttgaaattgagcaaatcatttgaacatatcgatccttcccttgtggggaacgacaggcatatcgtaatgagcgaagtcggcggacgctcggctattgcggagagagcgaagaanattgacgcttcacttacgagggatcaccctgtaacggcggcgctggcgcaaaagttaaaaaaccttgaggcggacggctggcagtttgaaggcgcggacggcagttttgatcttttggttcgccgagagcttggtcggtacaaaccgctgtttaacattgaggcttaccgcgtggtaagcgaacacccgacgggcgaaacaatcgcctgttcccacgcatgggtaaaagttcatgttgacggacaggaagaaatcgccgccgccgaaggagccggacctgtcaacgcgatggacggcgcgctccgcagggcgttgaaacatttttacccggaactgcaagaagttcgtcttaccgactacaaagtcagggtaatagacggcaacgcggcgacagcggcgaaggttcgcgtattaatcacttcttccgacggcaaacaaagctggacgacggtaggagtttcggaagacatcatcgacgcaagccgatctgcgcttgtggattcaatagaatacaaattaattgaagatatagaacgacgctttaaagcgtatttatag

SEQ ID NO: 60032 - protein, 318 aa, Unknown
  Obtained from environmental sample
  DOMAIN (163)...(306): LeuA allosteric (dimerisation) domain
  misc_feature (1)..(318): Xaa is any amino acid
MASANTITAVLAGCRHIQGTLVGFGERCGNTSLAAVIPSLELKLGFRCLPEGKMEKISEITRIIAETANVAVPGSMPYVGSHAFTHKAGMHADGILKLSKSFEHIDPSLVGNDRHIVMSEVGGRSAIAERAKXIDASLTRDHPVTAALAQKLKNLEADGWQFEGADGSFDLLVRRELGRYKPLFNIEAYRVVSEHPTGETIACSHAWVKVHVDGQEEIAAAEGAGPVNAMDGALRRALKHFYPELQEVRLTDYKVRVIDGNAATAAKVRVLITSSDGKQSWTTVGVSEDIIDASRSALVDSIEYKLIEDIERRFKAYL

SEQ ID NO: 60033 - DNA, 342 bp, Unknown
  Obtained from environmental sample
  misc_feature (1)..(342): n is a, c, g, or t
atgaaattttcagttgcggtaatacccggagacggaatcggaccagaagttatagcgccgactctcgaagttcttgacgccgttggagacaagtacggtcatatattcaactatgtcgagcttgaagccggcggtcttgccattgatcacacgggagagccgcttccgcaagaaacgcttgaagcggcgaagcagtgcgacgcccttctcttaggcgcggtcggcggtcccaagtgggacacgctccccggacatctgcgtcccgaaagagcgttgcttggtcttcgctccgggcttggcgttttcgctaatcttcgccccgccgccctgctccctcaataa

SEQ ID NO: 60034 - protein, 113 aa, Unknown
  Obtained from environmental sample
  DOMAIN (4)...(113): Isocitrate/isopropylmalate dehydrogenase
  misc_feature (1)..(113): Xaa is any amino acid
MKFSVAVIPGDGIGPEVIAPTLEVLDAVGDKYGHIFNYVELEAGGLAIDHTGEPLPQETLEAAKQCDALLLGAVGGPKWDTLPGHLRPERALLGLRSGLGVFANLRPAALLPQ

SEQ ID NO: 60035 - DNA, 729 bp, Unknown
  Obtained from environmental sample
  misc_feature (1)..(729): n is a, c, g, or t
ttgatcgtaagggaattaacaggcgggctttacttcggcaagcgcgggcgaatcgacgaagcttcaaacgggcacagcccgggcgcggcttttgataccgaaacatattcatggatggaaattgagcgcgtgcttcgcgcgggctatgaagcggcggcggcgcggcgcaaaaaactctgcgtggtggacaaggccaatgtgcttgaatcgtcacgtttctggcgtgaagtcgcggctgttgtttcaaaagactaccctgatatagaaacaagctacctctacgttgacaacgccgccatgcagttgatacgcgccccggggcaattcgacgttattgttacgtctaaccttttcggggatattctttccgatgaggcgtcggtgcttacgggttcaatcggaatgttggcctccgcgagtctcggcgctgttgtgaaaacaggaacaaggccgggaatgtacgaacctattcacggctccgcgcctgacatcgccggaaaagacatcgcgaatccccttgcgacgattctttccgcggcgatgatgctccgctactccttcgggcttgagaaagaagcccagtccgttgaaaccgccgtcaacaatgtgctggatcaggggctgagaacaggagacatcgcaagccgtggcgtggcatctaacggcgaaaaaattgtgggtaccaaagcaatgggcgaagctgtactcaaagcattggagaaattatga

SEQ ID NO: 60036 - protein, 242 aa, Unknown
  Obtained from environmental sample
  DOMAIN (1)...(235): Isocitrate/isopropylmalate dehydrogenase
  misc_feature (1)..(242): Xaa is any amino acid
MIVRELTGGLYFGKRGRIDEASNGHSPGAAFDTETYSWMEIERVLRAGYEAAAARRKKLCVVDKANVLESSRFWREVAAVVSKDYPDIETSYLYVDNAAMQLIRAPGQFDVIVTSNLFGDILSDEASVLTGSIGMLASASLGAVVKTGTRPGMYEPIHGSAPDIAGKDIANPLATILSAAMMLRYSFGLEKEAQSVETAVNNVLDQGLRTGDIASRGVASNGEKIVGTKAMGEAVLKALEKL

SEQ ID NO: 60037 - DNA, 669 bp, Unknown
  Obtained from environmental sample
  misc_feature (1)..(669): n is a, c, g, or t
atgcgaaatcttattgaaagcattaataatgattataaaaaatactttttggccccgcttctttctgaagcatcagttcattccaatacttccggtgtttttaaagggttttataaaaataaagaaacaggtattggacaatttggcggcagtaacagtgatgcacttatcaggattaaaggtgaaattactttaccgtttccaatttttagcaatttttcctgtgatagtattgtttataatggcgattcaaatgaaattataaaaaatgcacaagaagttgatttagcttatttagacccgccttataatcaacatccttatggttcaaattatttcatgcttaatctgattttagaaaatgaatatcctgaaaatatgagtaatgtatcgggtattccgggcaattggaatcgttctgcatataataaaaaacaatttgctttaaattctctcactgagcttgtctcaaatataaaggcaaaatatgtacttatatctttcagttcggaaggatttattactcttgatgaaatgaaaaatgtgctgcaaaaaatcggtaaattggaaatattagaaacaagatataatacatttaggggtagtagaaatttaagaaacagagatatacatattaaagagtatttatatttggttgaaaaaaaatga

SEQ ID NO: 60038 - protein, 222 aa, Unknown
  Obtained from environmental sample
  misc_feature (1)..(222): Xaa is any amino acid
MRNLIESINNDYKKYFLAPLLSEASVHSNTSGVFKGFYKNKETGIGQFGGSNSDALIRIKGEITLPFPIFSNFSCDSIVYNGDSNEIIKNAQEVDLAYLDPPYNQHPYGSNYFMLNLILENEYPENMSNVSGIPGNWNRSAYNKKQFALNSLTELVSNIKAKYVLISFSSEGFITLDEMKNVLQKIGKLEILETRYNTFRGSRNLRNRDIHIKEYLYLVEKK

SEQ ID NO: 60039 - DNA, 525 bp, Unknown
  Obtained from environmental sample
  misc_feature (1)..(525): n is a, c, g, or t
ttgggctacgaagaacagcagtcggacgtgcgttggaacgttttttacgtggttttatccaccactttttgttgttttttgaacctctttacaaaatcatattttttcaatattatacgaaatatgggcattcaagcagctttaaatgatgcaatttcacctattaataattgtaaaaactcaaaattacagcagaatattgtggattttaccacttctgaaacattgtatgaagatgaaaggtatcttacagagcaaattatcacttatattggaaataaacgctctcttttacaatttatttccaaagagatacaaattgtccaaaaacgcctgaataaaaacaaactaattatttttgatgtttttagcggatcgggaattgttgcccgccattttaagcaatattctaaattgttattagttaatgatttagaaaaatattcaaagatcacaaatgaatgttatttatcaaacaaagatgaaattaatatttcttacttaaagaaaatgtataatgattaa

SEQ ID NO: 60040 - protein, 174 aa, Unknown
  Obtained from environmental sample
  misc_feature (1)..(174): Xaa is any amino acid
MGYEEQQSDVRWNVFYVVLSTTFCCFLNLFTKSYFFNIIRNMGIQAALNDAISPINNCKNSKLQQNIVDFTTSETLYEDERYLTEQIITYIGNKRSLLQFISKEIQIVQKRLNKNKLIIFDVFSGSGIVARHFKQYSKLLLVNDLEKYSKITNECYLSNKDEINISYLKKMYND

SEQ ID NO: 60041 - DNA, 873 bp, Unknown
  Obtained from environmental sample
  misc_feature (1)..(873): n is a, c, g, or t
ttggaaatatgtatgctgaatttgaatgtaaatccctgcaaaatgtgtatgcctatgggcgcgataagcgcattatggggcgtgaaaggctgtatgccaatgctgcacggttctcagggttgcgccacttacattcgccgccacatgtcaacgcattacagcgaacctatagatattgcctcttcttctttgaccgaagaaggaacggtttttggcggtgaagcgaacttgctcaaaggcttaaaaaatatgatagagctttacaatcccgaagtgattggggtatgctccacttgccttgcagaaacaattggcgaagatataggagcgattataaaaaaattttatgaacagaattcctctgtgaagattataaatgtttcttcccctgggtacggaggaacgcagaacgaaggctggtttgttgccattcgctcaattttggaacaaatggagccaaacaaacaatccaacggaaaaataaatataataacgcctatgattagccctgccgacactcgttggcttaaaagttttttaacggaaatgggaatagattacattttattgccggatatttcggagaatttagacggagcaactgagaaacattatgagcgtttaaaaacaaacggcacttcaataaaagatattgcggcaatggcgggtgcaaaacttacaattgaattttctgaatttacagacgagaaaaattcccctgccgagtatttaaaagaaacttatggagtaccctatgccaaactgccgctgcctaccggagcgagcggtatggataagtttatcagcgttttaacagaagctggcggcgttgcaagcgatgagataaaaaaagcgagagggggcgttatatag

SEQ ID NO: 60042 - protein, 290 aa, Unknown
  Obtained from environmental sample
  DOMAIN (8)...(290): Nitrogenase component 1 type Oxidoreductase
  misc_feature (1)..(290): Xaa is any amino acid
MEICMLNLNVNPCKMCMPMGAISALWGVKGCMPMLHGSQGCATYIRRHMSTHYSEPIDIASSSLTEEGTVFGGEANLLKGLKNMIELYNPEVIGVCSTCLAETIGEDIGAIIKKFYEQNSSVKIINVSSPGYGGTQNEGWFVAIRSILEQMEPNKQSNGKINIITPMISPADTRWLKSFLTEMGIDYILLPDISENLDGATEKHYERLKTNGTSIKDIAAMAGAKLTIEFSEFTDEKNSPAEYLKETYGVPYAKLPLPTGASGMDKFISVLTEAGGVASDEIKKARGGVI

SEQ ID NO: 60043 - DNA, 693 bp, Unknown
  Obtained from environmental sample
  misc_feature (1)..(693): n is a, c, g, or t
ttgatcggacgagaaattaccggagattcctcatacaaaaccttaattcaagcaccctctgcaatgctcaacattgtgcagtgcgcaggttcttctgcatatctctcggaacttatggaaacggagtttggaataccgagccttagagtgagtttttttggcattgaagatacaaccgcttctttgcttcgcgttgccgatttttttggcaaaatggaaatttccgaaaatgcgagaaagttcgcagcagagcaaacggcaaatataatgcctgttattgaaaaatacaaacctcatttggaaggcaagaaagccgcgatttttgtgggtggaggcttcaaagctatttcgcttattcgccaattcaacgaactcggcatggaagcggtggttgtcggtactcaaactggaaaaaaagaagactatgaagttatgggttcactcgtgaatagcaatgcggtgattttagacgatgcaaatcctgcggaactagaaaggtttatgaccgagaagcaggctgatattctcgttggcggcgttaaggaacgcccccttgcgtataaacttggaatggcgttttgcgaccacaaccacgaacgcaaacacccccttgccggttttgaaggaatagaaaattttgtgaaagaaattcataaatccattaacagccctgtttggaaatatgtatgctga

SEQ ID NO: 60044 - protein, 230 aa, Unknown
  Obtained from environmental sample
  DOMAIN (1)...(223): Nitrogenase component 1 type Oxidoreductase
  misc_feature (1)..(230): Xaa is any amino acid
MIGREITGDSSYKTLIQAPSAMLNIVQCAGSSAYLSELMETEFGIPSLRVSFFGIEDTTASLLRVADFFGKMEISENARKFAAEQTANIMPVIEKYKPHLEGKKAAIFVGGGFKAISLIRQFNELGMEAVVVGTQTGKKEDYEVMGSLVNSNAVILDDANPAELERFMTEKQADILVGGVKERPLAYKLGMAFCDHNHERKHPLAGFEGIENFVKEIHKSINSPVWKYVC

SEQ ID NO: 60045 - DNA, 1068 bp, Unknown
  Obtained from environmental sample
  misc_feature (1)..(1068): n is a, c, g, or t
ttgcgagaaacggatatagtttttggtggggcaaaaaaactcactgcggcaattgacgaattgatggaaaaagccgtgccttccccaaagctgatatttgtttttgccacctgcattgtgggtgttatcggtgatgatattgaagccgtgtgccgccttgcggagaaaaaatatggcattcgcgttattcctgtaaaagcccccggattttcgggaacaaaatctcaaggctacaaactcgcttgcaatgccattatgagtttaattaaaccccacgcaaagcaaccaaaacgctttggcgtgaacattctcggcgactttaacctcgcaggcgaaatgtggattatcaagggctaccttgaaaaaatcggcattcccgttatctccacaattaccggagattcctcatacaaaaccttaattcaagctccatctgcaatgctcaacattgtgcagtgcgcaggttcttctgcatatctctcggaacttatggaaacggagtttggaataccgagccttagagtgagtttttttggcattgaagatacaactgcttctttgcttcgcgttgctgatttttttggcaaaatggaaatttccgaaaatgcgagaaagtttgcggcagagcaaacggcaaatataatgcctgttattgaaaaatacaaacctcatttagaaggcaaaaaagccgcgatttttgtgggcggaggtttcaaagccatttcgcttattcgccaattcaacgaactcggcatggaagcggtggttgtcggtactcaaaccggaaaaaaagaagactatgaggttatgggtacgctcgtgaatagaaatgcggtgattttagacgatgcaaatccggcagaacttgaaaggtttatgaccgagaagcaagcggatattctcgttggcggtgttaaggaacgcccccttgcgtataaactgggaatggcattttgcgaccacaaccatgaacgcaaacaccctcttgcgggttttgagggaatagaaaattttgtgaaagaaattcataaatccattaacagccctgtttggaaatatgtatgctga

SEQ ID NO: 60046 - protein, 355 aa, Unknown
  Obtained from environmental sample
  DOMAIN (1)...(348): Nitrogenase component 1 type Oxidoreductase
  misc_feature (1)..(355): Xaa is any amino acid
MRETDIVFGGAKKLTAAIDELMEKAVPSPKLIFVFATCIVGVIGDDIEAVCRLAEKKYGIRVIPVKAPGFSGTKSQGYKLACNAIMSLIKPHAKQPKRFGVNILGDFNLAGEMWIIKGYLEKIGIPVISTITGDSSYKTLIQAPSAMLNIVQCAGSSAYLSELMETEFGIPSLRVSFFGIEDTTASLLRVADFFGKMEISENARKFAAEQTANIMPVIEKYKPHLEGKKAAIFVGGGFKAISLIRQFNELGMEAVVVGTQTGKKEDYEVMGTLVNRNAVILDDANPAELERFMTEKQADILVGGVKERPLAYKLGMAFCDHNHERKHPLAGFEGIENFVKEIHKSINSPVWKYVC

SEQ ID NO: 60047 - DNA, 1308 bp, Unknown
  Obtained from environmental sample
  misc_feature (1)..(1308): n is a, c, g, or t
atggacgaattgttaaaggccatcaggcagaaactggcggacatgaaaaaaatcgagagtacggggttcagcgaccctgcaaaggcggcggagtatttcaaggacaaggagatacttcttgaagaaatggcgcggacgcttgaaacggttacatctaaccagacttcacagattgaggcaatggataagacaatcaagagtttgcgggatgaactgaaaacgcagacgaaataccccaaagaattaacccgccgtgaattcctgttcaacctgggcaaggggattgcggcggcgtggtctggcaatcacaagacgctggcggaattggcttttacacctaatttcaaaagcgaaaactggacgaaccccaaagatgtagtattgggggagaaaggctggactgtcagcaaggctgccctgggcgatccgatgggtaacttttcgcctaacaatgaacagtatttgattaacccaatctatgagacgcagataatgaccgatgttgccaaaaaatcggtaatgatgaatttagtccggcatcgcccgatgatggggccttcaatcttccttcctacgagggacaggggcggcgttcagcttaactggctcaccgcctacgggcaaaaaatcgaaggttcaaaacccaaaggcgcggaaagggtggaattgaaagcctacacccttgccggatatatcccctggtttgacgaatttgaggaagatgtttttatcgacctcggcgcaatgttcattgacgagtttgtcgaaacttatgggcaggaatttgacagacagtgcctattggctgacaatgacccctttaccggcgcgatgatgtgtcccgatgttaccgaagtaactatcaagggaaacaccgccaatgatttgtcatggaaggattttagggacgctgtttataaaataccagccgaagaaagaaaagattgcgcgtggtttctaaatgagacggtgcttaatcatatttcaagccttgaggatactacaggccgcccgatttggcgcggtcctactgaagctatgccggggcgtttagacctgtacccctatcacgaagtttcgattttaccgcagatggccgacattaaggcgaatgaaatctttgcgatttttatgaaccccaaacggatacaacatgggaaccgccggggcattgaactgaaaaagtttgacgctacgactgaaagccttgagtacggcgaattgtttttgaggttcaggaagcgggacggttttttagtaacacgtcctaaaaacaatatgctcgttttgaaaacaaagagcaattag

SEQ ID NO: 60048 - protein, 435 aa, Unknown
  Obtained from environmental sample
  DOMAIN (152)...(432): Phage capsid family
  misc_feature (1)..(435): Xaa is any amino acid
MDELLKAIRQKLADMKKIESTGFSDPAKAAEYFKDKEILLEEMARTLETVTSNQTSQIEAMDKTIKSLRDELKTQTKYPKELTRREFLFNLGKGIAAAWSGNHKTLAELAFTPNFKSENWTNPKDVVLGEKGWTVSKAALGDPMGNFSPNNEQYLINPIYETQIMTDVAKKSVMMNLVRHRPMMGPSIFLPTRDRGGVQLNWLTAYGQKIEGSKPKGAERVELKAYTLAGYIPWFDEFEEDVFIDLGAMFIDEFVETYGQEFDRQCLLADNDPFTGAMMCPDVTEVTIKGNTANDLSWKDFRDAVYKIPAEERKDCAWFLNETVLNHISSLEDTTGRPIWRGPTEAMPGRLDLYPYHEVSILPQMADIKANEIFAIFMNPKRIQHGNRRGIELKKFDATTESLEYGELFLRFRKRDGFLVTRPKNNMLVLKTKSN

SEQ ID NO: 60049 - DNA, 564 bp, Unknown
  Obtained from environmental sample
  misc_feature (1)..(564): n is a, c, g, or t
atgccgtttaagggggtcgatattatggacgttaagaaggaatttgtcttaaaagcgctggatgagagggtcgtattcaccgaactttgccgtgagtacggaatcggcacgaaatgcgggtacaaatggaaacaaaggttccttgaggaaggatacgccggtcttgaggaacattccagaaagccgttaaccaacagccggagtatacctgagccggtaagcgtggaaatgttacggataaaaaaattacaccccgcgtggggcgcgaaaaaaatccttgaaatatacaaaagaaaccatacggggaaatacgctccggcgcggggaagcgtggaaaatctttttgtacgcgcgggctacacgggcgttcggcggagaaggaacatacgcggcggcaagataatacaaaaccgcgtcatacccacaaaaccgaacgaggtatggacagttgattttaaaggctggtggtataccaagaacagggagaaagtaaatccgcttaccatacgtgacgaattcagtaaatttatacttgcgatagacgtggtcgaaaataggcgataa

SEQ ID NO: 60050 - protein, 187 aa, Unknown
  Obtained from environmental sample
  misc_feature (1)..(187): Xaa is any amino acid
MPFKGVDIMDVKKEFVLKALDERVVFTELCREYGIGTKCGYKWKQRFLEEGYAGLEEHSRKPLTNSRSIPEPVSVEMLRIKKLHPAWGAKKILEIYKRNHTGKYAPARGSVENLFVRAGYTGVRRRRNIRGGKIIQNRVIPTKPNEVWTVDFKGWWYTKNREKVNPLTIRDEFSKFILAIDVVENRR

SEQ ID NO: 60051 - DNA, 1131 bp, Unknown
  Obtained from environmental sample
  misc_feature (1)..(1131): n is a, c, g, or t
atgaagaagtacgatgccgtctctatccgtaatgtgtgtttcgtctcccacggcggggtgggcaagaccaccctcctcgaagcggcgtgtttcaccgccaaagccacgtccaagatcggcaaggtcggcgccggtaccagcatttttgacacgcgggccgacgaaaaagcccacaaaatgacgatttctacgcacttagggttttgcgaatggagggacaagaagataaacatactcgatacgccgggttttttagactacttgggcgaggccaaagccgctctgcgggtgaccgaaacggcggtcacgctcatagacgccgttgacgggattcaggtggggacggaactcgtttcacgctacatagatgaggtgaagaccgcccgcctctttttcgtcaacagcatggacaaagagaacgccgacttcgacaaggcgctcgccgttataaaagaagcctacggaaactccgccgccccgctaaccatacccatcggcaaggggcctgactttagaggcgtgatagatctcgtgaccaaggacgcctacgagtacgctaaggagggagacggatgcggcaagaagatcgacgtcccggcggatatgcaggagtcggtcggcaagctgcgtcaggcgctaatggagtccgtggctgagacgagcgaggagctaatgaataaatactttgaggagggagagctatccgacgacgaaatccgcgccggcgtggccaagggcgtgctcgaaggctccgttttcccggtactggccggcagcggtctgctcaacataggcgtagaccagttgctcaccaaaatagtgaacctctgcccgtcggcggcgtcgcgcaccgagatcgatgtggttgagggtgaggaacggaaaacggtatccgtcaaggcaggcgacccggctactgtgtcgttcgtgttcaagactgtctccgaggagcacctaggcgaactcaacctaatccgcgtattcagcggcaaggtctccaccggacacgaactgctaaacgcgagtaaaggcacggcggagcgaatcggcaatatgtacttcctccgncggcaggagagggtcgataccgacgagatccccggcggcgacatcggcgggctgctcaactga

SEQ ID NO: 60052 - protein, 376 aa, Unknown
  Obtained from environmental sample
  DOMAIN (7)...(281): Elongation factor Tu GTP binding domain
  misc_feature (1)..(376): Xaa is any amino acid
MKKYDAVSIRNVCFVSHGGVGKTTLLEAACFTAKATSKIGKVGAGTSIFDTRADEKAHKMTISTHLGFCEWRDKKINILDTPGFLDYLGEAKAALRVTETAVTLIDAVDGIQVGTELVSRYIDEVKTARLFFVNSMDKENADFDKALAVIKEAYGNSAAPLTIPIGKGPDFRGVIDLVTKDAYEYAKEGDGCGKKIDVPADMQESVGKLRQALMESVAETSEELMNKYFEEGELSDDEIRAGVAKGVLEGSVFPVLAGSGLLNIGVDQLLTKIVNLCPSAASRTEIDVVEGEERKTVSVKAGDPATVSFVFKTVSEEHLGELNLIRVFSGKVSTGHELLNASKGTAERIGNMYFLRRQERVDTDEIPGGDIGGLLN

SEQ ID NO: 60053 - DNA, 942 bp, Unknown
  Obtained from environmental sample
  misc_feature (1)..(942): n is a, c, g, or t
gtggacaaggcggtcaaataccgcgtagcccctaccgcctacccggaaccgctcgtcagcgtcgccatcgccgccaaggtcaagggcgacgaggacaagatcgccgtcggcatcgccaagctgaacgaggaggacaagtgcttcagctacaagttccactccgacgtccaccagtccatactctccgcgatgggcgacatccagttagacattatcttagaaaacctcaaaaaccgcttcaaggtggaggtcgagcgtaagcagccgaagatatcctatagggaaacgatcacgaagtcggccaagtacgtggagtacacgcacaagaagcagacgggcggcgccggacagttcgccaaagtcgccatagatttagagcctatgccacgaggcggcggctacgagttcgttgacaaaatcgtaggcggcgtgatagaccaaccgctgcggcccagcgtcgataaaggcgtcagggcgaaattggaggaggggatcatagccggttaccccatagtagacgtgcgcgtatcgcttgtagacggcaagacgcaccccgtagactccaaagacgtggccttccagatagcgggccgcgaggtcttcaaactagctttcgagaagtcgtcgccgatattgctggaaccggtggtggaactgaaagtcaccgtgcccgtagagtacaccggcgacataatgggcgacctgtcgtcccgcagaggcaaggtaggcggcatggagcaggtgggtaaattggagacgatcaccgcgaaagtaccggaggcggagatccagtcgtactcaagcacgctgaggtcgctaacacagggccgcggcttctactccaaagtcttctcgcactacgaacaggttccacccgaccacgccaaaaaggtcatagaggcgcatcaggcggagatagcgcatcacgagaagaccgagtag

SEQ ID NO: 60054 - protein, 313 aa, Unknown
  Obtained from environmental sample
  DOMAIN (211)...(298): Elongation factor G C-terminus
  misc_feature (1)..(313): Xaa is any amino acid
MDKAVKYRVAPTAYPEPLVSVAIAAKVKGDEDKIAVGIAKLNEEDKCFSYKFHSDVHQSILSAMGDIQLDIILENLKNRFKVEVERKQPKISYRETITKSAKYVEYTHKKQTGGAGQFAKVAIDLEPMPRGGGYEFVDKIVGGVIDQPLRPSVDKGVRAKLEEGIIAGYPIVDVRVSLVDGKTHPVDSKDVAFQIAGREVFKLAFEKSSPILLEPVVELKVTVPVEYTGDIMGDLSSRRGKVGGMEQVGKLETITAKVPEAEIQSYSSTLRSLTQGRGFYSKVFSHYEQVPPDHAKKVIEAHQAEIAHHEKTE

SEQ ID NO: 60055 - DNA, 441 bp, Unknown
  Obtained from environmental sample
  misc_feature (1)..(441): n is a, c, g, or t
ttggttagcgttggtttcaatccacgcccccgcgaaggggcgactcaggcaggacgccagacggaagccagcctgccggtttcaatccacgcccccgcgaaggggcgacctggcggcgtccggcctcacggcggagcaggttgtttcaatccacgcccccgcgaaggggcgacccaactcgtactcttttccgtatgcccaaccatgtttcaatccacgcccccgcgaaggggcgaccttttgatagttatatgtcggcaatttctgataagtttcaatccacgcccccgcgaaggggcgactacaggcgctttgcgctttgacggtgtactcagagtttcaatccacgcccccgcgaaggggcgacccaggatcgccaggcgcgagacctgcaacatcggtttcaatccacgcccccgcgaaggggcgactcacaaatag

SEQ ID NO: 60056 - protein, 146 aa, Unknown
  Obtained from environmental sample
  misc_feature (1)..(146): Xaa is any amino acid
MVSVGFNPRPREGATQAGRQTEASLPVSIHAPAKGRPGGVRPHGGAGCFNPRPREGATQLVLFSVCPTMFQSTPPRRGDLLIVICRQFLISFNPRPREGATTGALRFDGVLRVSIHAPAKGRPRIARRETCNIGFNPRPREGATHK

SEQ ID NO: 60057 - DNA, 573 bp, Unknown
  Obtained from environmental sample
  misc_feature (1)..(573): n is a, c, g, or t
atgcttgcgcccatgttgcgtttcaatccacgcccccgcgaaggggcgactcgtcggcagtattggcatcagcgaccgcatgcggtttcaatccacgcccccgcgaaggggcgacgggcaatccgcagggcgtccttgccgccccgcaggtttcaatccacgcccccgcgaaggggcgacatgaacatagcaaatgcccgccagacacaactggtttcaatccacgcccccgcgaaggggcgactgcaacaggcaatcttagagactcagcgcatagagtttcaatccacgcccccgcgaaggggcgacgcttgcggcgcggctgataattggttagcgttggtttcaatccacgcccccgcgaaggggcgactcaggcaggacgccagacggaagccagcctgccggtttcaatccacgcccccgcgaaggggcgacctggcggcgtccggcctcacggcggagcaggttgtttcaatccacgcccccgcgaaggggcgacccaactcgtactcttttccgtatgcccaaccatgtttcaatccacgcccccgcgaaggggcgaccttttga

SEQ ID NO: 60058 - protein, 190 aa, Unknown
  Obtained from environmental sample
  misc_feature (1)..(190): Xaa is any amino acid
MLAPMLRFNPRPREGATRRQYWHQRPHAVSIHAPAKGRRAIRRASLPPRRFQSTPPRRGDMNIANARQTQLVSIHAPAKGRLQQAILETQRIEFQSTPPRRGDACGAADNWLALVSIHAPAKGRLRQDARRKPACRFQSTPPRRGDLAASGLTAEQVVSIHAPAKGRPNSYSFPYAQPCFNPRPREGATF

SEQ ID NO: 60059 - DNA, 513 bp, Unknown
  Obtained from environmental sample
  misc_feature (1)..(513): n is a, c, g, or t
ttgcaagctgtttcaatccacgcccccgcgaaggggcgacccacacgatccgcgtccagttccagcgcgtccaagtttcaatccacgcccccgcgaaggggcgaccaaggcggtacggtaatcaaggtctgcatcatcaggtttcaatccacgcccccgcgaaggggcgacctttccggcaagtccgatgcttgcgcccatgttgcgtttcaatccacgcccccgcgaaggggcgactcgtcggcagtattggcatcagcgaccgcatgcggtttcaatccacgcccccgcgaaggggcgacgggcaatccgcagggcgtccttgccgccccgcaggtttcaatccacgcccccgcgaaggggcgacatgaacatagcaaatgcccgccagacacaactggtttcaatccacgcccccgcgaaggggcgactgcaacaggcaatcttagagactcagcgcatagagtttcaatccacgcccccgcgaaggggcgacgcttgcggcgcggctga

SEQ ID NO: 60060 - protein, 170 aa, Unknown
  Obtained from environmental sample
  misc_feature (1)..(170): Xaa is any amino acid
MQAVSIHAPAKGRPTRSASSSSASKFQSTPPRRGDQGGTVIKVCIIRFQSTPPRRGDLSGKSDACAHVAFQSTPPRRGDSSAVLASATACGFNPRPREGATGNPQGVLAAPQVSIHAPAKGRHEHSKCPPDTTGFNPRPREGATATGNLRDSAHRVSIHAPAKGRRLRRG

SEQ ID NO: 60061 - DNA, 591 bp, Unknown
  Obtained from environmental sample
  misc_feature (1)..(591): n is a, c, g, or t
atggcaagctctgaaacgcggtcgtacactgtgtttcaatccacgcccccgcgaaggggcgacgtgctgctgttggtggcgctgctgtcggtcatgccgtttcaatccacgcccccgcgaaggggcgacctggacggcttcgtccagagcatgagcctgcgcctgtttcaatccacgcccccgcgaaggggcgacgcgaagccaagctcatcggcctgctttgcaagctgtttcaatccacgcccccgcgaaggggcgacccacacgatccgcgtccagttccagcgcgtccaagtttcaatccacgcccccgcgaaggggcgaccaaggcggtacggtaatcaaggtctgcatcatcaggtttcaatccacgcccccgcgaaggggcgacctttccggcaagtccgatgcttgcgcccatgttgcgtttcaatccacgcccccgcgaaggggcgactcgtcggcagtattggcatcagcgaccgcatgcggtttcaatccacgcccccgcgaaggggcgacgggcaatccgcagggcgtccttgccgccccgcaggtttcaatccacgcccccgcgaaggggcgacatga

SEQ ID NO: 60062 - protein, 196 aa, Unknown
  Obtained from environmental sample
  misc_feature (1)..(196): Xaa is any amino acid
MASSETRSYTVFQSTPPRRGDVLLLVALLSVMPFQSTPPRRGDLDGFVQSMSLRLFQSTPPRRGDAKPSSSACFASCFNPRPREGATHTIRVQFQRVQVSIHAPAKGRPRRYGNQGLHHQVSIHAPAKGRPFRQVRCLRPCCVSIHAPAKGRLVGSIGISDRMRFQSTPPRRGDGQSAGRPCRPAGFNPRPREGAT

SEQ ID NO: 60063 - DNA, 675 bp, Unknown
  Obtained from environmental sample
  misc_feature (1)..(675): n is a, c, g, or t
gtgatcgcggacgagacggcggccatcaaggacgatatggaccactaccgcgccaagctgacgggcaagaccgccggcatattctccggcggctcgcggtcgcaccactatcaggcgctgctgcgcgacttggggatgaagacggtaatcgccggatacgagttcgcccaccgcgacgactacgaggggcgcgacgtcatcccgaccatcaaggaagacgccgacaacaagaacatcgagagcattaccgtaaaacccgacgaaaaactctaccgcgagacctacaccgctcagcagatagccgatctcaagtcgggcgaggagggcatagagctcgacacgtacgacggcatgatcccggaaatgtgcgccggcgacgtggtggtggacgactacaaccacttcgagaccgacgctctcatcaagaccgtgaagccggacattttcctgtcgggcatcaaagacaaacactccatacagaaggcgggcgtgtcgtcgcggcagatacactcctacgactactccggcccctattccggttttcggggcgccgtgattttcgccagggacgtggcgatggccatatacacaaacgcgtggcaattagtcacgccgccgtggaagcacgaacccatgcttaccggcaaaatcgcggaggagggaaaaaatgcttga

SEQ ID NO: 60064 - protein, 224 aa, Unknown
  Obtained from environmental sample
  misc_feature (1)..(224): Xaa is any amino acid
MIADETAAIKDDMDHYRAKLTGKTAGIFSGGSRSHHYQALLRDLGMKTVIAGYEFAHRDDYEGRDVIPTIKEDADNKNIESITVKPDEKLYRETYTAQQIADLKSGEEGIELDTYDGMIPEMCAGDVVVDDYNHFETDALIKTVKPDIFLSGIKDKHSIQKAGVSSRQIHSYDYSGPYSGFRGAVIFARDVAMAIYTNAWQLVTPPWKHEPMLTGKIAEEGKNA

SEQ ID NO: 60065 - DNA, 456 bp, Unknown
  Obtained from environmental sample
  misc_feature (1)..(456): n is a, c, g, or t
gtgcgacccgacatagctcggcgtgttcgtgtgcacgacgagtttgccctccggcacctccaagtccatgatgaacgaggtcagatcgtcgccgatcgtctcggacaagcaagtggtatgcaccgctatcacgtcggggttgtacatatcgaatatgttcttcgccgacgtggtgaggttgctcttgccgccgaacaccgacgcgccctctgtaaacgacgaagaagaggctatcgccggttccttgaagtggcgcgagagcaccgtcctgtggtacgagcagcaaccttgcgagccgtggctgtgcggcatgcacttggccacgccgagcgcggcgtacatggcgcccacgggctggcaggttttgcacgggttgacgcgcagggcttcgcgcaccttcacatcctttgtcgtcatatcaagcattttttccctcctccgcgattttgccggtaa

SEQ ID NO: 60066 - protein, 151 aa, Unknown
  Obtained from environmental sample
  misc_feature (1)..(151): Xaa is any amino acid
MRPDIARRVRVHDEFALRHLQVHDERGQIVADRLGQASGMHRYHVGVVHIEYVLRRRGEVALAAEHRRALCKRRRRGYRRFLEVAREHRPVVRAATLRAVAVRHALGHAERGVHGAHGLAGFARVDAQGFAHLHILCRHIKHFFPPPRFCR

SEQ ID NO: 60067 - DNA, 705 bp, Unknown
  Obtained from environmental sample
  misc_feature (1)..(705): n is a, c, g, or t
gtgcaaaacctgccagcccgtgggcgccatgtacgccgcgctcggcgtggccaagtgcatgccgcacagccacggctcgcaaggttgctgctcgtaccacaggacggtgctctcgcgccacttcaaggaaccggcgatagcctcttcttcgtcgtttacagagggcgcgtcggtgttcggcggcaagagcaacctcaccacgtcggcgaagaacatattcgatatgtacaaccccgacgtgatagcggtgcataccacttgcttgtccgagacgatcggcgacgatctgacctcgttcatcatggacttggaggtgccggagggcaaactcgtcgtgcacacgaacacgccgagctatgtcgggtcgcacataaacggcttcttcaacatgatgatcggcttcataaactacctgtcgaagaaaaccggcacgtccaccggcaagaccgcggtcttccccggatgggtgaaccccggcgacatacgcgaactcaagcgcatagccgccatgatgaacgttcccacggtcttcttccccgatcagagcggcgtcttagacgcgcccatgaccggcaggtacgagttctaccccgaaggcggcacgacgctcgacgaaatccgcaccctcggcgacagcaacggtttgatcgcgcttggggaaatcatcggattggaacccgccgaggtgctcaacaagaagtttaa

SEQ ID NO: 60068 - protein, 234 aa, Unknown
  Obtained from environmental sample
  misc_feature (1)..(234): Xaa is any amino acid
MQNLPARGRHVRRARRGQVHAAQPRLARLLLVPQDGALAPLQGTGDSLFFVVYRGRVGVRRQEQPHHVGEEHIRYVQPRRDSGAYHLLVRDDRRRSDLVHHGLGGAGGQTRRAHEHAELCRVAHKRLLQHDDRLHKLPVEENRHVHRQDRGLPRMGEPRRHTRTQAHSRHDERSHGLLPRSERRLRRAHDRQVRVLPRRRHDARRNPHPRRQQRFDRAWGNHRIGTRRGAQQEV

SEQ ID NO: 60069 - DNA, 1725 bp, Unknown
  Obtained from environmental sample
  misc_feature (1)..(1725): n is a, c, g, or t
atgaaaacattgtggcgtatagcgaaagaagctgtcagatataagtggtggctgttgctgtcaattttcggcacgcttatgctgacggcggtcaacctgattgccccaagaataatggcgggtatgacgggactcgtggcggctggtataacgcaggaaagtttaatcactgtactgtggatggcgggcggattgttgggactgtaccttatacgaatcctgttccgctttttatcaaattattgttcgcatagagcggcgtggcggcttgtgcttgaactgcggataaaagtttataacgcaattcaatctttttccatggattattttcacaacaaacagacaggcgaactgttgagccgcgtaatgaacgatgtcgctacatttgaattgatatacgcccacatcactcccgatattattacaaattttgttaccctcgcgggcgtaacaattattctttttaatttaaacgcccatcttgcgcttatcacctgtattcccattccgttcattctgttgtcggggtggtttttcagccgcaaagtgcgccccaactttcagaaaacgcaaaaatcgcagggggaattatccgcgcagttacaggataatttatcgggcattcaggaaatacaggctttcgggcggcaaacttacgcgacggaaaaagttttaaagaaaggcaaggattttacaaataatatgctccgcgccttgaagctaagcgccatatttcatccaagcgtggaatttttaacttccattggcagtgtcattgtcgtaggcttcggcggatttttggcgtataaaaatcagctttccgtttccgagattgtcggttttcttctttacctcgctcttttttacgcgccgattacaggcatcgcccagcttttggaatccgcccagcaatcgcttgccggagcggagcgggttatcgaaattttagacgcgccgaaaagcgtcaaagacagccccacggcaaaatcaatcggaaaagcgaaaggacaaattacttttgagaacgtcagtttttcctacattcaaggcgttcctgtaattgacggcatatcatttaacattaaacccgggcaaatggcggcgctggtaggagcgacaggcgtgggaaaaaccacgttaagcaaacttatatcgagattttatgatccgacaggcggaagggtatgccttgacgggcacgatttgcgggacataactttggaaagcctgaggagcaacatctctttggttttgcaggacacatttttatttaacggaactatcgaagaaaatatcgcgttcgccagacctgaagcttcctttgaagaagtcaaaacggcggcgcagactgcgaggatacatgacgacataatgcaaatgcccgaagcgtatcagacgcagataggggagcgcggcgttaagttatcaggcggacaaaagcagcgcatagcgatagcaagagcggtactatgccaagctccggtgctgattcttgacgaagcgaccgcctctgttgacgtacacaccgaagagcagatacagcaggcgatcaatgaaatagccggaagccgcacaatcgtaaccatcgcgcacaggctttccaccattcgcaacgcggatgtcatttatgtttttgaaaaagggcggattatacaatcgggcagtcatgacgaattgattgaacaggaagggctttaccggagtttgtgcaggacggggaaatga

SEQ ID NO: 60070 - protein, 574 aa, Unknown
  Obtained from environmental sample
  DOMAIN (18)...(292): ABC transporter transmembrane region
  misc_feature (1)..(574): Xaa is any amino acid
MKTLWRIAKEAVRYKWWLLLSIFGTLMLTAVNLIAPRIMAGMTGLVAAGITQESLITVLWMAGGLLGLYLIRILFRFLSNYCSHRAAWRLVLELRIKVYNAIQSFSMDYFHNKQTGELLSRVMNDVATFELIYAHITPDIITNFVTLAGVTIILFNLNAHLALITCIPIPFILLSGWFFSRKVRPNFQKTQKSQGELSAQLQDNLSGIQEIQAFGRQTYATEKVLKKGKDFTNNMLRALKLSAIFHPSVEFLTSIGSVIVVGFGGFLAYKNQLSVSEIVGFLLYLALFYAPITGIAQLLESAQQSLAGAERVIEILDAPKSVKDSPTAKSIGKAKGQITFENVSFSYIQGVPVIDGISFNIKPGQMAALVGATGVGKTTLSKLISRFYDPTGGRVCLDGHDLRDITLESLRSNISLVLQDTFLFNGTIEENIAFARPEASFEEVKTAAQTARIHDDIMQMPEAYQTQIGERGVKLSGGQKQRIAIARAVLCQAPVLILDEATASVDVHTEEQIQQAINEIAGSRTIVTIAHRLSTIRNADVIYVFEKGRIIQSGSHDELIEQEGLYRSLCRTGK

SEQ ID NO: 60071 - DNA, 528 bp, Unknown
  Obtained from environmental sample
  misc_feature (1)..(528): n is a, c, g, or t
gtggaagaatggcgtgaatactattttaagaacgtcaaaaccaaagaacatatcgaagaattggggcgaaaactctacataaaaattacagaacttattcaacgagaagttagcgaagtaacagaacaggattgtattgattacatgatacagctggttattgaccgtacatttgacggttacatgaccgagattcaaactatttatggacaattagaacatattttaggcgttaaaatcgaacccgcgcccgatgaatgggatagattgttcaatattgatttctttataaccgttaatggaaaatacatcggtttgcagataaaacccattaactctggaatacagttgccggaaattcacaaagagtacgcaatacaagccaagacccacgaaaaatttacggcaaaattcggcggaaaggttttctatatcttttcagaaaaggtaaacggcaaaaaggaaattgtgaatactagcgtaattgcggaaattcaaagtgaaatggaaagattacgctatttttaa

SEQ ID NO: 60072 - protein, 175 aa, Unknown
  Obtained from environmental sample
  misc_feature (1)..(175): Xaa is any amino acid
MEEWREYYFKNVKTKEHIEELGRKLYIKITELIQREVSEVTEQDCIDYMIQLVIDRTFDGYMTEIQTIYGQLEHILGVKIEPAPDEWDRLFNIDFFITVNGKYIGLQIKPINSGIQLPEIHKEYAIQAKTHEKFTAKFGGKVFYIFSEKVNGKKEIVNTSVIAEIQSEMERLRYF

SEQ ID NO: 60073 - DNA, 906 bp, Unknown
  Obtained from environmental sample
  misc_feature (1)..(906): n is a, c, g, or t
ttgcgtcgccggcagaccatgatttatattactgccaaaggatcaaccataatgcgcaaactcatactgactacggcggcggtcgcggcggcgattggattggcgggatgctctaagacaccgacaccgaagtccgtctccgcgacgcctgatacggcggccctatcggtcgatacgccgcccgccgacgcttccgctttttccgaaacggcggtcggcgggcaaagttttgaaatggcgttcgtggcgggcgggacgtttacgatggggtgcgccgccgaacaggacagcgattgcgatggctacgaacgtccggcgcattccgtgacgctgagcgattactacatagggaaacgcgaggtgacgcaggggctgtggaaagcggtgatgggcgccgataataatccgtcgtattttaaagggagcgataatttgcccgttgaaaacgtcagttggaatgaggtcaacgcgtttatagacagtttgaatagaaagaccggcaggatgtatagattgccgacggaggcggagtgggagtatgcggcgcgcggggggaataagagcggagggtacaaatattcaggtagtaatacgttggatagcgttgcttggtattgggataatagcggtcgtgaaactcatgaggcaggtacgaaagcgccgaatgaacttggtatctatgacatgagcggcaacgtgtgggagtggacgggcgataggtatggagattacggttcggatgcgcagactaatcctatagggccgtcaacgggctctttccgcgtgaatcggggcggtagttggaactacgacgggaggaattgccgtgtctcttatcgctactacgaccctcctgacttcagcagcagcagcataggcttccgcccttgtgtgttgtccccctag

SEQ ID NO: 60074 - protein, 301 aa, Unknown
  Obtained from environmental sample
  DOMAIN (75)...(299): Domain of unknown function (DUF323)
  misc_feature (1)..(301): Xaa is any amino acid
MRRRQTMIYITAKGSTIMRKLILTTAAVAAAIGLAGCSKTPTPKSVSATPDTAALSVDTPPADASAFSETAVGGQSFEMAFVAGGTFTMGCAAEQDSDCDGYERPAHSVTLSDYYIGKREVTQGLWKAVMGADNNPSYFKGSDNLPVENVSWNEVNAFIDSLNRKTGRMYRLPTEAEWEYAARGGNKSGGYKYSGSNTLDSVAWYWDNSGRETHEAGTKAPNELGIYDMSGNVWEWTGDRYGDYGSDAQTNPIGPSTGSFRVNRGGSWNYDGRNCRVSYRYYDPPDFSSSSIGFRPCVLSP

SEQ ID NO: 60075 - DNA, 618 bp, Unknown
  Obtained from environmental sample
  misc_feature (1)..(618): n is a, c, g, or t
atgagcaagtttatgacggtattggcggcgacggcgatgtttgcggctgtgttggttggtacggcggcggcgcaacaggcagggacattcaccgacaacagggacgggcagacgtacaagacggtgaagattgggcaacagacttggatggcgcagaatctcaattataaatcgaaaagttggtcttcttgctacgacaataacgaaaccaactgcaagaaatacggcagactgtacgactgggagacagcgaaaacagtttgccctgtcggatggaagttaccggacacgtcggattggaaaaagttggtaacggctgtgggcggaaaagaaactgtgggtaagaaattgaaagcggcaaacggttggaatgacggcgaggacggcaaaaacggcaacggaacgaatgatttcggtttttccgccttgcccggcggctaccggatgccgcttggcgatttcgacaatatcggcgacaacggctactggtggttggcttcggaactcgataacggttacgcctatgtcgagttcgctgattacattaaaggtgcgtacagtgtcatggccagccaagaacttggcttatccgtccgttgcgtcgccggcagaccatga

SEQ ID NO: 60076 - protein, 205 aa, Unknown
  Obtained from environmental sample
  SIGNAL (1)...(24)
  misc_feature (1)..(205): Xaa is any amino acid
MSKFMTVLAATAMFAAVLVGTAAAQQAGTFTDNRDGQTYKTVKIGQQTWMAQNLNYKSKSWSSCYDNNETNCKKYGRLYDWETAKTVCPVGWKLPDTSDWKKLVTAVGGKETVGKKLKAANGWNDGEDGKNGNGTNDFGFSALPGGYRMPLGDFDNIGDNGYWWLASELDNGYAYVEFADYIKGAYSVMASQELGLSVRCVAGRP

SEQ ID NO: 60077 - DNA, 387 bp, Unknown
  Obtained from environmental sample
  misc_feature (1)..(387): n is a, c, g, or t
atggatcgttacctgctggacacacacacggctatctggtatttcaacggcgacaaagctctttccgaaaccgccagaaaaataattcttgatctttccaaccagatacatctgagtataatttccgtctgggagcttgcgattaagaccagtctggggaaactggaatttaacgggaaagctgcccgtttcgttcattttgcggaaacatacgattttatcattctccctattaaaaccgatcaccttaccgcccttgaaaaactgcctttgcttcaccgtgatccttttgaccgccttcttgtcgcaaccgccatttccgaacaaatgactttcatcagcaccgacaagaatgtcgcgcaatacgatgttcctctgatttggtaa

SEQ ID NO: 60078 - protein, 128 aa, Unknown
  Obtained from environmental sample
  DOMAIN (4)...(124): PIN domain
  misc_feature (1)..(128): Xaa is any amino acid
MDRYLLDTHTAIWYFNGDKALSETARKIILDLSNQIHLSIISVWELAIKTSLGKLEFNGKAARFVHFAETYDFIILPIKTDHLTALEKLPLLHRDPFDRLLVATAISEQMTFISTDKNVAQYDVPLIW

SEQ ID NO: 60079 - DNA, 624 bp, Unknown
  Obtained from environmental sample
  misc_feature (1)..(624): n is a, c, g, or t
atgctaattaaagtagcattaacgacacttaaagtagcatcgataacaccgattttcttttgttcccatgtattatttttcactatgagaaaggcaattattgttctttttgctttattagtctgcacggggctttacgcccagacgacctacaagataggggacaccggccctgccggaggcatcgtgttttacgacaagggctttgcctcggacggctggcgttacctggaggccgcgcccgccgggacggaattcaccgccgattggggatggtatgaaacgaatgtcgccggaaccgggacggagatcggaagcggcaggcggaacacccggcttatcgtcgcggctttgggggcaaacgaaagcgcggcgcggctatgcgccagcctgaatgtcaacgagtacgcggactggtttttgcccggcatcgacgagctggatttgatttacaaaaacctgaagcagaacgggcttggcggctttaaggacggattttattggtcttcgtcgcaggactcaggcaactactccctcgcattgagcaggtctttcagcgacggcaaacagtacatgggctacaaggactacgccaacaacgtgcgggcagtgagggcgttctaa

SEQ ID NO: 60080 - protein, 207 aa, Unknown
  Obtained from environmental sample
  misc_feature (1)..(207): Xaa is any amino acid
MLIKVALTTLKVASITPIFFCSHVLFFTMRKAIIVLFALLVCTGLYAQTTYKIGDTGPAGGIVFYDKGFASDGWRYLEAAPAGTEFTADWGWYETNVAGTGTEIGSGRRNTRLIVAALGANESAARLCASLNVNEYADWFLPGIDELDLIYKNLKQNGLGGFKDGFYWSSSQDSGNYSLALSRSFSDGKQYMGYKDYANNVRAVRAF

SEQ ID NO: 60081 - DNA, 618 bp, Unknown
  Obtained from environmental sample
  misc_feature (1)..(618): n is a, c, g, or t
atgataaaaattcttattgcggaagaccaaaccatgctgcgcgaatcgctggaacaggttatcggcctgcagaacgacatggaagtcgcggggacaacggacgatgccgcaaaaacaccggaactgtgccggcagctacaggttgacctcgtgcttatggacgtggtaacgaaaaacagctcgtcgggcattacctacgcggcgcaaatatgcaaggaattccccgacataaaaattgtgataatgacatccctgcctgaaataacttttaccgaagaagcgcggaaagccggagcgcacagttttgtttacaaggacatgggcaacgagcatttgtttcatgttatacgcaacaccatgaaaggctacggtatctattccgaccgtctggacagcctgccttttgnccgcaggtttacggaanatgaaataaccgtaatccggctcgtatgcaacggcatggagagggacgaaatggcggcaaagcttggcgtgtcggagtcgatgatcggaaggcacattacctcaatattggacaaaacgggctttgacagcatttcaaaattcgccatctatgcggtaagcgaagggctgataaagccggatcctatcatctaa

SEQ ID NO: 60082 - protein, 205 aa, Unknown
  Obtained from environmental sample
  DOMAIN (136)...(193): Bacterial regulatory proteins, luxR family
  misc_feature (1)..(205): Xaa is any amino acid
MIKILIAEDQTMLRESLEQVIGLQNDMEVAGTTDDAAKTPELCRQLQVDLVLMDVVTKNSSSGITYAAQICKEFPDIKIVIMTSLPEITFTEEARKAGAHSFVYKDMGNEHLFHVIRNTMKGYGIYSDRLDSLPFXRRFTEXEITVIRLVCNGMERDEMAAKLGVSESMIGRHITSILDKTGFDSISKFAIYAVSEGLIKPDPII

SEQ ID NO: 60083 - DNA, 1149 bp, Unknown
  Obtained from environmental sample
  misc_feature (1)..(1149): n is a, c, g, or t
atgacagattggccgagaagacacggggagcgcgatgtcgcccttaggtttgacttgacagtccccttcgcgcgttttacggcaatgcacagcgcggaactcaccttccccttcaagcgttaccacataggaaaagtttggcggggcgaaaacacgcagcgcggacgctaccgcgaatttatgcagtgcgattttgacatcatcggaagcgacagtcccgcggctgattttgaaattatccttttaatccataccgccatgaaaaatctcggcgttgacgttaccattcatgtaaaccaccgcggccttttcaaccgctttttatcgcacatagggcaaagcgaaaaatccgtcgaagttctccgcgcggtagacaaactcggcaaggtgggagaagacgaaactcttaaaagccttacggaacttgcaggcgttgcgaacgcgaataaaataatcgagtatataaacgcgaaaggcggtttccctcaagtgcttgaccgtctaacggaattgtccggcggcagttgtccagaatccgaacggctggctacccttcgtcaatttatggcggattctcttaacggctttaaagccgacggctctaaagccgacggttcttcaaacgaaccttttgttctcaacccctcgattacccgcggcctggattactacaccggagtagtttttgaaaccttcctgaacgatttgcccgacataggctccgtctgttccggcggccgttacgacaacctcgccggtctgtactcaaaagataaaaactctatcagcggcgtaggcgcgtccataggccttgaccgcctgattgccggtcttgagagccttaacaaactgcccgcagagaactggtgccgcgcggccattgcctgcgtagatattgaaaaatccggacagtatcaggcgtttgccggaagactgcgccaatcgggaatcccctgcgaggtatttacggaaggcggcggcgaaaaacagcttgtaaaacaatatgtgcttgccgagaaaaaaggcctgcgttatgtgataataccgggaaaagatatattgaacgataccgttacattacgcgatatcacaacacgccagaaccatgaattatctattgaagagttgatcgagatattgaagcggtaa

SEQ ID NO: 60084 - protein, 382 aa, Unknown
  Obtained from environmental sample
  DOMAIN (291)...(382): Anticodon binding domain
  misc_feature (1)..(382): Xaa is any amino acid
MTDWPRRHGERDVALRFDLTVPFARFTAMHSAELTFPFKRYHIGKVWRGENTQRGRYREFMQCDFDIIGSDSPAADFEIILLIHTAMKNLGVDVTIHVNHRGLFNRFLSHIGQSEKSVEVLRAVDKLGKVGEDETLKSLTELAGVANANKIIEYINAKGGFPQVLDRLTELSGGSCPESERLATLRQFMADSLNGFKADGSKADGSSNEPFVLNPSITRGLDYYTGVVFETFLNDLPDIGSVCSGGRYDNLAGLYSKDKNSISGVGASIGLDRLIAGLESLNKLPAENWCRAAIACVDIEKSGQYQAFAGRLRQSGIPCEVFTEGGGEKQLVKQYVLAEKKGLRYVIIPGKDILNDTVTLRDITTRQNHELSIEELIEILKR

SEQ ID NO: 60085 - DNA, 762 bp, Unknown
  Obtained from environmental sample
  misc_feature (1)..(762): n is a, c, g, or t
ttggagaaaattatggataaacaataccacattgattttgacggaagccacggcgcgttatacgcaattctcccaggtgatcccggcagggtggaaaaaatcgcctcatttcttgaaaaaccgcgcttttatcatcaaaaccgcgaatacacgacatggttaggcgaattatccggcaagaccgtgatggtaatatcgaccggcatgggagggccttccaccgcgatagccattgaagagctttacaagacgggagtgcgcaactttatcaggatcggcacctgcggcggaatggctcttgacgtgttgggcggggacattgttatcgctacaggcgcaatccgcatggaagggacaacaaaggaatatgtgcctgttgaatttcccgctgtcgccaatcttgatattacaaacgcgcttgtagaagccgcgaaaaacttaaaacaaaaatggcacgcgggcattgtgcaatgcaaagattccttctacggccagcacgaccccgagcgcatgccgtccggttacgagttacaggaaaaatgggaagcgtggaaaaaagccggctgtcttgcctcagaaatggaaagctccacgcttttcatagtaagccagatactgggcgcgcgcgccggctgcgtactaaacgtggtctggaatcaggagcgcgaaaaagccggcatgagcaacccccactgtcacgacaccgaagccgcgataaagacagccgtggaagcggtgaggcttttgattcagaaaggataa

SEQ ID NO: 60086 - protein, 253 aa, Unknown
  Obtained from environmental sample
  DOMAIN (20)...(246): Phosphorylase family
  misc_feature (1)..(253): Xaa is any amino acid
MEKIMDKQYHIDFDGSHGALYAILPGDPGRVEKIASFLEKPRFYHQNREYTTWLGELSGKTVMVISTGMGGPSTAIAIEELYKTGVRNFIRIGTCGGMALDVLGGDIVIATGAIRMEGTTKEYVPVEFPAVANLDITNALVEAAKNLKQKWHAGIVQCKDSFYGQHDPERMPSGYELQEKWEAWKKAGCLASEMESSTLFIVSQILGARAGCVLNVVWNQEREKAGMSNPHCHDTEAAIKTAVEAVRLLIQKG

SEQ ID NO: 60087 - DNA, 1266 bp, Unknown
  Obtained from environmental sample
  misc_feature (1)..(1266): n is a, c, g, or t
atggattacattattgagatgaatgggattaccaaggttttcccgggtatcatcgcaaacgatgatgttactcttcagcttaaaaagagtgaaatacacgctctgttaggtgaaaacggagccggcaagtctacgcttatgagtatccttttcggtttgtatcaggccgaaaagggtacgattttaaaacagggtcagcctgttcagattaacggaccgaatgacgccacaaaactcggtatcggaatggttcatcagcattttaaactggtgcataattttaccgttcttgaaaacattattctcggcgcggaaacagttaaatacggtatgttaaaactggataatgcccgaagacaggtaattgaattatcaaaacgttacaaactggaaatcgatcctgacgccctaatctgcgacattactgtcggaatgcagcaacgggtagaaatccttaaaatgctttaccgcgaaaacgagattttaatctttgatgagcctaccgcggttcttacccctcaggaaattgaggagttaatgaacataatgaaaaatcttgcggcggaaggcaagtcaattttgttcattactcataaactggacgagatcaaagcggtcgcggggcgctgtaccgttctgcgcaaaggcaaatccacgggaacggttgatgtcgcgtccgtttccaaagaagaactttccgaaatgatggtaggcagaaaggtaaatcttatggttgaaaaaaccgacaaaaaaccgggagacgttattctaaaggcggagaatctaaccgttaccggcaatacttcaggtataccccttgttaacaatgcgagttttgagttgcgggagggcgagattgtatgtattgccggaattgacgggaacggtcagcaggaacttgtatacgctcttgccggcatgatgggaattgataccgggcgtattgtgtatgacggaaaggaaatttcacataacgatataaggtcgaggggactggctcatattcccgaagacaggcagaaacacgggcttgtgctggattacaatatagcctacaaccttattttgcagaattatttttccgcgcgatttcaggaaaaaggttttttaagatttgacgaaattcataaatttgcggaaaacttaataaataatttcgacattcgctgcggtcatggatcgcgcactgttacgcgcggaatgtccggcggcaaccagcaaaaggtaatgtcgccagggaaatatcaagggatccccgcctgttaa

SEQ ID NO: 60088 - protein, 421 aa, Unknown
  Obtained from environmental sample
  DOMAIN (30)...(216): ABC transporter
  misc_feature (1)..(421): Xaa is any amino acid
MDYIIEMNGITKVFPGIIANDDVTLQLKKSEIHALLGENGAGKSTLMSILFGLYQAEKGTILKQGQPVQINGPNDATKLGIGMVHQHFKLVHNFTVLENIILGAETVKYGMLKLDNARRQVIELSKRYKLEIDPDALICDITVGMQQRVEILKMLYRENEILIFDEPTAVLTPQEIEELMNIMKNLAAEGKSILFITHKLDEIKAVAGRCTVLRKGKSTGTVDVASVSKEELSEMMVGRKVNLMVEKTDKKPGDVILKAENLTVTGNTSGIPLVNNASFELREGEIVCIAGIDGNGQQELVYALAGMMGIDTGRIVYDGKEISHNDIRSRGLAHIPEDRQKHGLVLDYNIAYNLILQNYFSARFQEKGFLRFDEIHKFAENLINNFDIRCGHGSRTVTRGMSGGNQQKVMSPGKYQGIPAC

SEQ ID NO: 60089 - DNA, 630 bp, Unknown
  Obtained from environmental sample
  misc_feature (1)..(630): n is a, c, g, or t
ttgacagatgatatgaaatcctatattattgcaaataagaattctatgattaatgatttacctacatatttaactcgatactatgtatcaggagaaaacccttttacttctcttaatgatttaccattagatcaagccaataggataaagaagctacattgtttaagaaacagtatcggtgatttctatgccgaagatgaatatttgattcaacgtttagagatagaaaaatggatttacaatcagcttttattaaaaggagggattcctactaatactgctccaatatatatgtgtctaggcgattcaccgagaagcaaatatgatataagagctgatattcaaaaaaatgccgcagaaataaagatacctttatccgaattggatttaaagaccattacatttacatacccagatagcatgtacaaatttatttttgatggaagtaataaaataattggaggagaaagaactaatactccggcagtgtatttttataatgaattggaaacggtaatcagaaactataaagacggaagtgaaaaaaaggaagaccattatattgaagctcaagtatggaatagagaacaacttcataaatatttatcaaaagtttatgcgacgtactga

SEQ ID NO: 60090 - protein, 209 aa, Unknown
  Obtained from environmental sample
  misc_feature (1)..(209): Xaa is any amino acid
MTDDMKSYIIANKNSMINDLPTYLTRYYVSGENPFTSLNDLPLDQANRIKKLHCLRNSIGDFYAEDEYLIQRLEIEKWIYNQLLLKGGIPTNTAPIYMCLGDSPRSKYDIRADIQKNAAEIKIPLSELDLKTITFTYPDSMYKFIFDGSNKIIGGERTNTPAVYFYNELETVIRNYKDGSEKKEDHYIEAQVWNREQLHKYLSKVYATY

SEQ ID NO: 60091 - DNA, 438 bp, Unknown
  Obtained from environmental sample
  misc_feature (1)..(438): n is a, c, g, or t
atgaacctcaaaaacgacaaaataaagtgtgttacaagcttatttactatcttttttgaagaccccttttgggttggcatattggaagaaaattataatggtataaattatatgggcaaacatatatttggcgcagaaccgtctaattctgaattattgcaattttatattaataaatttgaaaatattaaaaaatataaaattggagaaacagatatagaaacaaaaaattttaattttaaaaaatcaataagaaaatcaaagaaagcacaaaataaaataggtgtaggaacgaaatcacaaaatctatttaaaagtgcatttgaggaaactatgaacataaaaaaagaaaaaaggaaaattattgccaaattaaataaagaaggaaaatatataaagaacaggggtaaaaaaatcgagaaaaggaaaggacattaa

SEQ ID NO: 60092 - protein, 145 aa, Unknown
  Obtained from environmental sample
  misc_feature (1)..(145): Xaa is any amino acid
MNLKNDKIKCVTSLFTIFFEDPFWVGILEENYNGINYMGKHIFGAEPSNSELLQFYINKFENIKKYKIGETDIETKNFNFKKSIRKSKKAQNKIGVGTKSQNLFKSAFEETMNIKKEKRKIIAKLNKEGKYIKNRGKKIEKRKGH

SEQ ID NO: 60093 - DNA, 426 bp, Unknown
  Obtained from environmental sample
  misc_feature (1)..(426): n is a, c, g, or t
atgattgaaataaaagaatgtacgaaaaatgatattaaattattggcaaaaatgaataaacaattaattgaagatgaaaaagcaaataatttaatggatattactcaattagaaaatagaataaatgattttttgaataatggatataaggcttttttctttattattgaagaaaaaataatagggtatgctttatgtgacatgacaaaagaaccagaatatttaaggcaattttttattaatagggaagaaagaagaaaacattatggaaaaaatgcatttcataaattattggaaaaattggaaacaaaagaaatagaaattgatgtattaaaatggaatgaggctggaataaaattttgggaaaaaataggttttgaagaacaatggaaaagaatgaaatataaaataatagatgaacaataa

SEQ ID NO: 60094 - protein, 141 aa, Unknown
  Obtained from environmental sample
  DOMAIN (52)...(127): Acetyltransferase (GNAT) family
  misc_feature (1)..(141): Xaa is any amino acid
MIEIKECTKNDIKLLAKMNKQLIEDEKANNLMDITQLENRINDFLNNGYKAFFFIIEEKIIGYALCDMTKEPEYLRQFFINREERRKHYGKNAFHKLLEKLETKEIEIDVLKWNEAGIKFWEKIGFEEQWKRMKYKIIDEQ

SEQ ID NO: 60095 - DNA, 2046 bp, Unknown
  Obtained from environmental sample
  misc_feature (1)..(2046): n is a, c, g, or t
ttgttttaccgggaccaaataatcaatgtaagcgaaaccgacttgcgtttcacggaaaacgagctcagccggtatttccgccgggtcggcgtttcatttcaaccggacagtctgcgcgagattatgcaggataccgaaggctgggctttcgcgatcaaccttatcgcgcggtcgtcccaaaaagcgcccggctacggcggctatgtgcgtaacgcgatgaagcagaatatcttccggcttctggaaacggaaatatgggacgggttcccggaacaaatgaagaattttctggttcgtctgtctctcattgatcatctgtctgttgacttgattacggaacttgccgccgggaacaaaagtttgatttccggaatggagaagcaaagcgcgtatatccggctggacagttatataaacgcgtacctcattcatcccctgtttcttgaatttctgactacaaagcaaacattgcttacggaagaacaaaaacgtgaaacctatataatcgccggaaactggtgcgagaggaacggcttcaggattgacgcgctttcatattatgaaaagatacgggactatcaagcaataataaacatgttttttaatttacctcttcaggtgcctctggatttttcacgcagcgcgggagcaatactcgaccacgcgctgcctgaagaattttacaaggtggaatttttcgcggaaatgcacctgcgtacctatatgtgccaggggccgctgcaaaaatcgctcgagctggtgaaatactatgaatccaaattccttgagctgccggatgataaccccacaaaaaaacgcacgctggcgtggctctatatcagctggacctttatacgcggcttaatgagcctgaccgatgatgtttatgacgctgaaatataccttaagaaagccgctgaatgtgtttctacatccatcgaccccggaaaattaagcccgcattgcccggcggtgtggatcatttgcgtcggttcttcaagaaaaggcgctttggaagaatatatcgatgctataacccgcggcgagaaatatctgtcgcacactaaccttcgcagtttcatggccggtaagagtgaattggcgcggggagtcctggagttttaccggggcgacatgggcaaggcggaaacttttaccgccctcgcgttgaagaaggcgcgggagaacaaacaattcgggcttgtacaccgggcgctgttctattctatgcgtatcgccgcggcgcaggggaatttcgcccgggcggaacaggcgcttaaagagacaaaagcccaactggatgaaactgaataccttagccgttttatggattacgatatttccctttcctggtttttctgctttctcgatatgccggaaaagacatctgagtggcttcaggaagatttctcatggtacagccatgccggttttaatgaaaatttctggaattttataaaggcgcggttttattttgccacaaggaattttgccccgcttctggcgcatatagaggaaatgaaagcgagggaatcatttttatacgaacggatagaactgctggttatggaggcctgtatacattacaaactgaaggacaaagaaaaagcctttgccgcgctgcgggccgcgtatacggacgcgctgtcaaacagtatcgtaatgccctttattgaaatgggcaaggatatgcgtaccctgacgagcgccgcgctcaaggagccgggcggaaaaataccaaaatcgtggctgaaagatatcaaccgtaaatccgcctcttatgcaaaacaccgtacccatattatttcgaaatataaaaaggcccacggcctggctaatgacatcgtcttttccccgcgagagaacgaagtcctcaccgatctttcccatggtctttcgcgtcccgaaatcgccaaaaaccgcggcctttcggtcaacaccgtaaagatggtgatcaatacgctgtacacaaaggcgggcgccgagaatatggcagaccttatccgcatcgcggtagagcaaaatctgataagaaatagcgcatga

SEQ ID NO: 60096 - protein, 681 aa, Unknown
  Obtained from environmental sample
  DOMAIN (614)...(671): Bacterial regulatory proteins, luxR family
  misc_feature (1)..(681): Xaa is any amino acid
MFYRDQIINVSETDLRFTENELSRYFRRVGVSFQPDSLREIMQDTEGWAFAINLIARSSQKAPGYGGYVRNAMKQNIFRLLETEIWDGFPEQMKNFLVRLSLIDHLSVDLITELAAGNKSLISGMEKQSAYIRLDSYINAYLIHPLFLEFLTTKQTLLTEEQKRETYIIAGNWCERNGFRIDALSYYEKIRDYQAIINMFFNLPLQVPLDFSRSAGAILDHALPEEFYKVEFFAEMHLRTYMCQGPLQKSLELVKYYESKFLELPDDNPTKKRTLAWLYISWTFIRGLMSLTDDVYDAEIYLKKAAECVSTSIDPGKLSPHCPAVWIICVGSSRKGALEEYIDAITRGEKYLSHTNLRSFMAGKSELARGVLEFYRGDMGKAETFTALALKKARENKQFGLVHRALFYSMRIAAAQGNFARAEQALKETKAQLDETEYLSRFMDYDISLSWFFCFLDMPEKTSEWLQEDFSWYSHAGFNENFWNFIKARFYFATRNFAPLLAHIEEMKARESFLYERIELLVMEACIHYKLKDKEKAFAALRAAYTDALSNSIVMPFIEMGKDMRTLTSAALKEPGGKIPKSWLKDINRKSASYAKHRTHIISKYKKAHGLANDIVFSPRENEVLTDLSHGLSRPEIAKNRGLSVNTVKMVINTLYTKAGAENMADLIRIAVEQNLIRNSA

SEQ ID NO: 60097 - DNA, 1677 bp, Unknown
  Obtained from environmental sample
  misc_feature (1)..(1677): n is a, c, g, or t
gtgatcctggacgcgcttatggctataaacctggttatttcgctcctggtgcttttgattgtccttgacaacaggcgtcccacggattttagcctctttcctacaatccttctggtggtgacaatttttggcctggcgctgaacatatcttccaccaggctaatccttacccaggggacgcgctttgacggccgcatgataaaggcgttcgcgacctttgtcgtaggctccagcggcacagtcggccttgtgtccggttttgtaatcttcatcgcgattatcgcggttcaaaagatggttattaccaagggagctaccaggatctctgaagtcgccgcccgctttatgctggacagtctgccgggcaagcagatggccattgacgccgagtacagctccggcgcgattgatcaaaaagaggccgcttcaaaaaaagacgcgcttcaaaaagaatccgatttttacggcgcgatggacggagcgagcaagtttatctcgggaaacgtcaccttctcgatctttattatcgtggttgacgttttggggggcttcatcatcggggctttccttcagggcgaatcccttacggcggcccttgcgacctatacttcgctttcgataggcgacgggcttctttcgcagcttccagcccttcttatctccgccgccatgggcattgtggtaacccgcgccgccgctcccggcgaccttggcgaacaggtatcaatacagttttccaggaacgccagggcttactgggtttcgtcggtggttcttttcggcatggcctggcttcctggtttccccaaatatgtgcttatcccgatgtccggcctgattggtttctgcgcttaccttattggccaggttcaaaagaagcaggcaagcaccaatgaaatgatggcaaaaaccggggaagctgccaaaaaacagagggacgacaggggagacgtcccgcaaatagaaacgctggatcaactgtccctggagctgggcttcggcctgattcccctggtcgataaagccaagggagaagagcttctggaacgcatacaattaatgcgccgtaatatcgctctggaaatgggaattgtaattccaaaaatcagaataaaagacaatatacagttaaattcttcggaatactgctttaaaattcgcggggtggatgtgggcaaaagtataatcagaatgggcagttacctttgtataaaccccggaacggcaaaggaagaattgtccggagaaaaaacaacggatcccacgttcgggcttccagccctctggattggcgaagacaggcgggatgaggctgaacgggcagggtatactatcgtggatccgccttcgattatagccacccatcttaccgaaattatcaaacgccacgcagcggagcttttgggtcggcaggaaacccaggcaattattgacgggcttagaaaggactacccggcggtggttagtgaagtggaattgggccgggacgggaagagctttaccgtggggaacatacaaaaggtgctccaggggctcttaaaagagcaggtttcaataaggaacatggtgaccattctggagtcaattgccgattttgccccccttactaccgatacgaggtttttggttgaaaaagccaggcaggccctctcaagccagatctctcggccgatctga

SEQ ID NO: 60098 - protein, 558 aa, Unknown
  Obtained from environmental sample
  DOMAIN (1)...(558): FHIPEP family
  misc_feature (1)..(558): Xaa is any amino acid
MILDALMAINLVISLLVLLIVLDNRRPTDFSLFPTILLVVTIFGLALNISSTRLILTQGTRFDGRMIKAFATFVVGSSGTVGLVSGFVIFIAIIAVQKMVITKGATRISEVAARFMLDSLPGKQMAIDAEYSSGAIDQKEAASKKDALQKESDFYGAMDGASKFISGNVTFSIFIIVVDVLGGFIIGAFLQGESLTAALATYTSLSIGDGLLSQLPALLISAAMGIVVTRAAAPGDLGEQVSIQFSRNARAYWVSSVVLFGMAWLPGFPKYVLIPMSGLIGFCAYLIGQVQKKQASTNEMMAKTGEAAKKQRDDRGDVPQIETLDQLSLELGFGLIPLVDKAKGEELLERIQLMRRNIALEMGIVIPKIRIKDNIQLNSSEYCFKIRGVDVGKSIIRMGSYLCINPGTAKEELSGEKTTDPTFGLPALWIGEDRRDEAERAGYTIVDPPSIIATHLTEIIKRHAAELLGRQETQAIIDGLRKDYPAVVSEVELGRDGKSFTVGNIQKVLQGLLKEQVSIRNMVTILESIADFAPLTTDTRFLVEKARQALSSQISRPI

SEQ ID NO: 60099 - DNA, 690 bp, Unknown
  Obtained from environmental sample
  misc_feature (1)..(690): n is a, c, g, or t
gtggaagggcttgttaactttattaagtccattgccaaaatggggattattggcgctgtcgcttatttcattatcagctcaagattcaaagagctggctaacctccagacagcgggattatgggcgggggtaacccttgtcgcgagccttacagcgcaattgcttgtcgttacagctatcctcctcctttttatttcgattccggattactttttccagcgatggcagtttaaggaatcgttaaaaatgaacctccagtccagaaaggaagagttaaagcaggatgaaggcgacccgaatatgcgacacaggttaaggaaccgctaccgggatatgctttcgcgtaatatgctgagcgccgtgccaaacgcggacgtggttataacaaacccgactcactattcggtggctttggaattcgacgcggcgcgaatggacgcacccacagtggtggcaaaaggggaagacgagcttgcaatgcggatcagggaagtcgccaaagcgaacaatgtccccgtggtttcccgtccgccattaaccaggtttctatatcaggaaacggaagtgggggatcagatacctatcaggtactgggaagtagtggccaaattaattgggaattttttcagttttgagcaaaaacaggcccggcgcgtcgctgcaggcaaaacaggcaggatgggggcttag

SEQ ID NO: 60100 - protein, 229 aa, Unknown
  Obtained from environmental sample
  DOMAIN (1)...(209): FlhB HrpN YscU SpaS Family
  misc_feature (1)..(229): Xaa is any amino acid
MEGLVNFIKSIAKMGIIGAVAYFIISSRFKELANLQTAGLWAGVTLVASLTAQLLVVTAILLLFISIPDYFFQRWQFKESLKMNLQSRKEELKQDEGDPNMRHRLRNRYRDMLSRNMLSAVPNADVVITNPTHYSVALEFDAARMDAPTVVAKGEDELAMRIREVAKANNVPVVSRPPLTRFLYQETEVGDQIPIRYWEVVAKLIGNFFSFEQKQARRVAAGKTGRMGA

SEQ ID NO: 60101 - DNA, 912 bp, Unknown
  Obtained from environmental sample
  misc_feature (1)..(912): n is a, c, g, or t
ttggaaaatgcgcacatcaccgctggaggagatgttgaaaaacctacttgtttaattgagcggccattgcctgagaaattaagcgagtactggcagaataaacttgaggttgagcttcgctcaaggaaatacagtacctgtactatgcgaagttatatttattacaatcgtctgctttgccgtacgctccaaaagcttccggaggaaattcgcactgaagacgttaatgtgtttcttgcagagttggataaaaacagggagtattccgcttcgtcgatgaatcttgcgatcagtgcgattaagtttttttacaaagaggttttcaagaatgatattattggagagcaacaccgcccacgacatgacaaacgctttccgatggttctttcgaaacaggaaattgttgaagttttaaggctcgaaaaaaatcccaagcaccgcttgcttttgatgcttgcttattcttcaggtttacgtgtaagcgaggttgttgcgcttaaaaaggagcatatcgatttatcccgaaaagttattttaatcgttggtggaaaaggccgtaaggacaggtgtactatgctttctgaaaaagccgccgcttttatccgcgaatactacgaagtttttaacatccagacctggcttttccccggccaacccgcaactcacccattgactatccgttccgcccaaaagatttttgacaaggcagtccaccaggcaaagatcgacaaagacatttcgattcacagtctgcgccactcttttgccacccatcttctcgaaagcggcactgacatccgctacatccaatccctcctcggccacgccagcgtccgcaccaccgaacgctacacccacattgctcgtcgtagcgttctaagcatccagagcccccttgatacaatagtgtga

SEQ ID NO: 60102 - protein, 303 aa, Unknown
  Obtained from environmental sample
  DOMAIN (27)...(107): Phage integrase, N-terminal SAM-like domain
  misc_feature (1)..(303): Xaa is any amino acid
MENAHITAGGDVEKPTCLIERPLPEKLSEYWQNKLEVELRSRKYSTCTMRSYIYYNRLLCRTLQKLPEEIRTEDVNVFLAELDKNREYSASSMNLAISAIKFFYKEVFKNDIIGEQHRPRHDKRFPMVLSKQEIVEVLRLEKNPKHRLLLMLAYSSGLRVSEVVALKKEHIDLSRKVILIVGGKGRKDRCTMLSEKAAAFIREYYEVFNIQTWLFPGQPATHPLTIRSAQKIFDKAVHQAKIDKDISIHSLRHSFATHLLESGTDIRYIQSLLGHASVRTTERYTHIARRSVLSIQSPLDTIV

SEQ ID NO: 60103 - DNA, 783 bp, Unknown
  Obtained from environmental sample
  misc_feature (1)..(783): n is a, c, g, or t
atggctgacggcgaagggcgcgtgcataccaattttgtgcagacgggaaccgctacaggccgcctttccagcagggaacctaacctgcagaatattccggtacgcgcggaagaaggccggcgcatacgcgaggcgtttatcgcaaagcccggaagcctccttatttcagcggactacagccagatagagcttgttgtgctggcgcatctttccgaagataaaaatttaatttcctcatttcttgaaaataaggacgttcacgcgcgcaccgcggcattgatcttcggcattgatgaaagcggaataaataacgaacagcgccgcatggcaaaagtaatcaacttcggcgtgatatacggaatgagcgccttccgccttgccaacgaattgaacatcagccgtacggacgcggcgaattttatcaacgcgtattttaacacatattcgggcgtcaggaattttatcgaaaatattatcaaaaaaaccgaaaaatgcggctatgttacgacaatttcgggacaccgccgttatatccccacaattaattcacggaacaaaaccgaaaaagccgccgctgaacgcatcacggtaaatacgccgattcaaggatccgccgcggacatcgtaaaaaccgccatgctttctttggataaacggcttacttcaacaaaaagcaaagcgcgtattttgctgcaagttcacgacgagcttatactcgaatgtccggaaaaagaagccgaaaaaaacacaaaaatcgtaaaggaagagatggaacagcggtaa

SEQ ID NO: 60104 - protein, 260 aa, Unknown
  Obtained from environmental sample
  DOMAIN (1)...(259): DNA polymerase family A
  misc_feature (1)..(260): Xaa is any amino acid
MADGEGRVHTNFVQTGTATGRLSSREPNLQNIPVRAEEGRRIREAFIAKPGSLLISADYSQIELVVLAHLSEDKNLISSFLENKDVHARTAALIFGIDESGINNEQRRMAKVINFGVIYGMSAFRLANELNISRTDAANFINAYFNTYSGVRNFIENIIKKTEKCGYVTTISGHRRYIPTINSRNKTEKAAAERITVNTPIQGSAADIVKTAMLSLDKRLTSTKSKARILLQVHDELILECPEKEAEKNTKIVKEEMEQR

SEQ ID NO: 60105 - DNA, 1239 bp, Unknown
  Obtained from environmental sample
  misc_feature (1)..(1239): n is a, c, g, or t
ttgaacagccgcatcgaccgcttcggccttaccgagcctgttattcgtcagcaaggcagggatcagatttacgttgagatacctgggacagcagacccggagcgaataaatgacattatcatggggaaaggcagtctcgctttccacttggtggatgaagaagccaccgtggcttttaaccagtattacaacgcgaatcccgctcaaacttttaatgcttttggtgaactggtaaacccgctaattgtaccctccgatgtggttatgcgcggcgtgtatacaaaagaccaatacggactggatgagcaaaagcggaattcttacggcaatctggattatgtcgcgataaaaaaggaagtgggccttgacggcaatcatatcaggagcgccgaagtgagccggagcagtcttgatggcagacctacggttacgtttttgctggattccgaggggggggacatattctacaaactcacttcggcaaatatcgaaaagcccatgtcaattgttctggatgacaaagttaagtccattgccacaataaggagcgccataagggaatctgttcagcttgaaggcttcggggaggatgaagcgaacaacattgcccttatgttaaggacggcggcattgccggttgagctggaagtgatcaatcagcagtcaatcggggcctcaatgggagaggataccatccggcagggcttctacgcccttttggggggcgttatcgcggttctggtctttatggttctatattacagaacggccggaataaacgcggtaatggcccaggtgctgaatttctacattatgttcagcgttctttcggcgtttaattttaccctgactttgcccagcattgccggcttcatactcactatcggtatggctgtaaatgcaagcgtgatcatctttgagcgcatgaaagaagaaatgcgcgacggcaagggcaggaaagcngtagtcgataccggttttaacaaggcgttctgggcgatcatggactccaacatcacaacctttatcgcggccgtgttcctttcacaactaggttccggccctatacagggattcgccgtaaccctntccgtcggagtgttttcctcagtctttaccgccttgtttgtttccaggcttatatttgattttggcacggatgttcttcacagtaaaaatgtttcgataacatggtcaaatctgcggattcaagaggcaactgcgggggggagcaaataa

SEQ ID NO: 60106 - protein, 412 aa, Unknown
  Obtained from environmental sample
  DOMAIN (201)...(387): Protein export membrane protein
  misc_feature (1)..(412): Xaa is any amino acid
MNSRIDRFGLTEPVIRQQGRDQIYVEIPGTADPERINDIIMGKGSLAFHLVDEEATVAFNQYYNANPAQTFNAFGELVNPLIVPSDVVMRGVYTKDQYGLDEQKRNSYGNLDYVAIKKEVGLDGNHIRSAEVSRSSLDGRPTVTFLLDSEGGDIFYKLTSANIEKPMSIVLDDKVKSIATIRSAIRESVQLEGFGEDEANNIALMLRTAALPVELEVINQQSIGASMGEDTIRQGFYALLGGVIAVLVFMVLYYRTAGINAVMAQVLNFYIMFSVLSAFNFTLTLPSIAGFILTIGMAVNASVIIFERMKEEMRDGKGRKAVVDTGFNKAFWAIMDSNITTFIAAVFLSQLGSGPIQGFAVTLSVGVFSSVFTALFVSRLIFDFGTDVLHSKNVSITWSNLRIQEATAGGSK

SEQ ID NO: 60107 - DNA, 1227 bp, Unknown
  Obtained from environmental sample
  misc_feature (1)..(1227): n is a, c, g, or t
atgaaacggataattcgtttttcaaaatattttatccccgcggcgctcttatcgtcgacaattgcggtattcagcgttgtaggttttttaacgctgggctttaatctgggcgtcgattttcaggccgggcttttacaggagatccagtttgttcccacagcttttagtttaacctataacggccccgggaacgcctcaatctcattcagcagaaccgctcttgaaattgttatttcaggcgttggggttgaggaagtaacgcacaggtttgtcttcgcttcttatcccagtcagcaggaacttgtccgcgttcttcgcgggattgagggcattgccgtaacggagacggcccccggcagtataagtaccgccgcgcttatacagagcgcacaatccagccccatgcttgacgcttcaaatccctttgttgtccattaccttcctcctaacgcggcgcctatcaggattgaagacgtacgcgccagtctgcttcctttgggaaccgtagcggttcagaaccttggcgttcccggcgagcggcgttttatgatccgcatggaagacaaagaattcgggaatacaggcggaggtgtcccggcagaaaagatcatggcggcgcttgaaagcaattttgggcggggagaagtggcggtaacgcggatggattatgtgggttccaggttttccaaacagctcacggatcaggtggggcttcttacggcaatgaccctcctgttgatccttatttacagctcgattcgcttcaagccccagtacgccattggcgcggtaatcgcgattctcaacgacgctcttgttatcgtagcctttgtggtctggacaagaatggaattcaacacaaccaccatcgcggcaattcttaccattctcggttactcgatcaatggcacgatagttatctttgaccgtgtcagggaaaaccgccgcatattccccgatgacgcgtttgtcgatgtgcttaaccgttccattacgggaacgctcagccgttccatcatcactacctttaccaccatgctggcggtgatttcgctctttcttttcaccaccggttcaatgaaggactttgcccttgcgctcctggtgggaatgacatcgggcgtttatacaacaactttcattgcgacgggttttgtttacttttgggatgtgcaggccaataaaagggagaagaaaagacttaaggccgttcccgccaaagcatag

SEQ ID NO: 60108 - protein, 408 aa, Unknown
  Obtained from environmental sample
  SIGNAL (1)...(25)
  DOMAIN (203)...(392): Protein export membrane protein
  misc_feature (1)..(408): Xaa is any amino acid
MKRIIRFSKYFIPAALLSSTIAVFSVVGFLTLGFNLGVDFQAGLLQEIQFVPTAFSLTYNGPGNASISFSRTALEIVISGVGVEEVTHRFVFASYPSQQELVRVLRGIEGIAVTETAPGSISTAALIQSAQSSPMLDASNPFVVHYLPPNAAPIRIEDVRASLLPLGTVAVQNLGVPGERRFMIRMEDKEFGNTGGGVPAEKIMAALESNFGRGEVAVTRMDYVGSRFSKQLTDQVGLLTAMTLLLILIYSSIRFKPQYAIGAVIAILNDALVIVAFVVWTRMEFNTTTIAAILTILGYSINGTIVIFDRVRENRRIFPDDAFVDVLNRSITGTLSRSIITTFTTMLAVISLFLFTTGSMKDFALALLVGMTSGVYTTTFIATGFVYFWDVQANKREKKRLKAVPAKA

SEQ ID NO: 60109 - DNA, 447 bp, Unknown
  Obtained from environmental sample
  misc_feature (1)..(447): n is a, c, g, or t
atgactattaaagtcaaattaagccttatgatgattgccatcatggtggtcgtggcgggcggacttacggtaattcagctgcagaaagcttcctcaatcagcatgaatttaagcgtcaagggccttaaatatttagctcaacagcaagcctcatactggaaaggccgggaagaaatctatttaaataaattagacggaattgcggacataatgggggaatttgaagccttgcccgcggcggagcggcgggatatgtatgacagtatgctccttgccaccctgcatagcaataccaactttatcagaatatattctatttggaaaccaaacgccatggacggcatggacgcccgttatataggccgtccggggtcatctccgacggggcagtacgcgatgacctttaccagagaaaacgtccnggntgaagagcgaanaacctcgtaa

SEQ ID NO: 60110 - protein, 148 aa, Unknown
  Obtained from environmental sample
  SIGNAL (1)...(19)
  misc_feature (1)..(148): Xaa is any amino acid
MTIKVKLSLMMIAIMVVVAGGLTVIQLQKASSISMNLSVKGLKYLAQQQASYWKGREEIYLNKLDGIADIMGEFEALPAAERRDMYDSMLLATLHSNTNFIRIYSIWKPNAMDGMDARYIGRPGSSPTGQYAMTFTRENVXXEERXTS

SEQ ID NO: 60111 - DNA, 852 bp, Unknown
  Obtained from environmental sample
  misc_feature (1)..(852): n is a, c, g, or t
gtgaacggaaaagatacctttattgtcagaatgggagttcccataaccaaagcttctagcaatgaagtagtcggacacctggctatcttagtagacatctcgccgatgcaaaccgcggtagaaaaaactctcaatagttacaaagaaatatcccagatgtctatttactcaggcaacggatgtattatggggaacctgaacgccgaccgggtaggaaaaatgctgatcgaagtggaaagattatacggtgtttatcaaaaagacgccaaccaggctgttcttgacggcaaaccgtttagctgttcaagctattcaaattcgttaaaatcaaacgtgagaattgaactgatgcctttccagataggcgattcagacaatacatggagcgtaatgattgcgtcaacggaatcgttcatcatgaaagaagtcaactcaatgagaaattttattattattctggcggcagtatccctgataggctcggtggtaataatatactttgccctgaataccattaccaagccaatcgtcagggtagccgacacactcaaggacatatctgaaggcgaaggcgacctgacgcgaaccattgccgtaagttctaaagacgagataggcgaccttgcgctgtacttcaacaaaacacttaaaaaaattaaagatttggtacttaatattaagaaggaggccggtatattgtcggaaatcggcaatgatctgtccagcaacatgaccgaaacggcggcagcggtgaacgaaatggcctccaatattcagaatattaaaacccgcgttataaaccagagcgccagtcgttacccaaaccaacgcgactatggagcaggttgttga

SEQ ID NO: 60112 - protein, 283 aa, Unknown
  Obtained from environmental sample
  DOMAIN (150)...(221): HAMP domain
  misc_feature (1)..(283): Xaa is any amino acid
MNGKDTFIVRMGVPITKASSNEVVGHLAILVDISPMQTAVEKTLNSYKEISQMSIYSGNGCIMGNLNADRVGKMLIEVERLYGVYQKDANQAVLDGKPFSCSSYSNSLKSNVRIELMPFQIGDSDNTWSVMIASTESFIMKEVNSMRNFIIILAAVSLIGSVVIIYFALNTITKPIVRVADTLKDISEGEGDLTRTIAVSSKDEIGDLALYFNKTLKKIKDLVLNIKKEAGILSEIGNDLSSNMTETAAAVNEMASNIQNIKTRVINQSASRYPNQRDYGAGC

SEQ ID NO: 60113 - DNA, 843 bp, Unknown
  Obtained from environmental sample
  misc_feature (1)..(843): n is a, c, g, or t
atggagcaggttgttgaaaacatcatgaaagtaaacaaacatgttgaaagccagagtgaagatatttcccaggcttcatccgccattgaggaaatggtagccaatatcaattctgtcaccaacacgctgattaacaacgccgccaatgtaaagacactgctggaatcctctgaagtcggccatgccggattacaggacgtgtctcaggatattcaggaaatatcccgcgaatccgaaggcctgttggagattaacgctgtaatggaaaacatcgccagccagaccaatctgctttcgatgaacgccgctattgaagccgcccacgccggagaggccggcaagggctttgcggtagtcgccgatgaaatccgcaagctggcggaaagttccggcgaacaatccaaaactattggtacggtattgaaaaaaattgcggagtcaatcaaaaaaataacaagttccaccgaaaacgtgctaaccaaattcgaggcgattgattcaagcataaagaccgtttcgcagcaggaagaaaatatccgcaacgcgatggaggaacaggggacgggaagcaaacaacttctgcacagcgccggagatttgaacgaatcaacccagcaggtaaagaccggttccaatgaaatgcttgtgggcagcagggaagttatgcatgagagccagaatcttgaanagataacgcaggaaataaccggcggcatgaacgaaatggctaccggcgcggagcaggtgaatgtagcggtgaacaatgtcaacgagataagcaacaagaaccgcgagggcattgatactttgatacgggaagtttcacggtttaaagtggagtaa

SEQ ID NO: 60114 - protein, 280 aa, Unknown
  Obtained from environmental sample
  DOMAIN (16)...(236): Methyl-accepting chemotaxis protein (MCP) signaling domain
  misc_feature (1)..(280): Xaa is any amino acid
MEQVVENIMKVNKHVESQSEDISQASSAIEEMVANINSVTNTLINNAANVKTLLESSEVGHAGLQDVSQDIQEISRESEGLLEINAVMENIASQTNLLSMNAAIEAAHAGEAGKGFAVVADEIRKLAESSGEQSKTIGTVLKKIAESIKKITSSTENVLTKFEAIDSSIKTVSQQEENIRNAMEEQGTGSKQLLHSAGDLNESTQQVKTGSNEMLVGSREVMHESQNLEXITQEITGGMNEMATGAEQVNVAVNNVNEISNKNREGIDTLIREVSRFKVE

SEQ ID NO: 60115 - DNA, 636 bp, Unknown
  Obtained from environmental sample
  misc_feature (1)..(636): n is a, c, g, or t
gtgaattactccactttaaaccgtgaaacttcccgtatcaaagtatcaatgccctcgcggttcttgttgcttatctcgttgacattgttcaccgctacattcacctgctccgcgccggtagccatttcgttcatgccgccggttatttcctgcgttatctnttcaagattctggctctcatgcataacttccctgctgcccacaagcatttcattggaaccggtctttacctgctgggttgattcgttcaaatctccggcgctgtgcagaagttgtttgcttcccgtcccctgttcctccatcgcgttgcggatattttcttcctgctgcgaaacggtctttatgcttgaatcaatcgcctcgaatttggttagcacgttttcggtggaacttgttatttttttgattgactccgcaatttttttcaataccgtaccaatagttttggattgttcgccggaactttccgccagcttgcggatttcatcggcgactaccgcaaagcccttgccggcctctccggcgtgggcggcttcaatagcggcgttcatcgaaagcagattggtctggctggcgatgttttccattacagcgttaatctccaacaggccttcggattcgcgggatatttcctga

SEQ ID NO: 60116 - protein, 211 aa, Unknown
  Obtained from environmental sample
  misc_feature (1)..(211): Xaa is any amino acid
MNYSTLNRETSRIKVSMPSRFLLLISLTLFTATFTCSAPVAISFMPPVISCVIXSRFWLSCITSLLPTSISLEPVFTCWVDSFKSPALCRSCLLPVPCSSIALRIFSSCCETVFMLESIASNLVSTFSVELVIFLIDSAIFFNTVPIVLDCSPELSASLRISSATTAKPLPASPAWAASIAAFIESRLVWLAMFSITALISNRPSDSRDIS

SEQ ID NO: 60117 - DNA, 1350 bp, Unknown
  Obtained from environmental sample
  misc_feature (1)..(1350): n is a, c, g, or t
atgaagacttttttaagtgagggcggcgcggattcggatttctctgacggtgaaatcgattcgctgttctcgcgggttctggcgcaggcttgcgcggaactgggaaaagtttcttccgtcctgcttataccgccggatatcacccgtttccattcgcgtgccggcttccttaccggaatcgcctataagtatttatccaaatcgggaatcgccgtcaaggtgcttcccgctttgggaacccacattcccctcactgataccgagcgtgaacgcatgtttcccgatgtgccacagtcattgtttctcgtgcatgactggcgcaacgacgtggtcgagcttgcccgcattgatcagggatgggtggaaaaaaccaccgcgggcgcggtaagttatgactggccggttcaggtaaacaagatcctgcgggacggcggcttcgatctgatcatttcccttggacaggttgttccgcacgaagttatcggcatggcaaaccacgcgaaaaacctttttgtgggaaccggcggcaaagaggccattgacaaaagccattttgccggcgcctgttttggcatggaaaaaatgatgggccgcgccgacacgcccgtacgcgccatgttcgacgagggcctgcgcctcagcgacgggatgctgccccccgtgttatacgctcttaccgtaataagcgcccgaagcgaaaccgagaccgccaacagcgacaaaccgggcaagccaggcctgcccaagggttcccttgccctgcgcgggcttttctgtggttttggccgcgcttgttttgaagaggccgccgcacttgcccgcaaagtaaacgtagaccttttggacgagcccatacgcaaggcggttgtataccttgagcctgaagaattccgcaccacctggcttggaaacaaggccgtttacagaacccgcatggcaatggccgacaaaggagagcttttgatcatcgcgcccggccttgaacgtttcggcgaagacatgggcatagacgcgctgatccgcaagcacggataccgcgtttcaaaagttatcaaagaaaaggtcagcaagaacgcggaacttgcaaacaacctcagcgccgcggcccatctgatccacggttccagcgaaggccgcttcaccgtccgctactgccccgggcccggcttaagccgccaggaaatcgaatcggtaggttttgaatggggcgatattagtgaggctgttgcccgctacgacgcgcgtaaactcgcgacaggctggaacaccggccccgacggcgaaaaattctttttcgtgccgaatccggcgctcggcctctgggccctgcgggatagtttttcaaattag

SEQ ID NO: 60118 - protein, 449 aa, Unknown
  Obtained from environmental sample
  misc_feature (1)..(449): Xaa is any amino acid
MKTFLSEGGADSDFSDGEIDSLFSRVLAQACAELGKVSSVLLIPPDITRFHSRAGFLTGIAYKYLSKSGIAVKVLPALGTHIPLTDTERERMFPDVPQSLFLVHDWRNDVVELARIDQGWVEKTTAGAVSYDWPVQVNKILRDGGFDLIISLGQVVPHEVIGMANHAKNLFVGTGGKEAIDKSHFAGACFGMEKMMGRADTPVRAMFDEGLRLSDGMLPPVLYALTVISARSETETANSDKPGKPGLPKGSLALRGLFCGFGRACFEEAAALARKVNVDLLDEPIRKAVVYLEPEEFRTTWLGNKAVYRTRMAMADKGELLIIAPGLERFGEDMGIDALIRKHGYRVSKVIKEKVSKNAELANNLSAAAHLIHGSSEGRFTVRYCPGPGLSRQEIESVGFEWGDISEAVARYDARKLATGWNTGPDGEKFFFVPNPALGLWALRDSFSN

SEQ ID NO: 60119 - DNA, 1479 bp, Unknown
  Obtained from environmental sample
  misc_feature (1)..(1479): n is a, c, g, or t
ttggaaaagcccctgactttatcatcagtaaaccttaacatatcaaagggcttaaccgaatttccgtcatgggtacgcaatgccgcttacctgcgctgtctatccattactgaatcagatatcacacaattacccgattggattggcgatatgcaatccctaacagagctttacatacattgcagcaacaggaatttgaaaacattgcccgacaaaatcggcagtttaacgaatcttgccaaactctacatagactgtccatctatagagaaattgcccaatagtataggtaatattatttctttaaaagagttactgctgttcagggccgataacttaacgtctttgcctgacagcattgggaaccttaaaaacctggtgaaattcgtgcttgagtattcgcccataaaaacagtaccggattggattggaaacttacaaaacctgactgaactttcattgaatggaaacaaaatgaaaagcttgcctgactttattggcaatctgggcaatttgactttgctttctttgaagaattgcaaaaatttaagataccttcccgcaagcattagcaggctaaaaaacctggttgacttttctcttaccggtacacctatagaagaactaccggattcaatggcggattgttcgtctttggaaagtatcatagaagtaataccggaaaaccattctatttcatatcgtactttctgtaattgttattacaccctggttgaaacaataatcagttttgcggctaaagcaaggcgtgaaggccttttggcacttgaggaagaattagaaaatttatcggatggctttttcaggcaaggattgaggcttgtggtcgatggaactgacgagggaattattaggcatattcttacgcttaaaattgagcgcgagcatgatcattacaaaaagaagctaatggaaatagcaatggaaggcattttatgcatccagaattggaatagtgtacaaaacacgggcataaggcttgccgcaatggttgacataaaaaacaatccgcttgacacagcctttgccaaatacctggccggtgataactcagcgttcaacgatattgattttaagacggcaatacagccggaggaagaaggcgaagaagtacattttataaaacgcgcctatgaaacaagcgaaatatgtcgcagggagggtccttttggaattgaaaaacacctggataatgacggcattgcggcaaaggatgtttttgaatatgggctttgtttgatagttgagtgctggaattatgaagatatcgataaggatttatccatgctgatcgccaatgaaaacgatcctgtgcgtaaaaatcttgctttggctaaaaagcatgccattaaaatgatctatgatggcgatagtccaaggatcattagagcaacattattggcatatttcggcgacgatattgcagaaaatcatccggaattaattcttgaatggtaa

SEQ ID NO: 60120 - protein, 492 aa, Unknown
  Obtained from environmental sample
  misc_feature (1)..(492): Xaa is any amino acid
MEKPLTLSSVNLNISKGLTEFPSWVRNAAYLRCLSITESDITQLPDWIGDMQSLTELYIHCSNRNLKTLPDKIGSLTNLAKLYIDCPSIEKLPNSIGNIISLKELLLFRADNLTSLPDSIGNLKNLVKFVLEYSPIKTVPDWIGNLQNLTELSLNGNKMKSLPDFIGNLGNLTLLSLKNCKNLRYLPASISRLKNLVDFSLTGTPIEELPDSMADCSSLESIIEVIPENHSISYRTFCNCYYTLVETIISFAAKARREGLLALEEELENLSDGFFRQGLRLVVDGTDEGIIRHILTLKIEREHDHYKKKLMEIAMEGILCIQNWNSVQNTGIRLAAMVDIKNNPLDTAFAKYLAGDNSAFNDIDFKTAIQPEEEGEEVHFIKRAYETSEICRREGPFGIEKHLDNDGIAAKDVFEYGLCLIVECWNYEDIDKDLSMLIANENDPVRKNLALAKKHAIKMIYDGDSPRIIRATLLAYFGDDIAENHPELILEW

SEQ ID NO: 60121 - DNA, 1689 bp, Unknown
  Obtained from environmental sample
  misc_feature (1)..(1689): n is a, c, g, or t
gtggtaatgattatagcgtcagtgtttacctcctgtatttcccctgcggaaaattcatacgacaccccttcagttcccgttcactcacaccagtggggtgaatgggaaataatcacccccgcaacctgtacggaaaaaggtgaagaaacaagaatttgtacacttgacgcgacacacaaagaaacacgggaaatagccataaaccccaacgcgcatgactggcaacagttgagcggaaccgcgccgacttgtacaacaacaggaaacgggacaagaaaatgtaacctctgtaacaaagaagaaagcggcaataatctgcctgcgcttggtcacaaatatggaaactatgaagtaacaaaagagccgacttgttccgacgaaggcattgaaaccgcagtctgctcccatgactcatcgcacaccattacaagagccgtacctatcgaccccgacgcgcatgactggaaacagttgagcggaactccggcgacatgtacaacagaaggaaacggggaaagagagtgtaaaatctgcgcaaaaaaagaagaaacacttgaaacttttcccgcgcttggtcacaaatttgctgactggacgcagacaaccgcgccgacttgtacagaagcaggagaggaaaccggaacctgtacccatgattcatcacataccatgacccgcgccgtacccgcgcttggacatcaatatgcgaataactggaaaataacaactcccgccacctgcacaacggcaggagaggaaaccggaacctgtacccatgattcatcacacaccacgacccgcgccatacccgcgctcggacatcaatatgcgaataactggaaaataacaactccgcccactgttgtacaagcaggtacagaaacagatacttgcatacataacacatcgcacaccagaactcgctctataactactgcaacctttaccgatattacagattttgaaacatatttttccgacttgtccgacaataccgcccccgccgcgtataccgttaaattgaacgtgaatagtttgggcagcgctaacgtcaccggaagcgtttgggcgattttgaaagacaacagtgacaaatacatcagccttgatctatccggcagcgccataaccggcattgaagattccgcttttctgtcttgcgcaaaccttaccagtgtaaacataccgaacaatgttaccagtattggagagcgcgcttttgacggttgtaccggtcttgccagcgtaaacattcccaatggcgttaccagcatagggagtaatgcttttaaccgttgcatcagtcttgcaagtataaacattccgaatagtgtaacaagtatcggtattgccgcttttcagtcttgcgccggtcttacaagtattataataccaagcagcgttactgaaataaaaggttccgtttttaaccgttgtaccggtcttaccagcgtaaccatacccgccaatgttaccaagatcggggattggagttttggcaacaatacaaaccttaccagcgtaacatttaaaggaacgattactgcggctaattttggcagtcccggcgcattccttggcgacttacgggacgtattttacgcaacaaattcaactaacggcacacccggaacatataccacaaccgcgcctgtgagcactagttctgtgtggacgaaacagaattaa

SEQ ID NO: 60122 - protein, 562 aa, Unknown
  Obtained from environmental sample
  SIGNAL (1)...(19)
  misc_feature (1)..(562): Xaa is any amino acid
MVMIIASVFTSCISPAENSYDTPSVPVHSHQWGEWEIITPATCTEKGEETRICTLDATHKETREIAINPNAHDWQQLSGTAPTCTTTGNGTRKCNLCNKEESGNNLPALGHKYGNYEVTKEPTCSDEGIETAVCSHDSSHTITRAVPIDPDAHDWKQLSGTPATCTTEGNGERECKICAKKEETLETFPALGHKFADWTQTTAPTCTEAGEETGTCTHDSSHTMTRAVPALGHQYANNWKITTPATCTTAGEETGTCTHDSSHTTTRAIPALGHQYANNWKITTPPTVVQAGTETDTCIHNTSHTRTRSITTATFTDITDFETYFSDLSDNTAPAAYTVKLNVNSLGSANVTGSVWAILKDNSDKYISLDLSGSAITGIEDSAFLSCANLTSVNIPNNVTSIGERAFDGCTGLASVNIPNGVTSIGSNAFNRCISLASINIPNSVTSIGIAAFQSCAGLTSIIIPSSVTEIKGSVFNRCTGLTSVTIPANVTKIGDWSFGNNTNLTSVTFKGTITAANFGSPGAFLGDLRDVFYATNSTNGTPGTYTTTAPVSTSSVWTKQN

SEQ ID NO: 60123 - DNA, 648 bp, Unknown
  Obtained from environmental sample
  misc_feature (1)..(648): n is a, c, g, or t
atgaaaatccaaaaactggacacccacagcttgcgtaacgatgcacatttccagttccacaccgagttcaaagacctcgctgtgcatcataaccccgaaaccctcaaaataacccctcaatttgagacctatcaacccctctacggcagggtggatgaagccctcaaaaagatagtaaaaagcgaattcaccgccaaaatccacgaagccgacaaagccagagacgaaatctacctaggcatagtggaaacaaacacagcagcactcaggcacttcaaccaaaatgtaaggcaagccgcagaaaggctaaaaatcctctttgacacctacggcaacgtagccagcaaacccctcaacgaagaaacctccgcaatctacaacatattgcaggaattgaaaggcaaatacaccgccgatgcagcgagcgtaggcataaccgaatgggttgccgaactagaaacccgaaatcaaacatttgaagcattggtgaaagaacgctttgacgaaaccgcagctagaacaacggatatagttatgaagcaggcgagggcacagctagacgaggcatataaaactatcgtggagcgtataaatgcccttgcgatagtagagggcgtggcggcttacgaagccttatcaaaaccctaa

SEQ ID NO: 60124 - protein, 215 aa, Unknown
  Obtained from environmental sample
  misc_feature (1)..(215): Xaa is any amino acid
MKIQKLDTHSLRNDAHFQFHTEFKDLAVHHNPETLKITPQFETYQPLYGRVDEALKKIVKSEFTAKIHEADKARDEIYLGIVETNTAALRHFNQNVRQAAERLKILFDTYGNVASKPLNEETSAIYNILQELKGKYTADAASVGITEWVAELETRNQTFEALVKERFDETAARTTDIVMKQARAQLDEAYKTIVERINALAIVEGVAAYEALSKP

SEQ ID NO: 60125 - DNA, 648 bp, Unknown
  Obtained from environmental sample
  misc_feature (1)..(648): n is a, c, g, or t
ttgacgttagtcccccacaacgaggaagcaaagcaagtagccgagacaatgcaggatttattcttggaagagctaaacgtagagcaactccatttcgcgggtgatgacaccgagctggcgaaaatctctgccaagcccaacttcgcaggcataaaagcaaaaggagcggactacgccaaaaatatgaaaaccctatccaccgccataaccgccttgaccgccgagcaaatcaagcaaatccaaagcggcacaccgcttgacgttgccggtctccccatagactactcctgcctaatgctagtccgcgaagtagccgaaggtctcgccgttgaagcagacgaaaactacaccatagccttggatttgaaaataacgccagagctacgtcaaagctgcatagcgagagagctggtaaatcgcatacaaaaccgccgcaaggaaatggatttgcagattacggataagataaagatagcgttgaaagggttggatgcttacgcggatttgcaagccgctgtggagaagcacaggggttatattttggaggagacgcaagggttggagatttccacgagcggtgaagcgagtggggagtgggttgcggttagtgtggagggatgtgaggtggaggtttgtgtttgcatttaa

SEQ ID NO: 60126 - protein, 215 aa, Unknown
  Obtained from environmental sample
  misc_feature (1)..(215): Xaa is any amino acid
MTLVPHNEEAKQVAETMQDLFLEELNVEQLHFAGDDTELAKISAKPNFAGIKAKGADYAKNMKTLSTAITALTAEQIKQIQSGTPLDVAGLPIDYSCLMLVREVAEGLAVEADENYTIALDLKITPELRQSCIARELVNRIQNRRKEMDLQITDKIKIALKGLDAYADLQAAVEKHRGYILEETQGLEISTSGEASGEWVAVSVEGCEVEVCVCI

SEQ ID NO: 60127 - DNA, 1665 bp, Unknown
  Obtained from environmental sample
  misc_feature (1)..(1665): n is a, c, g, or t
atgagtgataacccgaaaagaattatagtggtagacgataacgcggaaatcctcaccgccattaagaacgctctaaaagcctcttatgacgtgtatccgactaaagccgtgtcaaacatgtttgaactcatgaaacgtttccagccggatttaatactgttggatgtggacatgccggacataaacgggtatgaagccgcgaaaatgctgaaaggcagccataacttcagggacatcccccttatcttcctgacatccatgaacgacgcggcaagcgaaatggaaggcctgaatctcggcgctattgattatatccacaaaccttttgtagccccgcttttaagccggcggataaagacgtacctgtccgtgatggaacagcagaaagtaatactggaacgcaataaagaaattgaggaattactcgaattaaaaacaaaagaaatcaacatgcgcgaagcggcggaactggaagcgcggaacgcctcgcgcgccaagagcgaattcctgtcccacatgagccatgagatacggtcccctttgaacgccgtactgggcatgatatccatggcggcggaaacggatgatattcaaacgataaaggattaccttaaaaaagcctacaacgcgggaaggcatgtattgggccttatcaatgatattcttgacatgtccaagatagaagcgaataaacttgaactcgcgtacggcgaattttattttagaaaaatgctggagggcattgttaatgaggcaagcgtccgcgccggggaaaaacaccaggaaattgtgctgaatgtgaacgcgaatgttccgccaaatattatcagcgacgggctgcgcctgtcccaggtcattaccaacctgctgaccaacgcgattaagtttacgccggaaaacggcagaattgtattgagcatggaaaagccggacgaaaaagacggcgtaattaccctgagaatcgaagtggcggacaacggcatcggtatttcaccggaacagcaaaagcggctcttcacgtcctacagtcaggctgacagcaatatttcacaaacattcggcggaacaggccttggccttgccatttccaaacggatagtggaactcatgggaggcgaaatatggattgagtcggaacttgataaaggctcaaaattcatatttactattaaaaccaaaagaggaacggacaacgccgttacatggggttccgggggggaggaagaatcggacgaaggcgagtataatctcagcgactataccatattggccgcggaagatattgagatcaacagggaaatcctgtccgcccttctggaaaagaccggcgtttccattgattatgccgaaaacggcaaaacggctgtttcaatgttccgggaaaacccagaaaaatacaacctgattctcatggacatccatatgccggaaatgaacgggtatgacgcgacacaggcaatacgtgctattgaaacggaactgcgttccgcttcaatagcttcgagtttcacctccggtgaaactcgggctgccggagaagaaggcatggagtttccgaaggaaactcctaagcaattatgggaatgcccaaagagcattcccatagtggccatgaccgcgaatgtttccgggaagaaattcaaaaatgcctggattcgggcatga

SEQ ID NO: 60128 - protein, 554 aa, Unknown
  Obtained from environmental sample
  DOMAIN (165)...(230): His Kinase A (phosphoacceptor) domain
  misc_feature (1)..(554): Xaa is any amino acid
MSDNPKRIIVVDDNAEILTAIKNALKASYDVYPTKAVSNMFELMKRFQPDLILLDVDMPDINGYEAAKMLKGSHNFRDIPLIFLTSMNDAASEMEGLNLGAIDYIHKPFVAPLLSRRIKTYLSVMEQQKVILERNKEIEELLELKTKEINMREAAELEARNASRAKSEFLSHMSHEIRSPLNAVLGMISMAAETDDIQTIKDYLKKAYNAGRHVLGLINDILDMSKIEANKLELAYGEFYFRKMLEGIVNEASVRAGEKHQEIVLNVNANVPPNIISDGLRLSQVITNLLTNAIKFTPENGRIVLSMEKPDEKDGVITLRIEVADNGIGISPEQQKRLFTSYSQADSNISQTFGGTGLGLAISKRIVELMGGEIWIESELDKGSKFIFTIKTKRGTDNAVTWGSGGEEESDEGEYNLSDYTILAAEDIEINREILSALLEKTGVSIDYAENGKTAVSMFRENPEKYNLILMDIHMPEMNGYDATQAIRAIETELRSASIASSFTSGETRAAGEEGMEFPKETPKQLWECPKSIPIVAMTANVSGKKFKNAWIRA

SEQ ID NO: 60129 - DNA, 621 bp, Unknown
  Obtained from environmental sample
  misc_feature (1)..(621): n is a, c, g, or t
gtgcctgttatcagcgcgccggtttataataattattacgaaaacataacgatagaaataccgggcgtagacacgaaaaaagggcttagtctgtacgccggcgacacgggcgtttatctggccctgctgcgctcctatgtcgccaacacgccggggcttttggacaaactgaggatcgtctcgcaggaaaccctgcctaaatataacgtctccgtacacgggttaaaaggctccagcgcaaacataggcgcggaatcgatacgggaaacggcttttgaactggaaaaaatatccagggaaggcaatttgcagggcgtttgggcgctgaacggcaaactcattgccgatacgaaaatcatcatttcaaatatacaagcgtggctggaacagtacgacgccggcagggagaagaaacctgtcaagaaagcccccgacagggagttgctgaagcagttccgcttatgctgtgaaaattacgacataaaaggcgccgacaaaattttgacaatactggaatgcgccgattacgaagaagacgccgatctgataaaatggttaagggacagaatcgaaaactcggattttaccgaggcagcgcaaaaactcaaggaatatgaatag

SEQ ID NO: 60130 - protein, 206 aa, Unknown
  Obtained from environmental sample
  DOMAIN (41)...(127): Hpt domain
  misc_feature (1)..(206): Xaa is any amino acid
MPVISAPVYNNYYENITIEIPGVDTKKGLSLYAGDTGVYLALLRSYVANTPGLLDKLRIVSQETLPKYNVSVHGLKGSSANIGAESIRETAFELEKISREGNLQGVWALNGKLIADTKIIISNIQAWLEQYDAGREKKPVKKAPDRELLKQFRLCCENYDIKGADKILTILECADYEEDADLIKWLRDRIENSDFTEAAQKLKEYE

SEQ ID NO: 60131 - DNA, 807 bp, Unknown
  Obtained from environmental sample
  misc_feature (1)..(807): n is a, c, g, or t
ttgcttaacaagaaaaaactccgcatatccgccggcgactccgtacgcgtacaggtgatcaatcaagacagcgcggagggagtaatctgcgagatagcggagcgctccagcttcctgcccaggccgccgttagccaacttgtcgcaagtcgtgttcatcaactgcttcaaacagccgaatctcgacaccgaagccattgaccgattcctcttttcaagcgaagcctacgggataagcgcagtcatcgtcttcaataaaatggatttgctaaacgacgccgaaacggcggagcttacagccgcggaacgctactacaaggacgtcggctacaaaatcctgcacacctccgtccaaaaaagacatggcatttcagaactcgtcgacatctgccggaacaagaccagcgcgtttaccggcctctccggcgtcggaaaatctagcctgctctcgctcatattcccggactccgagttcaggacaaacgacgtctccggcgcacgcggcaggggaacccatacgaccacgcatataaaactattgacattggacgaaaactccttcatagccgacacaccgggcttcgccttcgtggacgtgccggcggtcgatgaggaatcggtggcggaatacttcccggaaatccgagaggtcatagggcattgccgcttcaacaactgcatacacgacgccgaacccggatgcaaggtggcggagttagtcaacagcggagagattgcggcttggcgccgagagcattacttaaagatttatcgggaaatggtcaaaaagcgaagagagacgtattga

SEQ ID NO: 60132 - protein, 268 aa, Unknown
  Obtained from environmental sample
  DOMAIN (133)...(266): GTPase of unknown function
  misc_feature (1)..(268): Xaa is any amino acid
MLNKKKLRISAGDSVRVQVINQDSAEGVICEIAERSSFLPRPPLANLSQVVFINCFKQPNLDTEAIDRFLFSSEAYGISAVIVFNKMDLLNDAETAELTAAERYYKDVGYKILHTSVQKRHGISELVDICRNKTSAFTGLSGVGKSSLLSLIFPDSEFRTNDVSGARGRGTHTTTHIKLLTLDENSFIADTPGFAFVDVPAVDEESVAEYFPEIREVIGHCRFNNCIHDAEPGCKVAELVNSGEIAAWRREHYLKIYREMVKKRRETY

SEQ ID NO: 60133 - DNA, 774 bp, Unknown
  Obtained from environmental sample
  misc_feature (1)..(774): n is a, c, g, or t
atgacagatcggccgagagatttgggcttcgccgcgacctccattcagcgcacggtgtcgtctatgcgcagtttcttcgccttcatcgccgtggaggggtacatatcgagcgaccccacggaactgctcgagagccccaagcggacgcggtcgttgccgtcagtgttgtcggtggaggaggttgaggctataatcaacgccgtcgacttggagggaaagaacggtatacgcgaccgggcgattatagagacgctttacgccacgggaatgcgcgtgtcggagctctgcgcctttacgatggagcagcttctggaaaaggagcaactggtccgagtatttggcaagggatcaaaagagcgcatagtgcccataggcgacagcgcgctctattggatcggtcagtacctggagaaggagagggggctgtcggcaaggccgtattccgggagtacgctatttttgaacttccgcggacgcggcttttcgcgtatggggatatggaagatagtgcagcagtacgcggcggcgggcggggttagaaagaaatctccccgcatacgttccgccactccttcgccacgcacctgctggagggccggggcggacatacggacggtgcaggagatgctcgggcactcaaacatagtaacgacggagatttacacgcacgttgacagggagtatctgctgagatacataggagttttcatcccagaagccgaaataggtgagtgtcaatacgtctctcttcgctttttgaccatttcccgataa

SEQ ID NO: 60134 - protein, 257 aa, Unknown
  Obtained from environmental sample
  DOMAIN (65)...(231): Phage integrase family
  misc_feature (1)..(257): Xaa is any amino acid
MTDRPRDLGFAATSIQRTVSSMRSFFAFIAVEGYISSDPTELLESPKRTRSLPSVLSVEEVEAIINAVDLEGKNGIRDRAIIETLYATGMRVSELCAFTMEQLLEKEQLVRVFGKGSKERIVPIGDSALYWIGQYLEKERGLSARPYSGSTLFLNFRGRGFSRMGIWKIVQQYAAAGGVRKKSPRIRSATPSPRTCWRAGADIRTVQEMLGHSNIVTTEIYTHVDREYLLRYIGVFIPEAEIGECQYVSLRFLTISR

SEQ ID NO: 60135 - DNA, 2031 bp, Unknown
  Obtained from environmental sample
  misc_feature (1)..(2031): n is a, c, g, or t
ttgtttaatttccatgacatatttttatattaccattataatatacctattaaaataaaacaggagtatcccatgaaccgtgaagacaaaattaaagaattaatttcccaaatgacgctggaggaaaaagtttcccaactgctttacaaaagtccggctattgaacgtcttgggatacccgaatataactggtggaacgagtgtctgcacggcgtagcaagggcgggtatcgccactgtttttccgcaggctatcgctatggcggctacttttgacgacgaacttgtcgagcagatagcgaccgctatttccgatgaagcaagagcaaaacataatgaggcggttaagcagggcaaccgaggtcagtactgggggcttactttctggacgccgaatatcaatatcttccgtgatccgcgctgggggcgggggcaggaaacttacggcgaggacccctgccttacaagcagaatcggtcttgcgttggtgcgcggtttgcagggcaaggataccgagaacttgaaacttgccgcctgcgcaaaacatttcgcagttcattccggtcccgaaagagaacgccacacatttaacgccattgtaagcaaaaaagacctttgggaaacttatctgcctgcgttcaaggcgcttgtagacggcggcgttgaatccgtaatgggcgcatataaccgcaccttaaacgaagcttgctgtgcaagcaatttcctgcttaaagatattcttcgagggcgatggggatttaagggtcatgttgtttcagattgctgggctatccgtgattttcacgaatatcataaaattacaaattcgcccgaagaatcggcggctcttgcgcttaacgccggatgcgatcttaactgcggctgtacttatccgatgttgactgtctcccataaaaagggacttgtcagcgaggaggcgattaatacggctcttgagcggttattgcgaacccgttttaagctgggaatgtttgatccgccgggatcgggtaaatacggaaaacttgggcgcaaagtaattaactgcgaaaaacacaaacggctcgcccttaaagcggcggagaagtcgattgttctgctaaagaacgataacggtcttttaccgctcaattcaaacccaaaaaatatcacggttgtcggtcccgcttcagctaacgctcacgctcttttcggcaactattacggagtcagcccccgttttattaccatactcgaaggattgggcgacaaagtaaaagataaattcggtatcaatttggaataccgtcagggctgtttgatgtacagcgaaaacagcaaaacgctcgccgcttacggagaagcgaatgttaccgattttattatcgccgtaatggggctggacggcgctatcgaaggagaggagggcgacgcaatcgcttcggactccaacggcgaccgtgatacgattgaacttccgtcatggcagttggattatctgcgaaaagtgcgggaggcgggcaaaaaaataattctcgttttaacgggcggcagtccaatcgcattccctgaagatattgcggacgccgttatttttgcgtggtattcaggcgagtcgggcggcaaggcggtggcggacattattttcggcgatacagttccgtcgggaaaactgccgattacttttccggcttctacaagccagcttccgccctacgttgattattccatgaaagggcgcacatatcgatatatgacggaaaagccgcagtacccctttggcttcgggctttcctatacaactttccgcttcgattcaatttcgttgtcgtcctcctcgctttccgcaggcggctcggtaaaggcgattgtaaccgtaaccaatacgggcaaaagggacgctgacgaagtggtgcaaatctatgtttccaaagacggacgaggcgaggacgaaccgttatcgtcgcttaaagatttccgccgtatttttatacaggctggaaaatccaaaaaagcggagtttgaactgccgtcttcggcgttgaaacggtaa

SEQ ID NO: 60136 - protein, 676 aa, Unknown
  Obtained from environmental sample
  DOMAIN (364)...(594): Glycosyl hydrolase family 3 C terminal domain
  misc_feature (1)..(676): Xaa is any amino acid
MFNFHDIFLYYHYNIPIKIKQEYPMNREDKIKELISQMTLEEKVSQLLYKSPAIERLGIPEYNWWNECLHGVARAGIATVFPQAIAMAATFDDELVEQIATAISDEARAKHNEAVKQGNRGQYWGLTFWTPNINIFRDPRWGRGQETYGEDPCLTSRIGLALVRGLQGKDTENLKLAACAKHFAVHSGPERERHTFNAIVSKKDLWETYLPAFKALVDGGVESVMGAYNRTLNEACCASNFLLKDILRGRWGFKGHVVSDCWAIRDFHEYHKITNSPEESAALALNAGCDLNCGCTYPMLTVSHKKGLVSEEAINTALERLLRTRFKLGMFDPPGSGKYGKLGRKVINCEKHKRLALKAAEKSIVLLKNDNGLLPLNSNPKNITVVGPASANAHALFGNYYGVSPRFITILEGLGDKVKDKFGINLEYRQGCLMYSENSKTLAAYGEANVTDFIIAVMGLDGAIEGEEGDAIASDSNGDRDTIELPSWQLDYLRKVREAGKKIILVLTGGSPIAFPEDIADAVIFAWYSGESGGKAVADIIFGDTVPSGKLPITFPASTSQLPPYVDYSMKGRTYRYMTEKPQYPFGFGLSYTTFRFDSISLSSSSLSAGGSVKAIVTVTNTGKRDADEVVQIYVSKDGRGEDEPLSSLKDFRRIFIQAGKSKKAEFELPSSALKR

SEQ ID NO: 60137 - DNA, 390 bp, Unknown
  Obtained from environmental sample
  misc_feature (1)..(390): n is a, c, g, or t
atggaaattaaacaaaataaaaagggctttattatggcgggcgaattacagctaaaataccccatcgtccttgtgcatggaattattgcgcatgacagaccgagttttaacaaattttggggcagaattccgcaaacattacgggaaacagggacaaaggtgttttttggaaatactgacgcatggggcgacattaaatcaaacgcaaaaatattaaaaacatcgatagataaaatattggacgaaacaaagagcgaaaaggtaaatataatcgctcactccaaaggcggattggattcccgttattttatctggaaatacaattacggagacaagatagcaagtttaaccacaatatcgacgcctcatcacggcctcggccgattctga

SEQ ID NO: 60138 - protein, 129 aa, Unknown
  Obtained from environmental sample
  misc_feature (1)..(129): Xaa is any amino acid
MEIKQNKKGFIMAGELQLKYPIVLVHGIIAHDRPSFNKFWGRIPQTLRETGTKVFFGNTDAWGDIKSNAKILKTSIDKILDETKSEKVNIIAHSKGGLDSRYFIWKYNYGDKIASLTTISTPHHGLGRF

SEQ ID NO: 60139 - DNA, 306 bp, Unknown
  Obtained from environmental sample
  misc_feature (1)..(306): n is a, c, g, or t
ttgaaacaattgagcctaaatggcaaaagtattggatctgacaacaaaacctttaaaactgaggaaaatccgaattttcccaaagacaagcgtcgttatgtgcttgatatgtttccctatccttcggggcgggggcttcatgtcggtcatcctgaggggtataccgccacggacatttactgccgttacctccgcatgaacggctacaatgttttacacccgatgggttttgacgctgacggtctgcctgccgaaaattacgctattcaaagcaggtactcatgccgccgttacgaccgctgctaa

SEQ ID NO: 60140 - protein, 101 aa, Unknown
  Obtained from environmental sample
  misc_feature (1)..(101): Xaa is any amino acid
MKQLSLNGKSIGSDNKTFKTEENPNFPKDKRRYVLDMFPYPSGRGLHVGHPEGYTATDIYCRYLRMNGYNVLHPMGFDADGLPAENYAIQSRYSCRRYDRC

SEQ ID NO: 60141 - DNA, 1647 bp, Unknown
  Obtained from environmental sample
  misc_feature (1)..(1647): n is a, c, g, or t
gtggaaaaacttacaacgcctgagcaaaaacaggctgtcgcctcttacattgaagacgcggcaaaaaagagcgatcttgaacgaaccgatcttgcaaaagaaaagaccggcgtgttcagcggcgcgtatgcgattaatcccgttaacgatgaaaaaatcccaatttggatagccgactatgtcctaatctcttacggaacaggcgccatcatggcagttccggcccatgacgaacgcgactgggaatttgccaaagagtttaatctgcctattattgaggttgtagcttccgaaaagccgcaggccggaaaagactattcaggcgagcctgcggaatgtaccgtggcggacggttattccgtaaactcaggcgcttttacggggcttcccacggaagaatcgaagaagcgcataacagaatggcttgaagaaaaaggcattggcaaacacgcggttaattacaaattaagagactgggttttttcccgccagcgttattggggagagcctatccccattgtgcactgcgaaaaatgcggcattgttccgttatctgaaaatgatctgccgttaaggctgccgcaggttaaatcctacaagcctactggcacgggcgaatccccgcttgcggcaattaccgattgggtaagtactgtttgtcctaagtgcggcggaaaagcaaaaagggaaacaaacaccatgccgcaatgggcgggttccagctggtattacatccgctatcttgatccgaaaaacgacaaggtttttgccgcaaaagataaagttgattactggcttcccgtcgatctgtatatcggcggagttgaacacgcggtgcttcaccttttgtacagccgcttctggcacaaagtgttatacgatctcggtcttgtaaacacagtagagccttttcagcgtttggttaatcaggggatgattcttggagaagacaatcagaagatgagtaagagccgagggaatgtaataaaccccgatgatattatcaaagagtacggggcggattctttgcgtgtctatgaaatgtttatgggtccgctggaggtgagtaagccgtggaacatggcgggcgttaccggcgtgtcccgttttctggaacgtctttgggcgataagcgataaacctgtaagtgaagcaacaccgggcagcgaacaagccggcggcgctgaattgcaaaaactcctgcacaggacaatagaaaaggtgacaaaagacacatcaaccctcaactttaacaccgcaatcagcgcgatgatgatctactcaactgaactcgccaaattaactgaaattccgcgcgccatgtgggagccgtttgtgataatggctggggcttatgctccgcaccttggcgaagaactctgggaaaaactcgggcacaaagaatctgtttccttaagccaatggccctcttttgatccggcattgaccgtttttgacgaggtgactattgtagtccaggtgggaggtaaaattcgcgagaaatttaccgccgccgccggaacggcgaaagaggaacttgaaaaaacagcccttaccctgcccggaacgcaaaaatggcttgaggggcagacaatagcgaaggttattacagtaccggataaattagtgaatattgtgttaaaatga

SEQ ID NO: 60142 - protein, 548 aa, Unknown
  Obtained from environmental sample
  DOMAIN (2)...(356): tRNA synthetases class I (I, L, M and V)
  misc_feature (1)..(548): Xaa is any amino acid
MEKLTTPEQKQAVASYIEDAAKKSDLERTDLAKEKTGVFSGAYAINPVNDEKIPIWIADYVLISYGTGAIMAVPAHDERDWEFAKEFNLPIIEVVASEKPQAGKDYSGEPAECTVADGYSVNSGAFTGLPTEESKKRITEWLEEKGIGKHAVNYKLRDWVFSRQRYWGEPIPIVHCEKCGIVPLSENDLPLRLPQVKSYKPTGTGESPLAAITDWVSTVCPKCGGKAKRETNTMPQWAGSSWYYIRYLDPKNDKVFAAKDKVDYWLPVDLYIGGVEHAVLHLLYSRFWHKVLYDLGLVNTVEPFQRLVNQGMILGEDNQKMSKSRGNVINPDDIIKEYGADSLRVYEMFMGPLEVSKPWNMAGVTGVSRFLERLWAISDKPVSEATPGSEQAGGAELQKLLHRTIEKVTKDTSTLNFNTAISAMMIYSTELAKLTEIPRAMWEPFVIMAGAYAPHLGEELWEKLGHKESVSLSQWPSFDPALTVFDEVTIVVQVGGKIREKFTAAAGTAKEELEKTALTLPGTQKWLEGQTIAKVITVPDKLVNIVLK

SEQ ID NO: 60143 - DNA, 1575 bp, Unknown
  Obtained from environmental sample
  misc_feature (1)..(1575): n is a, c, g, or t
ttgtggaaggactcaggcgctttcgagcctcaaccgagccgcaaatgcggcgaaggctattttaccattgtgattcctccgcctaacgtaactggcgtcctgcaccttgggcacggccttaataacagccttcaggacataatagtccgtttccaccgcatgaggggggcatccaccctttgggttcccggcacggatcacgcggggattgccacccagaatgtggttgagaccaaacttaaagaaaaggggacaaaccgccgcgagttgggcagggaaaagttccttgaagagacatggaaggtaaaaaacgagaatcacgcgagaatttcaaaacagcttgaaaaaataggggcaagcgtcgaatggaagcgcgagcgttttactatggacgaaggtctttcacaggcggtgcgtgaagtttttgtcactctttacgaaagaaatctcttatacaagggaaactaccttgtaaactggtgtacctcctgcggcaccgcccttgccgacgacgaagttgagcatgaagataccaagggttatatgtaccatattcgctattatttttccgacgacaaggataaatatatcgaaattgccacaacgcgccctgagacgctgttaggcgacacggccgtggccgtccatcccgaagacgagcgttacggcgcgctgaaaggcaagacgctccgcctgcccttaaccgaaagggacataccgttgatctttgacgcttatgttgagcgcggctttgggacgggagcgttaaaagtaacgcccgcgcatgatccaaacgactgggaactttccaagcggcacaaccttgccgtgattaacattcttaaccccgacggcacgcttaataatgaagtgccggaaaaataccgcgggctttccgtatcaaaggcaagggcggttgtaatagaagatttgaaggccggcggctggtacgtgaaagaagagcctattaaacactctgtcgggaagtgttaccgctgccagacggtgatagagcctttcctttcagaacagtggtttgtaaaaatgaaacccttagcggataaagctctggaaagctggcaaaaaggcgaaataattttctatccaaaaaaatgggagaacacttacaagcactggatggaaaacatacgcgactggtgcataagccgccagttgtggtgggggcacagaatccccgcatggacttgcgccgactgcggcaaattgacggtttcacgcacagacttaagcgaatgtccgcattgcaggagcgggaatatcgctcaggacccagacgtgcttgacacatggttttcaagctggctgtggcctttcagcactttaggttgggagaaagtagggagcgatactcccgatctgcaaaagttttatcctacgacaacattaattaccgcctacgacataattttcttctgggtggcgagaatgataatggcgggattggaatttacgggcaaggcgcctttccgcgacatttacattcacggcattgtgcgcgacatgcaggggcgcaagatgagcaagtccaaaggcaacgggatagacctcgcttga

SEQ ID NO: 60144 - protein, 524 aa, Unknown
  Obtained from environmental sample
  DOMAIN (2)...(524): tRNA synthetases class I (I, L, M and V)
  misc_feature (1)..(524): Xaa is any amino acid
MWKDSGAFEPQPSRKCGEGYFTIVIPPPNVTGVLHLGHGLNNSLQDIIVRFHRMRGASTLWVPGTDHAGIATQNVVETKLKEKGTNRRELGREKFLEETWKVKNENHARISKQLEKIGASVEWKRERFTMDEGLSQAVREVFVTLYERNLLYKGNYLVNWCTSCGTALADDEVEHEDTKGYMYHIRYYFSDDKDKYIEIATTRPETLLGDTAVAVHPEDERYGALKGKTLRLPLTERDIPLIFDAYVERGFGTGALKVTPAHDPNDWELSKRHNLAVINILNPDGTLNNEVPEKYRGLSVSKARAVVIEDLKAGGWYVKEEPIKHSVGKCYRCQTVIEPFLSEQWFVKMKPLADKALESWQKGEIIFYPKKWENTYKHWMENIRDWCISRQLWWGHRIPAWTCADCGKLTVSRTDLSECPHCRSGNIAQDPDVLDTWFSSWLWPFSTLGWEKVGSDTPDLQKFYPTTTLITAYDIIFFWVARMIMAGLEFTGKAPFRDIYIHGIVRDMQGRKMSKSKGNGIDLA

SEQ ID NO: 60145 - DNA, 2520 bp, Unknown
  Obtained from environmental sample
  misc_feature (1)..(2520): n is a, c, g, or t
gtggctgtcgaagatttctttccgctgacttttaacacgatgtgcatggcggcggaaaatcctgagcttgcccctgttatttcggttataacaaaagctctgagaaacggcggtatccagcatattaacaaactgtacaatgaaggtcaaaataattacataagaaataaattcttaagtagtttaagcgtcgaagaaaaagcgtatttacaaaatacttccgttgtgtcggtaacagccgcgccgtggttttacccgcttgactatttcaacaaatttgaaaatagatgggagggtattgccttcgacgtacttgacgaagtgacaaaacttaccggactttcttttgaggtcgtcaattccggggacgcgtcctgggccgaggtatttcaaatatttaatgacggggcttcaatatgtctcgatctgattgcttccccggaacggctcagccgctatttatggtcgaaatacatatacctgtcggaaaattatgctctcgtgtccagatataattttccgaatatcggtatcagcgaaatacaatactcgaaaatcggtctgataaaaagtacagcctgggctaatatgtttcaggactggtttcctgaagccgtaaatacaactatgtatgattcccaggacgaagcttttatggccctggaccgtggcgaagtagaccttgttatggccggtactaacgcccttttcgccttgactcattattatgaattttcaaattataaagcaaattatgtatttaacagtaccattgattatgttatcgcctacaataaaagcgaagactctcttttgtctgttattgacaaagcgcttgcgtatgtcgatataaaaactatttcaaaacgctgggaaagtaaaacatttgattataaatcaaaaacaatgagggaacagcgtccgtggctgatcggggcaatttgcctgactttgagcgcgcttttctttattctcattctttaccgaaaaaaccacatgataaaaaaacagcttgaaataatattgaacaatgttgaaagcggcattatcataattgacattgaaacccgtaaaattttggatataaacccgtttgttgcacgcttgtacggcggcgacagagataaaattatcggacaaagctgcaaaacacttttttgcacagaggaaggctgtcctatactggatcatcaaaagtttttagagcattccgagcggcaatttaaaactgcgggcggcgaaattattccggttataaaatccgtatcgaaaatcaattataacggacaccctgcgttactggaaaattttgcggatatatcgtatttgaaaaaagcggaggaagcaaagagcgcgtcagaggcaaagagccgttttatagcaaacatgagccacgaaatacgaacgccgcttaacgcgataaccggcatgacgacaatcggcaaaactgcggataatttggaacgcaaagattatgcgtttgacaagataaaagacgcatcagcgcatctgctcggcgttattaacgatatattggatatatcaaaaatcgaagcgaatatgctggaactttctcccgttgaatttaactttgaaaatatgctgcaaaaaatcgctgcggttatcaatttccgcgtggacgaaaaacagcaaaaattttcgatttatattgacggtaaaattccccaaaccattatagccgacgaacagcggctgtctcaggttattaccaatcttttaagtaacgcggtaaaattcacgccggaaaaaggatcggtcactcttgatgcgagctgtattagagaagaagatgatgtttgcataatacaaatttccgtaacagataccggaatcggcataaccgaagaacagcaaaaactactgttcaagtcttttcagcaagccgagagcagtacgacgcgcaaatacggcggcacggggctggggcttgcgatttccaaaagcattgtagaaatgatgggcggcaaaatatggatcaaatccgagcccgataagggctctacttttagttttacgatcatggcgaaaagaggcaaaaccgctgaaaccgtcaatggacataccgccggggacagccgacaagcggaagaaacgcagacggatattaacggtctttttgcggggcggcgcgttttgctggtagaagatgtggaaatcaaccgcgaaatcgtactttccctgcttgaaccaacacagttggagatagactgcgctgaaaatggcgcggaagccgtacgcatgttcagcgaagacccgaacaagtacgagttgatttttatggacgtacagatgcccgaaatggacggctatgaggcgacgcggcgtatccgctcgctggatacgtcaaatggaaaaaccgtcccgatcgtagccatgaccgcgaatgcgtttcgcgaagatatagaagaatgccttgctgccggtatggacgatcatattgggaaaccgattgatttcgaaaaggtcatagaaaaactgtgcgcttatttgccaaaataa

SEQ ID NO: 60146 - protein, 839 aa, Unknown
  Obtained from environmental sample
  DOMAIN (76)...(294): Bacterial extracellular solute-binding proteins, family 3
  misc_feature (1)..(839): Xaa is any amino acid
MAVEDFFPLTFNTMCMAAENPELAPVISVITKALRNGGIQHINKLYNEGQNNYIRNKFLSSLSVEEKAYLQNTSVVSVTAAPWFYPLDYFNKFENRWEGIAFDVLDEVTKLTGLSFEVVNSGDASWAEVFQIFNDGASICLDLIASPERLSRYLWSKYIYLSENYALVSRYNFPNIGISEIQYSKIGLIKSTAWANMFQDWFPEAVNTTMYDSQDEAFMALDRGEVDLVMAGTNALFALTHYYEFSNYKANYVFNSTIDYVIAYNKSEDSLLSVIDKALAYVDIKTISKRWESKTFDYKSKTMREQRPWLIGAICLTLSALFFILILYRKNHMIKKQLEIILNNVESGIIIIDIETRKILDINPFVARLYGGDRDKIIGQSCKTLFCTEEGCPILDHQKFLEHSERQFKTAGGEIIPVIKSVSKINYNGHPALLENFADISYLKKAEEAKSASEAKSRFIANMSHEIRTPLNAITGMTTIGKTADNLERKDYAFDKIKDASAHLLGVINDILDISKIEANMLELSPVEFNFENMLQKIAAVINFRVDEKQQKFSIYIDGKIPQTIIADEQRLSQVITNLLSNAVKFTPEKGSVTLDASCIREEDDVCIIQISVTDTGIGITEEQQKLLFKSFQQAESSTTRKYGGTGLGLAISKSIVEMMGGKIWIKSEPDKGSTFSFTIMAKRGKTAETVNGHTAGDSRQAEETQTDINGLFAGRRVLLVEDVEINREIVLSLLEPTQLEIDCAENGAEAVRMFSEDPNKYELIFMDVQMPEMDGYEATRRIRSLDTSNGKTVPIVAMTANAFREDIEECLAAGMDDHIGKPIDFEKVIEKLCAYLPK

SEQ ID NO: 60147 - DNA, 1371 bp, Unknown
  Obtained from environmental sample
  misc_feature (1)..(1371): n is a, c, g, or t
ttggtaaatcaggaaggatggggctggctggtttcattctacattcccatcataaattccgcaggaaaaacagtgggaatagccgcctgtgattatgacgggaatcatcttcataataccattatcaaaaacatacagaggcagatagttataggggtaatttccatactattcggtcttgcgatggtcatgcttttactacggcaaattttttcacccatcggcaaaatcaattctatcctgaaagaaatttcattgggtgagggagacttaaccgggaggatcgaagtgggcagggataatgagatcggggaacttgccggttacttcaaccttactatggaaaaaataaaaaatcttgtaagaacaataaaatataaaatcaacgggcttaaccataccggttttgagctttccgccaatatggaaaaaacctctacagcggtggataaaatttcattcagccttgacagcatggaaaatcttgtggttaaacaggaaaacggagccttagtagcgggcggggcggtaggggcaataaaaacaaatattgacagccttaacaaaatgatagagcaacaggctgaaagcgtagataagtcttcttcccgcatagaagaaatgacggctaatattcattcggtaacccagacactcgcggaaaacagtaaaaacgtcggcgttttggtcgaagcctcggagaacggcaaaacagggctccagacagtcgcccaggaaatacaggaaatatcccgtgagtccgaaggcctgttggaaataaactccgtgatggaaaacatagccagccagaccaacctgctttcgatgaacgcggcgatagaggcggcccacgccggtgaggctggcaagggcttcgcggtagtcgccgatgaaatccgcaaacttgcggaaagttccagcgagcagtccaaaacaattggccaggtactgaaaaaaatagcggaatccatcagaaaaattacaagttccaccgacaacgtgctaaaaaaattcggggcgattgactcgggagtcaagaccgtctcggatcaggaagcgaatatccgcaacgcgatggaagaacagggtgagggaagcaaacaggtactgcaaagcgtgggcgatttgaacgggcttacccagcaggtgaagagcggttccgaggagatgcttaacggcagtcaggaagtaataaaggaaagccagcatcttgaaaaggtgacgcaggaaattacaggaggcatgaacgagatggcgtccggagcggatcagataaatacggcggtacacaatgtcaatgacatgacccagaagaaccgagaggccattgacgctttaataaaagaagtttcacgcttcaaagtggagtga

SEQ ID NO: 60148 - protein, 456 aa, Unknown
  Obtained from environmental sample
  DOMAIN (48)...(119): HAMP domain
  misc_feature (1)..(456): Xaa is any amino acid
MVNQEGWGWLVSFYIPIINSAGKTVGIAACDYDGNHLHNTIIKNIQRQIVIGVISILFGLAMVMLLLRQIFSPIGKINSILKEISLGEGDLTGRIEVGRDNEIGELAGYFNLTMEKIKNLVRTIKYKINGLNHTGFELSANMEKTSTAVDKISFSLDSMENLVVKQENGALVAGGAVGAIKTNIDSLNKMIEQQAESVDKSSSRIEEMTANIHSVTQTLAENSKNVGVLVEASENGKTGLQTVAQEIQEISRESEGLLEINSVMENIASQTNLLSMNAAIEAAHAGEAGKGFAVVADEIRKLAESSSEQSKTIGQVLKKIAESIRKITSSTDNVLKKFGAIDSGVKTVSDQEANIRNAMEEQGEGSKQVLQSVGDLNGLTQQVKSGSEEMLNGSQEVIKESQHLEKVTQEITGGMNEMASGADQINTAVHNVNDMTQKNREAIDALIKEVSRFKVE

SEQ ID NO: 60149 - DNA, 402 bp, Unknown
  Obtained from environmental sample
  misc_feature (1)..(402): n is a, c, g, or t
ttgactcccgagtcaatcgccccgaatttttttagcacgttgtcggtggaacttgtaatttttctgatggattccgctatttttttcagtacctggccaattgttttggactgctcgctggaactttccgcaagtttgcggatttcatcggcgactaccgcgaagcccttgccagcctcaccggcgtgggccgcctctatcgccgcgttcatcgaaagcaggttggtctggctggctatgttttccatcacggagtttatttccaacaggccttcggactcacgggatatttcctgtatttcctgggcgactgtctggagccctgttttgccgttctccgaggcttcgaccaaaacgccgacgtttttactgttttccgcgagtgtctgggttaccgaatga

SEQ ID NO: 60150 - protein, 133 aa, Unknown
  Obtained from environmental sample
  misc_feature (1)..(133): Xaa is any amino acid
MTPESIAPNFFSTLSVELVIFLMDSAIFFSTWPIVLDCSLELSASLRISSATTAKPLPASPAWAASIAAFIESRLVWLAMFSITEFISNRPSDSRDISCISWATVWSPVLPFSEASTKTPTFLLFSASVWVTE

SEQ ID NO: 60151 - DNA, 1404 bp, Unknown
  Obtained from environmental sample
  misc_feature (1)..(1404): n is a, c, g, or t
atgttattgaccgaacttgaaataagtttcaacggcatggaaggcgatgaaagcacaaaacgcatattggcggcgttggaggtttttaaaaagggtctggataaggctttcgcgcctgttttgcgcctgctgggtttacatgaacattttgcggatgctaagttcattgaatttatgctcaagaatagtgatccggacggaatagcgtatgtggacaagtgtttcgccgcgctggagagcgccggattgtgcagtttgtttgttgaaagaatatataagttacatcccgccttacgcagttgtctgaccggactgcacccggcgggagaatctgacaagcgggcttttgtggacttaatgggtagttttgcgaacacatatagcgggaaagaacttcacgaacagcgggatgtgtttttattgtttggtgcaaatttctaccgagctttgagttttgcacaggaacttgatatacgggataatgagatggctttgattcaggcgctggcttcttatgcgtacaatgcggtgaattttgccgaagcggagatgttattcaaaaaattggttgacacggctcagaattataatatcactgaatatgaagccaatgcttaccatcaactggggacaattgcgtataaacggcgggatttagataccgccgaggactggtataaacaagcgctggtaattgctcagaaacaggataacgggcatagcctagccattattttccatcaactggggatagttgcggagggacggtgggatttagacgctgccgaggactggtacaaacgatcgctggcaattgatgagaaacagggaaacgaacatggcatggccattacttaccatcaactggggatggttgcggaggaacgtcgggatttagacgccgccgaggactggtacaaacgctcgctggcaataaagcagaaacagggaaacgagcatggcatggccattacttaccatgaattggggagggtcgcgcaggaacgtcgggatttagacgccgccgaagactggtacaaacgctcgctggcaattgatcagaaacaaggtgacgagcatggcatggccattacttaccatcaactggggatggtcgcggaggaacggcgggatttaaacgctgccgaggactggtacaagcaagcgctggcaattgatcagaaacagggtgacgaatatggcatggccggtacttaccatcaactggggatggtcgcggaggaacggggggatttagacgccgccgaggactggtacaagcagtcgtttactattttcgagcggttgaatgaccagcaaagcgcaaacattgtcaagaaaagtattatccgtcttcaaacattaaaatcagacaggcccgatggttcagaaaccaaagaatag

SEQ ID NO: 60152 - protein, 467 aa, Unknown
  Obtained from environmental sample
  DOMAIN (363)...(396): Tetratricopeptide repeat
  misc_feature (1)..(467): Xaa is any amino acid
MLLTELEISFNGMEGDESTKRILAALEVFKKGLDKAFAPVLRLLGLHEHFADAKFIEFMLKNSDPDGIAYVDKCFAALESAGLCSLFVERIYKLHPALRSCLTGLHPAGESDKRAFVDLMGSFANTYSGKELHEQRDVFLLFGANFYRALSFAQELDIRDNEMALIQALASYAYNAVNFAEAEMLFKKLVDTAQNYNITEYEANAYHQLGTIAYKRRDLDTAEDWYKQALVIAQKQDNGHSLAIIFHQLGIVAEGRWDLDAAEDWYKRSLAIDEKQGNEHGMAITYHQLGMVAEERRDLDAAEDWYKRSLAIKQKQGNEHGMAITYHELGRVAQERRDLDAAEDWYKRSLAIDQKQGDEHGMAITYHQLGMVAEERRDLNAAEDWYKQALAIDQKQGDEYGMAGTYHQLGMVAEERGDLDAAEDWYKQSFTIFERLNDQQSANIVKKSIIRLQTLKSDRPDGSETKE

SEQ ID NO: 60153 - DNA, 336 bp, Unknown
  Obtained from environmental sample
  misc_feature (1)..(336): n is a, c, g, or t
atgatgaattataaaggctatgccggcaaagccgaatacgacgatgaagccgaaaccttttatggcgaggttatcggccttcgggacgtagttacttttaagggttccagtgttaaagaattgcagaaatcttttaaagaaagcattgacgactacctcactttttgccagcgcatgggcaaagctccggatgttccggcttcaggcaggcttatactcaggataccgcccgaacttcattcgcttgccgccgttgccgcaaaatcagaaggcagaagtcttaacacctgggtagccgaagctgtaaaagaaaaattatcagagtactcgcgttaa

SEQ ID NO: 60154 - protein, 111 aa, Unknown
  Obtained from environmental sample
  DOMAIN (52)...(102): HicB family
  misc_feature (1)..(111): Xaa is any amino acid
MMNYKGYAGKAEYDDEAETFYGEVIGLRDVVTFKGSSVKELQKSFKESIDDYLTFCQRMGKAPDVPASGRLILRIPPELHSLAAVAAKSEGRSLNTWVAEAVKEKLSEYSR

SEQ ID NO: 60155 - DNA, 342 bp, Unknown
  Obtained from environmental sample
  misc_feature (1)..(342): n is a, c, g, or t
atggnnnttccatggacaagaatcggcacgagcgaatcctatgatcagtacgagattcctttgtccagtcacgaagacaaaaagttttatctaaaagaaggggagtcttatgatcttaccttctttcagggttcagttatagatatcaagattccgtacaaagtggtttttaccgtggcggagtcggagaattacgtcaaaggcgatacagtttcaggggcgaccaagcctgttgttaccgagacaggtcttaccgttcgggttcccctttttataaaacagggcgaaaagatccgtgtgaacaccgaaaccaacgaatatcttgaacgggtaaacgattag

SEQ ID NO: 60156 - protein, 113 aa, Unknown
  Obtained from environmental sample
  misc_feature (1)..(113): Xaa is any amino acid
MXXPWTRIGTSESYDQYEIPLSSHEDKKFYLKEGESYDLTFFQGSVIDIKIPYKVVFTVAESENYVKGDTVSGATKPVVTETGLTVRVPLFIKQGEKIRVNTETNEYLERVND

SEQ ID NO: 60157 - DNA, 720 bp, Unknown
  Obtained from environmental sample
  misc_feature (1)..(720): n is a, c, g, or t
atgaatagtttttcgaaattttttgtgaagctatgcttcagtatcttccttataaccgcgttattgccaagatcaaattttttggaatataaacctatggcgttactttttcaggtcgggggatacattggtatcgctatacttgtaatgacaataatagcttttatcatccaattgctccccaaaaataaacagtctgcgacagtcatagaaaaagataagcttatacttcatgatctggatgctgaaacagctttggaattattcaaagatgtgaataacgcccagttcttttgtgccaacaaaaaaatagcgccatgccatggttggtacagctgctggcttcaaactcccggcctttgcataatgcatgatggtactgaatctctgggaaaacaaatcgcgtcttgcggtgaatttatcattataagcaaaaatctatacggtggattcagcgctgaaataaaaaacgcgctggacaggtcaatttcttccgcattgccctttttttgtgttcgcaacaatgaactgcaccaccaaccaagatacccaagcatcggtaggataacggcatacatctataacgcaaatgaaatatctactgccgataaggaatctttaatggaaataacaaaagcaaatggcattaatatgaacaaaagcgagtacgaaacaatttttgtgaatgacgtaaatgagctgagagaggtatttatatga

SEQ ID NO: 60158 - protein, 239 aa, Unknown
  Obtained from environmental sample
  SIGNAL (1)...(28)
  misc_feature (1)..(239): Xaa is any amino acid
MNSFSKFFVKLCFSIFLITALLPRSNFLEYKPMALLFQVGGYIGIAILVMTIIAFIIQLLPKNKQSATVIEKDKLILHDLDAETALELFKDVNNAQFFCANKKIAPCHGWYSCWLQTPGLCIMHDGTESLGKQIASCGEFIIISKNLYGGFSAEIKNALDRSISSALPFFCVRNNELHHQPRYPSIGRITAYIYNANEISTADKESLMEITKANGINMNKSEYETIFVNDVNELREVFI

SEQ ID NO: 60159 - DNA, 432 bp, Unknown
  Obtained from environmental sample
  misc_feature (1)..(432): n is a, c, g, or t
atgttcaggaaattgcttttcttatgtgttttactactgattgttgaaacttcttttgcggacaatatttatacaaccattgagattaacggagtaattgttaacggcggtttggtttatgtggctatatactcaaatgagaatgattataaagcggaaactccttccataaaatttattcttgatcctgtgaatagcacaattactcgcaatcttgaattgtctgatggggaatatgtagtttctgcttttcaggataaaaacggcgatgaaaaactaaattccggcctctttggaataccggcagagcttgtcggtaaaacaaactacaatctcaggggatcgccgggcagttttaacaaattgaaaatgcctgtaaataacaattcaacaagactgattgtaaacatgggaaaagtgagaatgatatga

SEQ ID NO: 60160 - protein, 143 aa, Unknown
  Obtained from environmental sample
  SIGNAL (1)...(20)
  misc_feature (1)..(143): Xaa is any amino acid
MFRKLLFLCVLLLIVETSFADNIYTTIEINGVIVNGGLVYVAIYSNENDYKAETPSIKFILDPVNSTITRNLELSDGEYVVSAFQDKNGDEKLNSGLFGIPAELVGKTNYNLRGSPGSFNKLKMPVNNNSTRLIVNMGKVRMI

SEQ ID NO: 60161 - DNA, 447 bp, Unknown
  Obtained from environmental sample
  misc_feature (1)..(447): n is a, c, g, or t
atgatactaaagattgagcaaaatccgacgtatggggatattgagatagtaattacatacccggtaaagaataaaatcgtagagcgtattgtttcattgataaaatctgttgatgcgcaaatagaatgttattcggatgatattgtaaaattggttaatgtttctgatatttattacattgaaagtattgacggaaaaactgttgtctgctgtgaaaaagagaagtatattgttaagagccgtctgtatcagatatatgaaaaattaaaggacagcggttttatacaaattagtaaatactgcgttttgaatattaacaagctggacaaattcaggccgttggacaataatcgtctggaagcggtattatctaacggggtttacctgtgtattaccagaaaatatatttccggtataaaacagatattacgggagatgaataaatga

SEQ ID NO: 60162 - protein, 148 aa, Unknown
  Obtained from environmental sample
  DOMAIN (47)...(144): LytTr DNA-binding domain
  misc_feature (1)..(148): Xaa is any amino acid
MILKIEQNPTYGDIEIVITYPVKNKIVERIVSLIKSVDAQIECYSDDIVKLVNVSDIYYIESIDGKTVVCCEKEKYIVKSRLYQIYEKLKDSGFIQISKYCVLNINKLDKFRPLDNNRLEAVLSNGVYLCITRKYISGIKQILREMNK

SEQ ID NO: 60163 - DNA, 588 bp, Unknown
  Obtained from environmental sample
  misc_feature (1)..(588): n is a, c, g, or t
ttgggccgaattcccgccgtgttgtatgggcgtaccggcaaggcaatttccattgatttggatgccctggaatttgctaacgggataaagaatatttccgaaagtaccattgtaaaagtggaagttgatgggaagtcctacgacgcctttgttaaggatacacagagaaacattgttgacggaaacatccttcatgttgatttttatgaagtagaaagcggtattgcccttagggccagagtctccatcaaccttaaaggaaacgctattggcgtcagggatggaggcgttctggaatttcccctccatgaaatcgaagtggagtgtttgcccaaggatcttcccgaaaggattgagcttgatatctcgactcttggcgtcaaccagtccatccatgtgcgcgatatacccctggccagtacaatcaggcttatttcagccccggatcaggttgtcgctctggtgaagtacgccaaggagcaggccgcggcggcgccggcggaaggggaagcagcagcgggcgcggcagcaacagcggcgactgcagcggcaccggaagcagccaagacccangacaaggacaagtaa

SEQ ID NO: 60164 - protein, 195 aa, Unknown
  Obtained from environmental sample
  DOMAIN (2)...(68): Ribosomal L25p family
  misc_feature (1)..(195): Xaa is any amino acid
MGRIPAVLYGRTGKAISIDLDALEFANGIKNISESTIVKVEVDGKSYDAFVKDTQRNIVDGNILHVDFYEVESGIALRARVSINLKGNAIGVRDGGVLEFPLHEIEVECLPKDLPERIELDISTLGVNQSIHVRDIPLASTIRLISAPDQVVALVKYAKEQAAAAPAEGEAAAGAAATAATAAAPEAAKTXDKDK

SEQ ID NO: 60165 - DNA, 918 bp, Unknown
  Obtained from environmental sample
  misc_feature (1)..(918): n is a, c, g, or t
gtggttccggccgccattgaggaaataaaagcccacttcaaagaattaccccccttcggcccttttaaccagagcctttgggatatgctccgctcccccgccctcgcctccgactccttaagcggccagttggaatatatgcgcaaacattggggtgcgttattggggaaattcgcgtcgaggatgcttttcgggctggacattatcagcgaggaggagaaaccgagtttcatgggccccggccccagcgaggtgatgagctttgccgggctggacgaatacgagcgtttcagtccggatcaggaatggatgcccaatacggtgctgatagcgaaaagcaccctggtctggctgttccagatctctcaaaaatacggcagggaaattaccaaactggatcagattcccgacgaagaactggacgagcttgcccgcaggggttttaccgggctttggcttatcggcctgtgggaacggagcaaggcgagcaggacgatcaaacagtggatgggcaaccccgaagccgcggcttccgcctacagcctttacgactatgacatcgccggagagttaggcggctggggcgccctcgccaacctcagggatcgctgcatgaagcgcggaataaggctcggctccgacatggtgccaaaccataccggcatagacagccgctggatggtagaacaccctgaccggtttttgcagctgccgtatccgcccttccccacctacaactacaactgcgggaatctttcgggcagggacgatataaccgtccaaatcgaagaacattattttaaccatagcgacgcggcggtcgtcttaaaaggattgacaacaacacgggccatacccgttacatctaccacggcaatgacggcacctccatgccctggaacgatacggcccagatag

SEQ ID NO: 60166 - protein, 305 aa, Unknown
  Obtained from environmental sample
  misc_feature (1)..(305): Xaa is any amino acid
MVPAAIEEIKAHFKELPPFGPFNQSLWDMLRSPALASDSLSGQLEYMRKHWGALLGKFASRMLFGLDIISEEEKPSFMGPGPSEVMSFAGLDEYERFSPDQEWMPNTVLIAKSTLVWLFQISQKYGREITKLDQIPDEELDELARRGFTGLWLIGLWERSKASRTIKQWMGNPEAAASAYSLYDYDIAGELGGWGALANLRDRCMKRGIRLGSDMVPNHTGIDSRWMVEHPDRFLQLPYPPFPTYNYNCGNLSGRDDITVQIEEHYFNHSDAAVVLKGLTTTRAIPVTSTTAMTAPPCPGTIRPR

SEQ ID NO: 60167 - DNA, 1032 bp, Unknown
  Obtained from environmental sample
  misc_feature (1)..(1032): n is a, c, g, or t
atgccctggaacgatacggcccagatagacttccttaaccccgaagcgcgcgaagcggtgatccggacgattatcggcgtgtgccagcaattctcgattgtgcgctttgacgcggcgatgaccctcgccaagcggcatatacagcgcctgtggttcccggtgccggggacgggcggggccatagcaagccgcgcggaacactccatttccaacgatgaattcaaccgccgcattcccaatgaattctggcgcgaggttgtggatcgctgcgcggccgaggccccccacaccctgctcctcgccgaggccttctggatgatggaaggctactttgtccgcacgcttggcatgcaccgcgtgtacaattcggcgtttatgaacatgctgaaaaacgaggacaacgcgaagtaccgggcgacgattaaaaacactatggaattcgatccggaaatcctaaagcgttttgtcaattttatgaacaacccggacgaggaaaccgccgtggcgcagttcggcaagggagacaaatacttcggcatctgcaccctccttgtcaccatgccgggcctgcccatgttcgggcatggccagatcgagggctttgaggaaaaatacggtatggaataccgcagagcctaccgcgacgagaagcccgacggttatctggtggacaggcatgagcgtgaaattttcccgctgatgaaacggcgggccctgttttcgggcagcagcgggttcaggctctacgacgtatataccgaaggcggatcggttaacgagaatgttttcgcgtattcccaccgcgcctggatctacggccatgaggagagggcgcttatcttctataataactcgtattacgagaccgccggatggataaaaccagcgatccggcgattccgcacggcaacggaggcagacagcgggacagcctgcacgaggccctctgtctgcaccatggggataaatggtntacgctgttcagggatcagcgctctaacctgtggtacatacgctcatcaaaacagataa

SEQ ID NO: 60168 - protein, 343 aa, Unknown
  Obtained from environmental sample
  misc_feature (1)..(343): Xaa is any amino acid
MPWNDTAQIDFLNPEAREAVIRTIIGVCQQFSIVRFDAAMTLAKRHIQRLWFPVPGTGGAIASRAEHSISNDEFNRRIPNEFWREVVDRCAAEAPHTLLLAEAFWMMEGYFVRTLGMHRVYNSAFMNMLKNEDNAKYRATIKNTMEFDPEILKRFVNFMNNPDEETAVAQFGKGDKYFGICTLLVTMPGLPMFGHGQIEGFEEKYGMEYRRAYRDEKPDGYLVDRHEREIFPLMKRRALFSGSSGFRLYDVYTEGGSVNENVFAYSHRAWIYGHEERALIFYNNSYYETAGWIKPAIRRFRTATEADSGTACTRPSVCTMGINGXRCSGISALTCGTYAHQNR

SEQ ID NO: 60169 - DNA, 1602 bp, Unknown
  Obtained from environmental sample
  misc_feature (1)..(1602): n is a, c, g, or t
ttggatctggcggcttttcttgttcaatcagactgggaaatactatcaaccggaggtacatcaaaacacctgcgaaaaaataaaatccccgttaccgatctttcctccataacaggctttcctgaatgtcttgacggcagggtgaaaaccctgcatccgacagtacacgcgggaatccttgcgcggcgggacgaagcttcccacatggataccctaaagaatctgggcattgaaaccatcgaccttgtctgcgttaacctctatccgttttttgaaaaagtgcaagccgccggcctttcagaggaggaaaccatcgagtccatcgacataggcggatcatccatgctgcgctcggcggcaaaaaatttccgcgatgtaattgtgctgaccgacactgccgattatcccgaagttatggaaggccttaagaagggaggtgtaagcccggagacaaggaagcgccttgccgaaaaagtttttgccctcacttcagcatacgacgccgcaattgccaggtatctattggaaccggacatgctaaaaaccgagtatcccgtcttttggccgatctctcttaaaaaagctcagaacctccgttacggcgaanacaaccaccagtcggcggcgctttacctgactgccgacaagccgggcgctttggcgggcatgcatcagctccacggcaaagagctgggcttcaacaacatccgcgatcttgatctggcatggaaggcggcctgcgcgttcgggtttcccactngaagaatcgcgccgatgggtgaagacgaagtgaagcgccttgtacctgtagcggcatcgagttcctccggcaaaatctgctgcgttgcggtgaagcacagcaccccatgcggcatagctctgggtacaacccttttggaagcttacgaaaaaacatttgcctgcgatcccgtttcgatatacggcggcatagtggcctgcaattcaaccgttgatgaagcgacggcatcgaaactgggcgaactctttctggaaattgtaattgccccggatttcgaaagcggcgctctggagatccttaaacgaaaaaaaaatctgcgtatcataaaagccgggtatgcccccagggacaccaaagaatacaccgctgttgacggcggccttcttgttcaggagacggacaaactgcttcttgaaaaatgggaagtggtatccagtgtcgcgcctgaagccgaagacattcccgatctgatttttggcataagagcggtaacttttgtcaaatcaaacgcagtattggttgttaaagatctggcggcgacaggtataggcggtggacaagtgaaccgcatctggccaacaacacatgccctccagcgaagcgccgccgctattaaggcgggcgctgagaaaggcggcccctgggcagacggcaagtgcgcaagggttctcgtctcggacgcgttctttcctttcgcggatgtagttgaagctgccgccgccgcaggaatcaaatccatcatccagccaggaggttccgtcaacgacaagctttccattgaagcctgcgacaggctgggagtcgcaatggtatttacaggaacaaggcattttaagcattaa

SEQ ID NO: 60170 - protein, 533 aa, Unknown
  Obtained from environmental sample
  DOMAIN (1)...(114): MGS-like domain
  misc_feature (1)..(533): Xaa is any amino acid
MDLAAFLVQSDWEILSTGGTSKHLRKNKIPVTDLSSITGFPECLDGRVKTLHPTVHAGILARRDEASHMDTLKNLGIETIDLVCVNLYPFFEKVQAAGLSEEETIESIDIGGSSMLRSAAKNFRDVIVLTDTADYPEVMEGLKKGGVSPETRKRLAEKVFALTSAYDAAIARYLLEPDMLKTEYPVFWPISLKKAQNLRYGEXNHQSAALYLTADKPGALAGMHQLHGKELGFNNIRDLDLAWKAACAFGFPTXRIAPMGEDEVKRLVPVAASSSSGKICCVAVKHSTPCGIALGTTLLEAYEKTFACDPVSIYGGIVACNSTVDEATASKLGELFLEIVIAPDFESGALEILKRKKNLRIIKAGYAPRDTKEYTAVDGGLLVQETDKLLLEKWEVVSSVAPEAEDIPDLIFGIRAVTFVKSNAVLVVKDLAATGIGGGQVNRIWPTTHALQRSAAAIKAGAEKGGPWADGKCARVLVSDAFFPFADVVEAAAAAGIKSIIQPGGSVNDKLSIEACDRLGVAMVFTGTRHFKH

SEQ ID NO: 60171 - DNA, 648 bp, Unknown
  Obtained from environmental sample
  misc_feature (1)..(648): n is a, c, g, or t
ttggcgagggccgagggacagcttgcgaaaacgcgcaaggagcgggggctgaagctgaattaccctgaggcgatagcctatattacatcggaacttttggaactcgcgcgcgacggccttaccgttaccgagcttatgcgggaaggcacaaaacttttgggcgcagacgacgttatggacggcgtcgccgagatgattcacgaaatccagcttgaggcgactttccccgacggcacaaagcttgtcaccgttcacgagcctattccctcaaacggaaaggcgcatcccggcgaatttatttttgacggcggacctatcaccgtaaacgcgggaaaagaaacaacagagattaaagtcgttaatacgggagaccgccctgtccagatcggctcgcactttcacttttttgaagttaacaaggcgctggactttgaccgagccgccgcgttcggaatgcggcttgatatcccctcgggcactgcggtcaggttcgagccgggcgacagccagactgtccgccttgtaaaaatcggcggggcgcggatggggcttggattgaacaaccttaccaacggcagtatggacgacccgaaaataaaaaccgccgctattgagaaagcgcacagtcagggatacaagggggcttaa

SEQ ID NO: 60172 - protein, 215 aa, Unknown
  Obtained from environmental sample
  DOMAIN (1)...(88): Urease, gamma subunit
  misc_feature (1)..(215): Xaa is any amino acid
MARAEGQLAKTRKERGLKLNYPEAIAYITSELLELARDGLTVTELMREGTKLLGADDVMDGVAEMIHEIQLEATFPDGTKLVTVHEPIPSNGKAHPGEFIFDGGPITVNAGKETTEIKVVNTGDRPVQIGSHFHFFEVNKALDFDRAAAFGMRLDIPSGTAVRFEPGDSQTVRLVKIGGARMGLGLNNLTNGSMDDPKIKTAAIEKAHSQGYKGA

SEQ ID NO: 60173 - DNA, 1752 bp, Unknown
  Obtained from environmental sample
  misc_feature (1)..(1752): n is a, c, g, or t
ttgagaaagcgcacagtcagggatacaagggggcttaacatgtttgagatgacaagaaaacaatacgctagcatgtacggccccacaacaggcgacaggattcgcctcggcgacacatcgatcattatcgaggttgagcgcgacttgacggtctacggagaggaagcgaaattcggcggaggcaaatccctgcgcgacggaatgggacagtcatgcaacgtaaaagacgccgactgccccgaccttgttatcacgaacgccgtcatcctcgatcacaccggaattattaaagcggacatcggcattaaagacggaaaaatctgcggcataggcaaggcgggaaaccccgacatcatggacggcgtaacaaagggactgacagtcggcgcgtccacggaaatcatcgccggcgagggaatgatcgttaccgctggcggcatcgacacccacatacactttatcagcccaacccaaattgaaaccgcgctgtattcgggagtaacaaccatgatcggcggcggcacagggcccgctgacggaacaaatgccaccacctgtacgccggggcgcttcaaccttgagaaaatgcttgaggcggcggaaggctacccgatgaacctgggtttcctcggcaagggcaacagttcttcccttaacgctcttatcgagcagatcgaggcgggagcgtgcgggcttaaaatccacgaggactggggctcaaccgccgcggttatccgagccgcccttgacgccgccgacaagtacgacgttcaagtcgccattcacaccgacacattgaacgagggcggctttgtcgaagacactctcgccgcgataggcgggcgcgtcattcacacataccacaccgaaggcgcgggcggcgggcacgcccccgacatcatcagggcggcagctctgccgaacattctgccgtcgtcaacaaatcccacaatgccttttaccgtcaacacggtagacgaacatcttgatatgctgatggtctgccaccacctggacagccgagtgcccgaagacgtagcttttgccgactcgcgcatccgccccgaaaccatcgccgcggaagacgtgcttcacgacatgggtatattctcgatgatgagttccgactctcaggcgatggggcgcatcggagaagttatcatgaggacatggcagacagcgagtaaaatgaaagaccagcgcggacatcttaccgaagacagcgagcgcaacgacaactatagggcaaagcgctatgtctccaagtacacgataaaccccgccgttacccacggcatagcggaatatacgggctctgtggaagctggcaaatacgccgatcttgttatctggaaccccgccctctttggcgctaagcctgagatgatcattaagggcggatacataatcgccgcgaaaatgggcgacgcgaacgcttccattccgacgcctcagcctgtaatatacagaaacatgttcggcgcttcggacttggcccgcaagcgcacatgcatcacatttgtgtcgacagcggcggcaaaaagcggaatcggcaaacggcttggacttgaccgcattgtccttccagtaaagaactgccgcaaactttccaaagcggatatgcgctttaacgaccgcacgggggacataaaggttgatcctgaaacatacaccgtaaccgtggacgggaaaaaaataacttgcgacccggctgaaaagctgagtttggcaagaggtattggttatttttaa

SEQ ID NO: 60174 - protein, 583 aa, Unknown
  Obtained from environmental sample
  DOMAIN (15)...(135): Urease alpha-subunit, N-terminal domain
  misc_feature (1)..(583): Xaa is any amino acid
MRKRTVRDTRGLNMFEMTRKQYASMYGPTTGDRIRLGDTSIIIEVERDLTVYGEEAKFGGGKSLRDGMGQSCNVKDADCPDLVITNAVILDHTGIIKADIGIKDGKICGIGKAGNPDIMDGVTKGLTVGASTEIIAGEGMIVTAGGIDTHIHFISPTQIETALYSGVTTMIGGGTGPADGTNATTCTPGRFNLEKMLEAAEGYPMNLGFLGKGNSSSLNALIEQIEAGACGLKIHEDWGSTAAVIRAALDAADKYDVQVAIHTDTLNEGGFVEDTLAAIGGRVIHTYHTEGAGGGHAPDIIRAAALPNILPSSTNPTMPFTVNTVDEHLDMLMVCHHLDSRVPEDVAFADSRIRPETIAAEDVLHDMGIFSMMSSDSQAMGRIGEVIMRTWQTASKMKDQRGHLTEDSERNDNYRAKRYVSKYTINPAVTHGIAEYTGSVEAGKYADLVIWNPALFGAKPEMIIKGGYIIAAKMGDANASIPTPQPVIYRNMFGASDLARKRTCITFVSTAAAKSGIGKRLGLDRIVLPVKNCRKLSKADMRFNDRTGDIKVDPETYTVTVDGKKITCDPAEKLSLARGIGYF

SEQ ID NO: 60175 - DNA, 738 bp, Unknown
  Obtained from environmental sample
  misc_feature (1)..(738): n is a, c, g, or t
ttgagcgaaagcagaaaaacgctggaaaaccttgtgcgcgaattaaaagagggcgaagttgaccgcgagaagacgcttaaggtaaaagaatttttaaacgagcttgcgcgcaatgcggaaacggagagcgaaacgctggaagccgaagaacgcgccatccgcaaattaaccaaagaaaaaagtcatggctcttcccgcgccgacggaaacgccgccgaagaaagcgattccgtctttgcccccggcgcggaagtttttgcggggaaatcaaaacagcgcggggtaattatccgcacggacaaaaaaaacgcccgctcctcggaggacgcggaaatttcatggctggtaaaaatcggttcgctgaaaataagttttccggagagcgagttaattcccgcggaaagcgcaaaccccggcgcaaaaacttccggtaaatccgcgggcaaaaaaaacgcgtttaagtcttgggaagcggagtacggcgcgtcaacggaagcggcttacgagataatgattcgcggaatgcgttttgaggacgctatggaagccgtccgcaaacagttagacgcggcggtaattttcgggatgaaacatttcgctgtcattcacgggaagggggaaggtattctgcggcagggcgtacatgactatttaaaaaaacatcccgcagtagcggagttttatttctcgcgccccgagatgggcgggtatgggcggacggaagtcgtacttaagtaa

SEQ ID NO: 60176 - protein, 245 aa, Unknown
  Obtained from environmental sample
  DOMAIN (170)...(245): Smr domain
  misc_feature (1)..(245): Xaa is any amino acid
MSESRKTLENLVRELKEGEVDREKTLKVKEFLNELARNAETESETLEAEERAIRKLTKEKSHGSSRADGNAAEESDSVFAPGAEVFAGKSKQRGVIIRTDKKNARSSEDAEISWLVKIGSLKISFPESELIPAESANPGAKTSGKSAGKKNAFKSWEAEYGASTEAAYEIMIRGMRFEDAMEAVRKQLDAAVIFGMKHFAVIHGKGEGILRQGVHDYLKKHPAVAEFYFSRPEMGGYGRTEVVLK

SEQ ID NO: 60177 - DNA, 594 bp, Unknown
  Obtained from environmental sample
  misc_feature (1)..(594): n is a, c, g, or t
atgtcaaaagggaaaaaactgtatcaggctaaacttgaaaaaatcccaagacccgaatttatagttctttacaacggagaaaaaaaataccccgattacaaagagctcaaactttctgacgcttttaaggacattgagggattgaaattagcggacagtaaaataataccgctggaattgatagtacatatttacaacgtaaatcacgggcataatatcgagatactgaaaaagagcgagacattggacgggtacagtatgtttatagacaagataagggaatatcaaaagaaaataaaaacccttgaaaaagcgtttaaatctgcgataaaatactgtatagagaacaatatactaaaagactatttagaggctcatgcctcggaggtattaaatatgctgttggaggactggaatcaagaggaatatgttgaagtcaggtgcgaagaagcaagggaagaaggtcgtgaggaaggtagagaagaaggcgaggaaaaaagtcgtcagtatttttttgagttgcttaatcagggattgtctgtcgaagaaataaaagagcggattcgtaaagaaaatatgcctcggaggtattaa

SEQ ID NO: 60178 - protein, 197 aa, Unknown
  Obtained from environmental sample
  misc_feature (1)..(197): Xaa is any amino acid
MSKGKKLYQAKLEKIPRPEFIVLYNGEKKYPDYKELKLSDAFKDIEGLKLADSKIIPLELIVHIYNVNHGHNIEILKKSETLDGYSMFIDKIREYQKKIKTLEKAFKSAIKYCIENNILKDYLEAHASEVLNMLLEDWNQEEYVEVRCEEAREEGREEGREEGEEKSRQYFFELLNQGLSVEEIKERIRKENMPRRY

SEQ ID NO: 60179 - DNA, 513 bp, Unknown
  Obtained from environmental sample
  misc_feature (1)..(513): n is a, c, g, or t
atgggtattcattccaactcggcaatttctacctggctggtacgctttttggctgctttaacggtaattctggcgggcttaattggccttggccttggtttatcccttgcggaaactacaaacataagaaaccaggaaaattttttcgattttgcccccgccctgcccacaaagatcctggatatagaaggaaacctaataaccgagttttccgctgatgaaaagcgggctctggtttcattgaacgacctgcccaggcatcttatttacgcggtattggccagggaagactatgatttttacaatcacaagggattcagcgtaaggggcatcgccagggcggtggttggcaagttgatcggaaaagacctgggcgggggatcaacaattacccagcagatagccggaacgctttacacagaccgcagggaatatagcttaacccgcaagataaaggaactctggtgggctttccagatggaacggcgcttatacaaaaaacgaaatccttga

SEQ ID NO: 60180 - protein, 170 aa, Unknown
  Obtained from environmental sample
  DOMAIN (57)...(170): Transglycosylase
  misc_feature (1)..(170): Xaa is any amino acid
MGIHSNSAISTWLVRFLAALTVILAGLIGLGLGLSLAETTNIRNQENFFDFAPALPTKILDIEGNLITEFSADEKRALVSLNDLPRHLIYAVLAREDYDFYNHKGFSVRGIARAVVGKLIGKDLGGGSTITQQIAGTLYTDRREYSLTRKIKELWWAFQMERRLYKKRNP

SEQ ID NO: 60181 - DNA, 1461 bp, Unknown
  Obtained from environmental sample
  misc_feature (1)..(1461): n is a, c, g, or t
ttggggggtgcgctttgtcaggcgttacatactgggggcccttctttgagttttgacaattccgctttcctttttttattaattattccggctgccttaatcccggttgtcataatcaggtacataaagatcagggagaaggctgccttgtttgctgccgccgctccgtcaaaccggcgtgaaccgcttctaagggaacttcgcttaaggatgatcatgtcggacattttttttctgttttttctttgccttcttattgttgctttggcggggcccaggtggggcttgaggatagttgccgattaccggcgcggcctcgatgtagttttagcttttgatgtttcacggagtatgaatgtaagggattgcctaccgcaccgattttacagttatgatgacgcttcaaggcttgagcgcggaataggcatagcccgtgagcttgtgggatatctggaggatgtgcggtttgggacagcaataagcaagggcaagggaattttagcggtacctttgactttcgattctgaaatggtaatgagctttctttatgttttggacagccaggccgttaccggcgggggaactaatctggaatctctccttgattccgctataggggcgttccaggaatccataccaagctgcagggggataattctctttacggacggcgaaaacctttccggttcttttcagcgggcattgaacaaggcaagaaaggcagggatttccctgagtactgtgggccttggctctgattcgggggggcctgtgccggttgaaaaggggccggaagctccggacgggtttctgcttgacgcaaacggaaaaaccatcagaagcgaaaggcatgcggatgttctgcaaaacgcggcgtcgaggtccggaggcatttatgttgacggcagcagggatgacgcggccagggttttggcagggtttatcaattccctttccaccgattccaggcttcaggggcaaagacgcgaggcgaatcccaggtggcggttttttgtcattgcggctatggcctgccttggcggggctaggctgatgggttttagccgccgaagccgcaggcgcggtgttctgccggttatgttctgtctcttggcattgtcttcatgttcaaatatccagggcaaacttctggttatggaagccaacttctttaatacgcgggggttgtttacagaagcaatcgcgtcttacttaaaggccctgaaccacagcgaggctgtcccttacgccgaatacggtctggcttatgtcttttccgcccttgatgaaggagaggccgctttggatcgctatattgaagcggagaaataccttttattgaatagcgaagatcatccggaattgagattcaggattcactataacatgggaataatttactttgaaaacggagaattacacagaggccataaattcgttcaaggaagcgttaaaagttga

SEQ ID NO: 60182 - protein, 486 aa, Unknown
  Obtained from environmental sample
  misc_feature (1)..(486): Xaa is any amino acid
MGGALCQALHTGGPSLSFDNSAFLFLLIIPAALIPVVIIRYIKIREKAALFAAAAPSNRREPLLRELRLRMIMSDIFFLFFLCLLIVALAGPRWGLRIVADYRRGLDVVLAFDVSRSMNVRDCLPHRFYSYDDASRLERGIGIARELVGYLEDVRFGTAISKGKGILAVPLTFDSEMVMSFLYVLDSQAVTGGGTNLESLLDSAIGAFQESIPSCRGIILFTDGENLSGSFQRALNKARKAGISLSTVGLGSDSGGPVPVEKGPEAPDGFLLDANGKTIRSERHADVLQNAASRSGGIYVDGSRDDAARVLAGFINSLSTDSRLQGQRREANPRWRFFVIAAMACLGGARLMGFSRRSRRRGVLPVMFCLLALSSCSNIQGKLLVMEANFFNTRGLFTEAIASYLKALNHSEAVPYAEYGLAYVFSALDEGEAALDRYIEAEKYLLLNSEDHPELRFRIHYNMGIIYFENGELHRGHKFVQGSVKS

SEQ ID NO: 60183 - DNA, 849 bp, Unknown
  Obtained from environmental sample
  misc_feature (1)..(849): n is a, c, g, or t
ttgttggcgataatcgcaagtggttttggtttgttttataaaacagacgggcaatcgtttgattttatgaaccaatatggggatattattaaaatatatggaaatggaatatataaaaatgattcatattttatggctccaatattcaaaggaactgactgtacaatattatttctggcaattcctttgttaattattgctttaataatgaatataaaaaaggaaacaataaaaacaaatcttttcataacagccattatcgcattatttgtttattattccgctagtatttcattcggtgttatatataatgtgttacatttaatttatatagctttattttcatgcagtatatatgcgttaattattgggtttatgctattaaaaaaatatactataaatattcctgtaaaaatgtatacaaatggcataaaaatatttctgtttatttgtggcttgtctttatttgtggcatggctaccagatataattgtgtcattaataaacaaaaaatcacttggattaatagaaatatacacgactcaaattaattatgttttggatatggcaataatatcgcctttgatattcatttgtttatataatttgagtaaaaataataatatgggttatattttgttaggaataattttaaatgtactgatagtggtcggtataatggtaattattcaggcaatatttcaagtaatggctggaataaatttgcctattgaagcaataataacaaaaattggtatatttgtactattagcaatagtagcaatatattatgaaataaaatattcnaaatatacaaagcaacagaaacggcacataacaggtcggtaa

SEQ ID NO: 60184 - protein, 282 aa, Unknown
  Obtained from environmental sample
  misc_feature (1)..(282): Xaa is any amino acid
MLAIIASGFGLFYKTDGQSFDFMNQYGDIIKIYGNGIYKNDSYFMAPIFKGTDCTILFLAIPLLIIALIMNIKKETIKTNLFITAIIALFVYYSASISFGVIYNVLHLIYIALFSCSIYALIIGFMLLKKYTINIPVKMYTNGIKIFLFICGLSLFVAWLPDIIVSLINKKSLGLIEIYTTQINYVLDMAIISPLIFICLYNLSKNNNMGYILLGIILNVLIVVGIMVIIQAIFQVMAGINLPIEAIITKIGIFVLLAIVAIYYEIKYSKYTKQQKRHITGR

SEQ ID NO: 60185 - DNA, 660 bp, Unknown
  Obtained from environmental sample
  misc_feature (1)..(660): n is a, c, g, or t
atgccgtttaagggggtcgatgttatggacgttaagaaggaatttgtcttaaaagcgatggatgagagggtcgtattcaccgagctatgccgtgagtacggaatcagcaccaaatgcgggtacaaatggaaacagaggttccttgaggaaggatacgccggtcttgaggaacattccagaaagccgttaaccaacagccgcagcataccggagccggtaagcgtggaaatgttgaggataaaaaaattacaccccgcatggggcgcgaaaaagatacttgaaatatacaaaagaaaccatacggggaaatacgctccggcgcgtggaagcgtggaaaatctttttgtacgcgcgggctacacgggcgtccggcggagaaggaacatacgcggcggaaagataatacaaaaccgtattgtgcctacaaagccgaacgaagtttggaccgttgattttaaaggctggtggtacaccaagaacagggaaaaagtaaacccgcttaccatacgcgacgaattcagtaaatttatacttgcgatagacgttgtcgaaaaaggcgataaagccacagtaaaacatgtctttcagggtgttttcaagcaatacggattaccgcagtgtatacgagcgacaacggcccgccgttcgcgagcgcgctaa

SEQ ID NO: 60186 - protein, 219 aa, Unknown
  Obtained from environmental sample
  misc_feature (1)..(219): Xaa is any amino acid
MPFKGVDVMDVKKEFVLKAMDERVVFTELCREYGISTKCGYKWKQRFLEEGYAGLEEHSRKPLTNSRSIPEPVSVEMLRIKKLHPAWGAKKILEIYKRNHTGKYAPARGSVENLFVRAGYTGVRRRRNIRGGKIIQNRIVPTKPNEVWTVDFKGWWYTKNREKVNPLTIRDEFSKFILAIDVVEKGDKATVKHVFQGVFKQYGLPQCIRATTARRSRAR

SEQ ID NO: 60187 - DNA, 972 bp, Unknown
  Obtained from environmental sample
  misc_feature (1)..(972): n is a, c, g, or t
ttgtccgacctcgccgagtacgcccgccgtctgcacgagtccgagcggcgcgcctaccctcgccgctttaccccgctaaggtacgattccgcccgcgataagctcaagggcgtcagggctgtcgtcgccgatgtatacggcacgatggtaaactactggcggcccggattcgaggcgcgcgacacccgcgaggcgttgctcgtcgaggcgttttccggcgtcgtagataggttcggaatgggggagacgctcgccgcgattaaccccgccgatccgccggccaagacgctctgcgacttctacaacggcctgctcgcaatcaaccgccaaaaatcagccggcgacggagccgcgctgccggaggtgcgcgtcgaggaggtctggtcggttattgcgatgatgctgaaaagaaacggctacgacgccgacgcccgcgccccgtggcgcggcggcccggcggacttcgcccgttgtctcgcctatacctacaacttcctctccatggggcgcgaactctatcccggcgtgtcaaacgctttgaaaaaactgaaggacggcaatatagccctaggaatactctccgacgcccagttttacacgcctatagatttgacgttgatgttaagagaccaatccggcggcaaggttatcgattactgcgaattattcgatacggatctgacgttcctatcttgcgaatacggttttgtcaagcccagcgagacgctctacaggcgcctcttcgacgcgctttacgagtaccaaatcaccccggagcagacggtgatagtcgggaacgacctgacgacggacatcgcccccgccgccgcgctcggcatgaggacggcgctcttctgcggggacgatcttatggtgttcgggaggggcgcggacggggccgtccccgatatagtcttttatgaatgggaagaactgccggaaatgctgctgtttcacggggaggcggggtga

SEQ ID NO: 60188 - protein, 323 aa, Unknown
  Obtained from environmental sample
  DOMAIN (38)...(288): haloacid dehalogenase-like hydrolase
  misc_feature (1)..(323): Xaa is any amino acid
MSDLAEYARRLHESERRAYPRRFTPLRYDSARDKLKGVRAVVADVYGTMVNYWRPGFEARDTREALLVEAFSGVVDRFGMGETLAAINPADPPAKTLCDFYNGLLAINRQKSAGDGAALPEVRVEEVWSVIAMMLKRNGYDADARAPWRGGPADFARCLAYTYNFLSMGRELYPGVSNALKKLKDGNIALGILSDAQFYTPIDLTLMLRDQSGGKVIDYCELFDTDLTFLSCEYGFVKPSETLYRRLFDALYEYQITPEQTVIVGNDLTTDIAPAAALGMRTALFCGDDLMVFGRGADGAVPDIVFYEWEELPEMLLFHGEAG

SEQ ID NO: 60189 - DNA, 744 bp, Unknown
  Obtained from environmental sample
  misc_feature (1)..(744): n is a, c, g, or t
gtgtcttatagcggttggcggagatggcacaatgacggctgtgttcagcgttcttttgcgacacgaggaattcaggcatataaagattgggcttatacctcttggaacaggaaacgacctcgcgagggttttgaacctttattccgcccttgtgacaggggcttgctgtacatagttcgcaaacttgttgtggcacaatccaaggaacttgatttatggcaggtaaatgggaaatttgcaatggcaaactacttttccgcaggcatagatgcccatattgcctacgatttcaatagggacagaaaggaagggaaaatagcaggcaattccgtgctcaaaaataaattgcactatgtgaaaagattttttgccgataaagactatcgtttaaaatctggggaactgcatataacagatgaatttggcaaaacgaaaattttttccttgataaataactgcacggttatagtagggaatattcccagttttgcagggggtagcaatccttttggaaaatccgatatggcagacggcttgctggaagttttaagaatcaaatccattctaaactttttgagagcagtttcaattggggcaggcagatttgttgtaaaagccaaggaaattgaaattcacctccaaaaagacgaatttatccaaatagacggagaagacttcaaaaataagctagaaatgccgatttccatcaaatttggcggaaaagtgaatatgttgcatttgtag

SEQ ID NO: 60190 - protein, 247 aa, Unknown
  Obtained from environmental sample
  DOMAIN (80)...(225): Diacylglycerol kinase accessory domain
  misc_feature (1)..(247): Xaa is any amino acid
MSYSGWRRWHNDGCVQRSFATRGIQAYKDWAYTSWNRKRPREGFEPLFRPCDRGLLYIVRKLVVAQSKELDLWQVNGKFAMANYFSAGIDAHIAYDFNRDRKEGKIAGNSVLKNKLHYVKRFFADKDYRLKSGELHITDEFGKTKIFSLINNCTVIVGNIPSFAGGSNPFGKSDMADGLLEVLRIKSILNFLRAVSIGAGRFVVKAKEIEIHLQKDEFIQIDGEDFKNKLEMPISIKFGGKVNMLHL

SEQ ID NO: 60191 - DNA, 363 bp, Unknown
  Obtained from environmental sample
  misc_feature (1)..(363): n is a, c, g, or t
atggcagtttccaaaaaattccattttttgataaaccccataagcggtggagggcaaggcaaggaagtttttgattttttgccggaaattatgcgttccatggattttaaggaagacgaatggatgcgggaattcaccgttatagatcttttttatgaacagattaaggatgccctagcaggctctgagtgtcttatagcggttggcggagatggcacaatgacggctgtgttcagcgttcttttgcgacacgaggaattcaggcatataaagattgggcttatacctcttggaacaggaaacgacctcgcgagggttttgaacctttattccgcccttgtgacaggggcttgctgtacatag

SEQ ID NO: 60192 - protein, 120 aa, Unknown
  Obtained from environmental sample
  DOMAIN (6)...(120): Diacylglycerol kinase catalytic domain (presumed)
  misc_feature (1)..(120): Xaa is any amino acid
MAVSKKFHFLINPISGGGQGKEVFDFLPEIMRSMDFKEDEWMREFTVIDLFYEQIKDALAGSECLIAVGGDGTMTAVFSVLLRHEEFRHIKIGLIPLGTGNDLARVLNLYSALVTGACCT

SEQ ID NO: 60193 - DNA, 756 bp, Unknown
  Obtained from environmental sample
  misc_feature (1)..(756): n is a, c, g, or t
atgcttattgttccgcaaaagttcaaaataggtttttttgattgcgatgcaaacgcgtacttgcgcgtttccaggctctttgagttttttcaagagactgcgcttatttatttaagggaacagggtattgactatttgtctatgattaaaaaagacaaatttactatggtaatttccagaataaaactgagaatttcgcatttgccgctgtggggagaagaaattttaatcagcacgtggctaaagggttttaacccagaaaaagttgcttggggcgattacgatgttcgcgattcgcagggaaactccattatgcaagcaacttcttcttggcttttgatagatttgaaagacggaaaggcaaagccttttgctgaaggtccttatcgctttaatgtttcaccagaactcagtgccttgccagaagccatagatttattggagccaaaaggaatgcccaaaaccgcattggtgaaagcggttagatatagcgatatagatttgaactatcatgtgaataattgcagatattcggattgggttttagatgccgtgagcatggatgaattgaaggagcggagaattcgttccattcagttgaattatatgcagcaggttccttacaatgcaaatgttgctttaatgcgttttcccaatactcgctatcacgtggtgatttttggggttaatgaggaacatccagagcaggtgcattttcaggcaagggtaggttttgacaagccgtttgaggtgtga

SEQ ID NO: 60194 - protein, 251 aa, Unknown
  Obtained from environmental sample
  DOMAIN (1)...(247): Acyl-ACP thioesterase
  misc_feature (1)..(251): Xaa is any amino acid
MLIVPQKFKIGFFDCDANAYLRVSRLFEFFQETALIYLREQGIDYLSMIKKDKFTMVISRIKLRISHLPLWGEEILISTWLKGFNPEKVAWGDYDVRDSQGNSIMQATSSWLLIDLKDGKAKPFAEGPYRFNVSPELSALPEAIDLLEPKGMPKTALVKAVRYSDIDLNYHVNNCRYSDWVLDAVSMDELKERRIRSIQLNYMQQVPYNANVALMRFPNTRYHVVIFGVNEEHPEQVHFQARVGFDKPFEV

SEQ ID NO: 60195 - DNA, 1050 bp, Unknown
  Obtained from environmental sample
  misc_feature (1)..(1050): n is a, c, g, or t
ttgctttacattccgtctagagcgccttttggcgtacggtatgcctctgagcatagccacgggttaaagctctatgttaagcgggtatttataatggacgattgcaaagagcttttgccaaactggcttcgctttgctcgtggcgttatagataccgaagatttgcctttgaatgttagccgtgaaattttgcagagcaacaagatagttggcaatttgaaaaaacacgccactaaaaaaatacttgataccttgcaaagcgtggcaaacgaccgcaaagaagactacgcaaaattctggacagagatgggagccgttttaaaagaaggcttttacatgaactgggagtttttagacgaattgaaaaatttgctgagattcaaaagtaccaaaacaagcgaaaaggaatttgttggcttggaagaatatgttgccagaatgccagagagccaaaaagaaatctattacattgttggcgaatctatttctgcggtgcagggcagtccgcatttggaggcttgcaaggcaaaaggctatgaggttctgtttttgacagatgccgttgatgaatttatgatgcagagcctcagagaattcaaagacaaaaatttccacgacactgctcttggggatttggaatttgaaaagagcaaggaagaggaaaatgcagaaaatgagagcaaaaaaacttatgaaaaactctgcgagaccttgcaaaaagttttgagcgaagaagttagcgaagtgcgtgtcacaagccgcctaaaagacagcccttgcatgttggttagggcagcgggtggcatgggtgctcacatggaaaagattatgtctttgcaaggcatggaagtgccaaaaacaaaacgcattttagaaattaacccagaacacgaaatttgcaaaaacctgcttaaaaaagcacaagacggcgaggatttgggttcttaccctgcggtgctgtatggacaggctttgctcgctgaaggctcggttttgccagaccctgcggcatttgtttctgcaatgaacaaggttttactttcaaaataa

SEQ ID NO: 60196 - protein, 349 aa, Unknown
  Obtained from environmental sample
  DOMAIN (1)...(349): Hsp90 protein
  misc_feature (1)..(349): Xaa is any amino acid
MLYIPSRAPFGVRYASEHSHGLKLYVKRVFIMDDCKELLPNWLRFARGVIDTEDLPLNVSREILQSNKIVGNLKKHATKKILDTLQSVANDRKEDYAKFWTEMGAVLKEGFYMNWEFLDELKNLLRFKSTKTSEKEFVGLEEYVARMPESQKEIYYIVGESISAVQGSPHLEACKAKGYEVLFLTDAVDEFMMQSLREFKDKNFHDTALGDLEFEKSKEEENAENESKKTYEKLCETLQKVLSEEVSEVRVTSRLKDSPCMLVRAAGGMGAHMEKIMSLQGMEVPKTKRILEINPEHEICKNLLKKAQDGEDLGSYPAVLYGQALLAEGSVLPDPAAFVSAMNKVLLSK

SEQ ID NO: 60197 - DNA, 408 bp, Unknown
  Obtained from environmental sample
  misc_feature (1)..(408): n is a, c, g, or t
gtgggcggccttgcgacttttaaggaaggcggaaaccctgcggcggacgctatgaaatactggaatagcgtgcgccgtgcgcttttgcgggagccggtgcaacgaatcggccttggaggctatcttcatctggcggaaggctttccggatttttgtgactgcatccaaaccataaaggacgaattccacgagatactttcacttcatgcgaagggcaaaccttttacgctaaaaccaaaagtggcaatcctccatgcctgggggagcatccgatcatggaccttgtcgggacacatgcacgagactagcgagcatgacctgatacacatcaacgaagcactttcgggtctcccttttgaaacgaattttatctcttatgaagatatagaagacggactaccacactga

SEQ ID NO: 60198 - protein, 135 aa, Unknown
  Obtained from environmental sample
  misc_feature (1)..(135): Xaa is any amino acid
MGGLATFKEGGNPAADAMKYWNSVRRALLREPVQRIGLGGYLHLAEGFPDFCDCIQTIKDEFHEILSLHAKGKPFTLKPKVAILHAWGSIRSWTLSGHMHETSEHDLIHINEALSGLPFETNFISYEDIEDGLPH

SEQ ID NO: 60199 - DNA, 588 bp, Unknown
  Obtained from environmental sample
  misc_feature (1)..(588): n is a, c, g, or t
gtggaaagccttacggcatgggtatgtaaaggcggcgtctttatcggggtgaacgagccttcggccattgacggttttgacactgtttttagaatggcccatgtgctgggggtagacatggaaaacgccgggagctattgtcacggcaaatggcagtacagtgttgacgaagtccccggcctaatctcaaacggggccgagttgggaagcaaaaaagtgcggcttaccgacggcagggctagggtgcttgcagaaagaggcggctgtccggcaattacggtaaacagttttggcaacggcaagggcgtttatgtttcttccatgattcccacagaggagagcaggctcgccaataccaggcttttgctaaatatcattctttattccatgggagaagctcttgaatcggactgtgttacagataaccctaacacagagtgcgcctggttcagtcaagccgaatacatggttttgataaacaacagtgctggccctcagcgttccggcgttaaagctggaggacaaaaattctatgcggaactggggccctatgagacaaaattttttaacacacaggaaactcaatga

SEQ ID NO: 60200 - protein, 195 aa, Unknown
  Obtained from environmental sample
  misc_feature (1)..(195): Xaa is any amino acid
MESLTAWVCKGGVFIGVNEPSAIDGFDTVFRMAHVLGVDMENAGSYCHGKWQYSVDEVPGLISNGAELGSKKVRLTDGRARVLAERGGCPAITVNSFGNGKGVYVSSMIPTEESRLANTRLLLNIILYSMGEALESDCVTDNPNTECAWFSQAEYMVLINNSAGPQRSGVKAGGQKFYAELGPYETKFFNTQETQ

SEQ ID NO: 60201 - DNA, 480 bp, Unknown
  Obtained from environmental sample
  misc_feature (1)..(480): n is a, c, g, or t
gtgataaaatcttttcaacacattaatggaatgaggaaacaaatggggtacaaagttggcgtaggcaagcagcaactgtcattattgccggtatgccttgacgattatatttctgaaagccatatttgccgggtgatagacgcattcacagggcggcttgacctctgcgcatcaggatataagtatgccgaatggaaaaataaaggctgccggccctacgatccacggatgatgcttaacctgtatatatacgggtacttgcaccgggtacgctcgtcccggcggttggaagccgagacgacacgcaacgttgaagtgatgtggctgatgaacgagctgaaaccggatgacaagacgatctgcaacttccgcaaggacaacgccaaggcgcttaagaagacgtttggggaatttgtccttatgtgccgggagcttgggctgtacggcggggaagtggaagcgactcagagagtctgttga

SEQ ID NO: 60202 - protein, 159 aa, Unknown
  Obtained from environmental sample
  misc_feature (1)..(159): Xaa is any amino acid
MIKSFQHINGMRKQMGYKVGVGKQQLSLLPVCLDDYISESHICRVIDAFTGRLDLCASGYKYAEWKNKGCRPYDPRMMLNLYIYGYLHRVRSSRRLEAETTRNVEVMWLMNELKPDDKTICNFRKDNAKALKKTFGEFVLMCRELGLYGGEVEATQRVC

SEQ ID NO: 60203 - DNA, 345 bp, Unknown
  Obtained from environmental sample
  misc_feature (1)..(345): n is a, c, g, or t
atgacaagacgatctgcaacttccgcaaggacaacgccaaggcgcttaagaagacgtttggggaatttgtccttatgtgccgggagcttgggctgtacggcggggaagtggaagcgactcagagagtctgttgaagcgtgggttatttatgtgaaagaggaaaacccgcttgagggagtggaaccgatagaatggtttttaatgaccaacgagcctgttgaaacggctgaggcggcatatgaacgggttaagtattatacgcaacggtggaagatagagcggtttcattatgtgctgaagtccggctgcccggtaaactttaccccgataggtgcacacagttaa

SEQ ID NO: 60204 - protein, 114 aa, Unknown
  Obtained from environmental sample
  misc_feature (1)..(114): Xaa is any amino acid
MTRRSATSARTTPRRLRRRLGNLSLCAGSLGCTAGKWKRLRESVEAWVIYVKEENPLEGVEPIEWFLMTNEPVETAEAAYERVKYYTQRWKIERFHYVLKSGCPVNFTPIGAHS

SEQ ID NO: 60205 - DNA, 735 bp, Unknown
  Obtained from environmental sample
  misc_feature (1)..(735): n is a, c, g, or t
ttggttcgccttatccgggagatagcggtgaagcaccgccgccggtacggcagcccgcgtgtgcgccgggaactccgcgacgtttacgggaagcgcgtcagcttgaagagggttgcccgtttgatgcgggaaaacggcctgaacgcccgccggagggggaagtttatcccgacgaccaactccaagcacggccttcaagtctgcccaaacctgctcaaccgcaggttccgcgccgaaaaaagcggggcaaagtgggtttcagacattacgtacctgcgcactaaaggcggctgggtgtatctgacggtggtgcttgacctttacgaccggaaggccgtcggatgggcactcagcgccgggatggaagcggaggataccgctgccgccgctttgaaaatggcggtcaaaaaccgggcgcctcaagatgccttgatattccactctgaccggggcgttcagtattgttcccaatcctttcgcgccgcgttacgcgaaaactgcccctctgcccgccagagcatgagccggaaggggaattgctgggacaacgcctgcgctgaatcgtttttcaaaacgctgaaggcggagttggaaacactggacggtaaacattcggcctctgaggttaggcaatctgttttcatgtacatcgagtcttattataaccgcgtcagaatgcattcggcgcttgactatgttgcgcctaatgtgtttaacttaggaaacgtcgcttaa

SEQ ID NO: 60206 - protein, 244 aa, Unknown
  Obtained from environmental sample
  DOMAIN (77)...(240): Integrase core domain
  misc_feature (1)..(244): Xaa is any amino acid
MVRLIREIAVKHRRRYGSPRVRRELRDVYGKRVSLKRVARLMRENGLNARRRGKFIPTTNSKHGLQVCPNLLNRRFRAEKSGAKWVSDITYLRTKGGWVYLTVVLDLYDRKAVGWALSAGMEAEDTAAAALKMAVKNRAPQDALIFHSDRGVQYCSQSFRAALRENCPSARQSMSRKGNCWDNACAESFFKTLKAELETLDGKHSASEVRQSVFMYIESYYNRVRMHSALDYVAPNVFNLGNVA

SEQ ID NO: 60207 - DNA, 330 bp, Unknown
  Obtained from environmental sample
  misc_feature (1)..(330): n is a, c, g, or t
atgcaaggagagggaaagatgagaaagaaaagtttagaacggcgtgtttacacgaaggaattcaaggccgaagcagtagcattggccgagaagcgggaaaaaccaataagccagattgcaaaggatctgggggtcagggagaagctgctgtaccgctggatgcaggcgtctcgagagacggcggggagcagggtacaagcgttccccggtcacggacggccgcgggacgaggagcttgcccgcttaaggaaagagaacaaggctttgcggaatgcgaatgaaatcctaaaaaaagcggcggtcatcttcgcgcaaagggaaccccagtaa

SEQ ID NO: 60208 - protein, 109 aa, Unknown
  Obtained from environmental sample
  DOMAIN (14)...(96): Transposase
  misc_feature (1)..(109): Xaa is any amino acid
MQGEGKMRKKSLERRVYTKEFKAEAVALAEKREKPISQIAKDLGVREKLLYRWMQASRETAGSRVQAFPGHGRPRDEELARLRKENKALRNANEILKKAAVIFAQREPQ

SEQ ID NO: 60209 - DNA, 405 bp, Unknown
  Obtained from environmental sample
  misc_feature (1)..(405): n is a, c, g, or t
ttgatacatgaaaaagggcttgcgacggttcggaatatctatgatgaccttctgaaaactaacgactacagtgaacggaatgaaattgaaaattttgcaaagataagtgaaagtatccgcaggcgtgaggcaatggttaaaacggctcaatatataaaggagttgaataccggcgctgaagagcttgacaaaaatccctggctgttgaatgtccgtaacggaactattgacgtattgacaggggattttatggaacacaggcaagaggatatgattaccaaacttgccaatgttgattttgacccttcagccgattgtccgttatggaagcagtttgtccgtgaaattatgaattataaaggtgatttaataacttttctgcaaactgcggtcgggtgggcttga

SEQ ID NO: 60210 - protein, 134 aa, Unknown
  Obtained from environmental sample
  misc_feature (1)..(134): Xaa is any amino acid
MIHEKGLATVRNIYDDLLKTNDYSERNEIENFAKISESIRRREAMVKTAQYIKELNTGAEELDKNPWLLNVRNGTIDVLTGDFMEHRQEDMITKLANVDFDPSADCPLWKQFVREIMNYKGDLITFLQTAVGWA

SEQ ID NO: 60211 - DNA, 1119 bp, Unknown
  Obtained from environmental sample
  misc_feature (1)..(1119): n is a, c, g, or t
atgcgctctatcaggcagatacttacggctgtcgccgccgctccaatggcggccctctccgccgacaagaaggacaccgtcggcgggcaggcgctcgtggagggggtgatgatgcgcggcaaggagaaggtggcttgggcggtgcgccgtcccgacggggagacggtcgtcgagtcgttccccttcgtctccgtcaccaagcgcgtaaccgtctgcaagataccggtcatacgcggggtgataaacctcttcgagtcgctcagctggggctacagggcgctgtcgcggtcggtggacatatcgaccgcggagggcgaggcggcgccgtgtcaaaatccgcgtaaaccgattatttcgcctgatgacgatccaaccgccgatgtccggacggcgtcggtctcaacgccgtcggttccggcgccgtccgcgcctaagccttcctttttagaccgcgtcctgatgaccctgtcaacactcgtcgctttcgcgatctccatcggcctcttcatgtacgcgcctatgtggacggcgtcgcgcatgcactttataaacgagccggcggcgctgttcgacctcttaggcgggagagtatcgatcgaggttctccaatcgctcctcttcaacctcttcgctggggcgatgcgcatcgcgctgttcctcctgtatatgtcgctgataagcctgtggagcgagatgcggcgggtgttcgagtaccacggggcggagcataaaaccatattcgcgtacgaagacggtaaggagctgaccgtcgaaaacgtggaaccctacacaacgctccacccgcgctgcggcacgagtttcctcatacttgtcgcgatatgcagcatcctcctgttctccgttatcgataccctgtacatacaatacgtctacgatttccgcggcaacctgccctaccgtttcgccgtgcaccttgcgcttataccgtttgtggccggcgtctcctacgaatttctcaaactctcggaccggtttcagcattggcctatcgtcgggctgctgataaagcccggtttgtggcttcaacgcattaccacgcgcaagcccgacggttcgcagatagaggtcgccgtgaaggcgttggaggcggcgctgtga

SEQ ID NO: 60212 - protein, 372 aa, Unknown
  Obtained from environmental sample
  SIGNAL (1)...(20)
  DOMAIN (74)...(372): Protein of unknown function (DUF1385)
  misc_feature (1)..(372): Xaa is any amino acid
MRSIRQILTAVAAAPMAALSADKKDTVGGQALVEGVMMRGKEKVAWAVRRPDGETVVESFPFVSVTKRVTVCKIPVIRGVINLFESLSWGYRALSRSVDISTAEGEAAPCQNPRKPIISPDDDPTADVRTASVSTPSVPAPSAPKPSFLDRVLMTLSTLVAFAISIGLFMYAPMWTASRMHFINEPAALFDLLGGRVSIEVLQSLLFNLFAGAMRIALFLLYMSLISLWSEMRRVFEYHGAEHKTIFAYEDGKELTVENVEPYTTLHPRCGTSFLILVAICSILLFSVIDTLYIQYVYDFRGNLPYRFAVHLALIPFVAGVSYEFLKLSDRFQHWPIVGLLIKPGLWLQRITTRKPDGSQIEVAVKALEAAL

SEQ ID NO: 60213 - DNA, 756 bp, Unknown
  Obtained from environmental sample
  misc_feature (1)..(756): n is a, c, g, or t
atgcagcatcctcctgttctccgttatcgataccctgtacatacaatacgtctacgatttccgcggcaacctgccctaccgtttcgccgtgcaccttgcgcttataccgtttgtggccggcgtctcctacgaatttctcaaactctcggaccggtttcagcattggcctatcgtcgggctgctgataaagcccggtttgtggcttcaacgcattaccacgcgcaagcccgacggttcgcagatagaggtcgccgtgaaggcgttggaggcggcgctgtgataaccgccaaggtggagggcattctttggcgtcaccgcgaacttgaagagaagatggcctcgccggaggtcgccgcggacccgtcgcttttggaaaaaatcgggcgcgagtacaacggcatagcccgcaacctgcctacgtttaaacgatatttggaattagtcaacgacatagactcggcccgccagataatagccgacgggagcgacgccgatctcaccgcgctcgccgttgaggaactcgccgacttggagaaggagcttccagaatgcgaggagcgggtgaagatgctgctcgttccgcgcgaccccaaggacatgaagaacgccgcttttggaaatccgagccggtaccggcgggacggaggccggaattttcgccgccgacctgtaccgtatgttcacccacttcttcgagaaaaagggatgggaaacggaggtgctctcgtcaagttacggcgatatgaacgcgattaa

SEQ ID NO: 60214 - protein, 251 aa, Unknown
  Obtained from environmental sample
  misc_feature (1)..(251): Xaa is any amino acid
MQHPPVLRYRYPVHTIRLRFPRQPALPFRRAPCAYTVCGRRLLRISQTLGPVSALAYRRAADKARFVASTHYHAQARRFADRGRREGVGGGAVITAKVEGILWRHRELEEKMASPEVAADPSLLEKIGREYNGIARNLPTFKRYLELVNDIDSARQIIADGSDADLTALAVEELADLEKELPECEERVKMLLVPRDPKDMKNAAFGNPSRYRRDGGRNFRRRPVPYVHPLLREKGMGNGGALVKLRRYERD

SEQ ID NO: 60215 - DNA, 741 bp, Unknown
  Obtained from environmental sample
  misc_feature (1)..(741): n is a, c, g, or t
ttggaaatccgagccggtaccggcgggacggaggccggaattttcgccgccgacctgtaccgtatgttcacccacttcttcgagaaaaagggatgggaaacggaggtgctctcgtcaagttacggcgatatgaacgcgattaaggagataataataaacgtacgcggcgagaacgcctacggcacactaaaatacgagtccggcgtgcaccgagtgcaacgcgtgccgctgacggaggcgcaggggcgggtacacacatcggcggcatcggtggcggtctttccggaggccgacgagtttgaggtgcagataaacccgaacgacctgcgcatagacctgtactgctccagcggccccggcggtcaatcggtcaacacgacgtactctgcggtgcggataatgcacgtccccacagggctgatagtcacctgtcaagatgaaaaatcacagcataaaaacaaggcgaaggctatgaaggtgctgcaaacgaggctatatgaattggagcttgccaaggtggaggcagaggaatcggcggcaaggaagagcatggtgagcacaggcgataggagcgccaagattcgtacatataatttcccgcagaaccgcgtgacggatcatcggataaatttgacgttgtacaatttggacaagtttataaacggggatatggacgagatggtggaggcgctggcaatcgcggatttgaacgagcgggttaagaatagcagcgaggggtga

SEQ ID NO: 60216 - protein, 246 aa, Unknown
  Obtained from environmental sample
  DOMAIN (1)...(66): PCRF domain
  misc_feature (1)..(246): Xaa is any amino acid
MEIRAGTGGTEAGIFAADLYRMFTHFFEKKGWETEVLSSSYGDMNAIKEIIINVRGENAYGTLKYESGVHRVQRVPLTEAQGRVHTSAASVAVFPEADEFEVQINPNDLRIDLYCSSGPGGQSVNTTYSAVRIMHVPTGLIVTCQDEKSQHKNKAKAMKVLQTRLYELELAKVEAEESAARKSMVSTGDRSAKIRTYNFPQNRVTDHRINLTLYNLDKFINGDMDEMVEALAIADLNERVKNSSEG

SEQ ID NO: 60217 - DNA, 399 bp, Unknown
  Obtained from environmental sample
  misc_feature (1)..(399): n is a, c, g, or t
atgagcgattttatccatctccacgttcactcagatttttctcttttggacgcggcggtctccgtaacggcgttggcggacaaggccgaaagactcggaatgacgcatttggccctgaccgatcatggcaatatgttcggcgcaatggaattcattgccgcctgcgatgagacaattaacaagcaggnacagcatgaaaagcgtaaaaacccgattaggccgataattggctgtgaagtgtacgtctcgccgttttcgcgctggcagaaaacnggaactggaaacgaaaaacaatattaccatcttgttcttttggcaaaaaacgcgaaggctacctcaacctggttaagctctgctcttttgcctacaccgaaggtttttactataggccgaggatag

SEQ ID NO: 60218 - protein, 132 aa, Unknown
  Obtained from environmental sample
  DOMAIN (5)...(132): PHP domain
  misc_feature (1)..(132): Xaa is any amino acid
MSDFIHLHVHSDFSLLDAAVSVTALADKAERLGMTHLALTDHGNMFGAMEFIAACDETINKQXQHEKRKNPIRPIIGCEVYVSPFSRWQKTGTGNEKQYYHLVLLAKNAKATSTWLSSALLPTPKVFTIGRG

SEQ ID NO: 60219 - DNA, 2466 bp, Unknown
  Obtained from environmental sample
  misc_feature (1)..(2466): n is a, c, g, or t
ttgatagcgctttcggcctgcgtatccggcgagataccacgccttgtccaggccgggaaaatggacgaggccgaaaaaaaggcccgctattacagggatctttttggcgaggacgaaaatggagaagcgaactttttccttgagattcaggatcacggcatcccggcggaaaagctaaggggaagcctttcgcaaagggacataaataaagccatagttgaaatttccaaacgcaccggcatccctctggttgcgactaacgatgttcactacaaggacaaggaagataatgttgcccatgacatactcctctgcataggaacaggcaaagtcagaaccgaggaaaaacgcaagaagtaccacggagaccagttttatttaaaaagcggcgaagaaatggcggcgcttttccctgactcaggcgaggcgatagccaacaccgtgcgcattgccgcccgctgcaatacctatgttccggatatcagcgttaaagagttacccaagtatctgcccgattttaaaattcctggcggctttgaaaacgcggacgcctatatcaggcatctggtaagcgagggccttgccaaacgctacgcaaacgagaaagcggccggcggtgaaaaatggcaggaagtaaccaggagagcggagtacgaactgggcgtcattattcagatgggctttacgggttatttccttattgttgcggactttaccaactgggcaagggaaaacaatatttcggtagggccgggccgcggctcaggcgcaggttcaattgtcgcatacgcattgcacataacggacatagatccccttaaatacggcctgttgtttgagcgttttctgaaccctgagcgaatctctatgcctgactttgacgtggactttgccaacgagggccggggcgacgtgataaagtacgttaccgaaaaatacggtcgagacaaggtagggcagatcatcaccttcgggaagctgggggcaaaagcggtgatcaaggatgtggcccgtgcactgggaatatccatacccgaatcggaaatgatcacaaagctcatacccagagatacaaagatcactttgcagaaggctattgacggagaaccgaagctggaggaactgtcgcaggatgcgcggtacacggagctttttgccctggcaggaaaactggaaggccttaaccggcactcaagcatccacgcttcaggagtggtaattggcaggactaccctgtacaaccttgcgccccttttcaaagacccgaaaacaggtgccatttcaactcagtacgccatgggccatctggaaaagtgcggccttgtaaagatggaccttttgggacttaaaaccctggatgtgataaaacacaccgaggaattgatccgcaaaaggggaggggagtttgccaattttagcgtagaagccgtagatgaaaacgacgaggcgacgttcaggatgcttggcgaaggtttgagttttggggttttccagtttgaatccgacggaatgcaggataccctgaaaagggcaaagccggacaaaattgaagaccttatcgccctaaacgccctttaccggcctggcccaatgaaaaatattcccaggtttatagactcaaaaaacggacggcaggctatccattatcccgatccccgtctggaagacgtgctcaaggaaacctacggcgtcatcgtatatcaggaacaggtcatgcaggtggcgcggattattgccggttacagtttgggacaggccgatatactccgccgcgcaatgggaaaaaagaaaaaagaaattattgacgcggaaaaaattccttttattgaaggcgcggagcggcagggttattcaaaaaccaaggcaggtcaaatttacgatatactggttccctttgccggctacggttttaacaagagtcacgcggcggcgtattcggtgatcgcgtatcacaccgcctatctcaaggccaatttccccgcggaatttatggccgccaaccttaccaatgagattcacagcgccaataaggaaaaattatccgaatgtattgacgaggcccgcaggatgggcattgccattgacccgcccgatgtaaactattccgaaaaactttttaccattgtggacgggcgtatcatttacggccttttgggaataaagggcctgggcgacgcccccgcggatgaaattgtgcgctgccgcggggacggtccttatagtgattttatggattttctgtcgagggttgacatcaaactcgtggggaaggcggttattgaaaaattgattcagaccggggcctttgaccgtatgggtatgagcagggaaaaccttttggggaatctggaacggggcgtggaatatgcccaaaaaccaaaagggaagacaagaaattccggtcagaccaccctggtttgggggaaaccgatgaaaaaaaaattcccctggatttttgtgttttaa

SEQ ID NO: 60220 - protein, 821 aa, Unknown
  Obtained from environmental sample
  DOMAIN (125)...(616): Bacterial DNA polymerase III alpha subunit
  misc_feature (1)..(821): Xaa is any amino acid
MIALSACVSGEIPRLVQAGKMDEAEKKARYYRDLFGEDENGEANFFLEIQDHGIPAEKLRGSLSQRDINKAIVEISKRTGIPLVATNDVHYKDKEDNVAHDILLCIGTGKVRTEEKRKKYHGDQFYLKSGEEMAALFPDSGEAIANTVRIAARCNTYVPDISVKELPKYLPDFKIPGGFENADAYIRHLVSEGLAKRYANEKAAGGEKWQEVTRRAEYELGVIIQMGFTGYFLIVADFTNWARENNISVGPGRGSGAGSIVAYALHITDIDPLKYGLLFERFLNPERISMPDFDVDFANEGRGDVIKYVTEKYGRDKVGQIITFGKLGAKAVIKDVARALGISIPESEMITKLIPRDTKITLQKAIDGEPKLEELSQDARYTELFALAGKLEGLNRHSSIHASGVVIGRTTLYNLAPLFKDPKTGAISTQYAMGHLEKCGLVKMDLLGLKTLDVIKHTEELIRKRGGEFANFSVEAVDENDEATFRMLGEGLSFGVFQFESDGMQDTLKRAKPDKIEDLIALNALYRPGPMKNIPRFIDSKNGRQAIHYPDPRLEDVLKETYGVIVYQEQVMQVARIIAGYSLGQADILRRAMGKKKKEIIDAEKIPFIEGAERQGYSKTKAGQIYDILVPFAGYGFNKSHAAAYSVIAYHTAYLKANFPAEFMAANLTNEIHSANKEKLSECIDEARRMGIAIDPPDVNYSEKLFTIVDGRIIYGLLGIKGLGDAPADEIVRCRGDGPYSDFMDFLSRVDIKLVGKAVIEKLIQTGAFDRMGMSRENLLGNLERGVEYAQKPKGKTRNSGQTTLVWGKPMKKKFPWIFVF

SEQ ID NO: 60221 - DNA, 1155 bp, Unknown
  Obtained from environmental sample
  misc_feature (1)..(1155): n is a, c, g, or t
ttgatggccgagctgggaaatcccgccctgcgtaatgaaatttacgatatgatgaggtggtggctggataaaggaatagacggcttccgtatggacgctatcagttttatttccaagccccaggattttcccgacggcaatgtgaagaaaatcatcccgaacggcccgcggatacatgaatttttacaggagatgcggcgtgaggtattgtcctgttatgaccttatgactgtcggcgagaccggcggggtaaccgttgatgaagcaatacaatatgccaatgccagcggcagcgagctcgacatggtgtttcaatttgagcaggtggaactggacggcggtgaaacttttaagtggaatgaccgtaaaatcaatctggtcgaactaaaagaagtattctcccgctggcagaccaggctatatgatcgcgcgtggaacagcctgtactggtgcaatcacgaccagccgcgtatcgtttcacggctgggcgacgacagcatataccgcgaaaaatcggcaaagatgctggcttgttgcctgcactttatgcagggtacgccctatgtttatcagggtgaagaactgggtatgaccaatgctccctttacggacatcggcgattaccgcgatctggaaacgattaatgcgtataacgctctggtggtgcaggaaaaacgtatcgcccgtgatgatatgctgcgttatatgcgtctgaaaagccgcgataattcccgtaccccgatgcaatgggacagcggccccaacgcgggattttcaaccggcagtccctggattatggtaaatcccaactaccgtgaaatcaacgcggaagaacaaatccggcgcgccagttcggtttttttgttttacaaggccctgattcaactgcgaaagaaaatggatattataacgctgggcaattttgaactgctgatgcccgatgacccggatttatttgtctacacccgccgttaccgtggggaggaactgctgatcgcctgcaacttttcatccaaagaaagggcgttcacgccgccggaacggtttaaagacgcccaactgcttctgtcgaatgaggaagcggcggctttactagccgtggattgcaaggctttggggcctttcgccgcgaatatttactaccaaataaaataa

SEQ ID NO: 60222 - protein, 384 aa, Unknown
  Obtained from environmental sample
  DOMAIN (1)...(245): Alpha amylase, catalytic domain
  misc_feature (1)..(384): Xaa is any amino acid
MMAELGNPALRNEIYDMMRWWLDKGIDGFRMDAISFISKPQDFPDGNVKKIIPNGPRIHEFLQEMRREVLSCYDLMTVGETGGVTVDEAIQYANASGSELDMVFQFEQVELDGGETFKWNDRKINLVELKEVFSRWQTRLYDRAWNSLYWCNHDQPRIVSRLGDDSIYREKSAKMLACCLHFMQGTPYVYQGEELGMTNAPFTDIGDYRDLETINAYNALVVQEKRIARDDMLRYMRLKSRDNSRTPMQWDSGPNAGFSTGSPWIMVNPNYREINAEEQIRRASSVFLFYKALIQLRKKMDIITLGNFELLMPDDPDLFVYTRRYRGEELLIACNFSSKERAFTPPERFKDAQLLLSNEEAAALLAVDCKALGPFAANIYYQIK

SEQ ID NO: 60223 - DNA, 1737 bp, Unknown
  Obtained from environmental sample
  misc_feature (1)..(1737): n is a, c, g, or t
atgaagagtatgaaatattttccgttggttcaggtatttttgtttctcttcggactctttctttccgtacccgcggtctcacagaccgccgggccgcgctacgcgcttgtaataggcaacggcgcttaccgccatgtggacagcctcccgaataccgtaaacgacgcgtcaggcatcgcgaaaaaactttcgggactgggttattcggttgagatcctgttcgacagcgacctggccggcatgggcagggcggtgagcgcgtggatacgccagctctccacagaccgggcaagcgagggttttttctggtacgccggtcacggaatgcaggtatccggggaaaattaccttttgcccgttgatataaacgctgaagacgaggcggggatagtctacggttcctatccgctgggacggattctcctctcgctggaacagaccgcgcggaacaaactcaatgtagtggtgctggacgcctgccgtgacaaccctttcaaaaatcttcccggcggaagccgcgggctttcccgcggttttgtcaccgtcgaacacccgcctcaggatattttcgtcatgttttccacttctccgggcacaaccgcggcggacggcgacagcggacggaacagcccctttgccgaggcttttcttaaatacatggactccgacgagatccttccggtaatggcggggcttgttacccgcgagactatgcgcctaacgggcggcaaacagcggccttatcagaacgggagcatagtaagcgaactctactattcgctctcatcaggaactcctgtacgcgagccgtccgcaggagcaggagcggcgtctctttccaccgcgccctcgggcgcgccgcctgccggacttaacccgccttctgttgccgtaccttcgccggccatggcgcttatccccgccggaacttttactatgggcagtcccgaaatggagcttgaccgggaatcgtttcgggaagtcagacaccaggtacagataagcgcgttttatcttgccccaaaagaattgagcgtcggcgagttccgccgctttgtcgaagacacaaactatgttaccaccgccgaagccgacggcggggcctttgcttacgatgacgcgaagggcgaatcgggtttccgcgccgatgtcaactggcgtaaccccggcttcaggcagggggatgatcacccggtggtttgcgtaagctggttcgacgcagtgcagtactgcaactggctttccgtcaaagaaggccttaaacccgcctataccattgtgggccagaccgtaaactgggacaggaacgcgaatggttaccgcctgcccaccgacgctgaatgggagtacgcatgccgagccggaacatcaacgcccttatttacaggagagagcatttccacaagccaggcaaacttcaatggcagtatagcccacaactacggcaacataggattgtttcgcaaagctaccgtaagtaccggctctttcaccgccaacgcgtggggtttatacgacacgcatggcaatgtctgggaatggtgctgggattattacagtaacccaaatatgacgccattgtcagatccggccggacccgcttccggcacgcacaggataaaccggggcggcagttggtcttctcccggaaagcttctgcgttcggctgttcgcgccagcgacttgcccgaaaccgcggggagtaatttgggattcaggctggcgaggaataaataa

SEQ ID NO: 60224 - protein, 578 aa, Unknown
  Obtained from environmental sample
  SIGNAL (1)...(25)
  DOMAIN (33)...(260): Caspase domain
  misc_feature (1)..(578): Xaa is any amino acid
MKSMKYFPLVQVFLFLFGLFLSVPAVSQTAGPRYALVIGNGAYRHVDSLPNTVNDASGIAKKLSGLGYSVEILFDSDLAGMGRAVSAWIRQLSTDRASEGFFWYAGHGMQVSGENYLLPVDINAEDEAGIVYGSYPLGRILLSLEQTARNKLNVVVLDACRDNPFKNLPGGSRGLSRGFVTVEHPPQDIFVMFSTSPGTTAADGDSGRNSPFAEAFLKYMDSDEILPVMAGLVTRETMRLTGGKQRPYQNGSIVSELYYSLSSGTPVREPSAGAGAASLSTAPSGAPPAGLNPPSVAVPSPAMALIPAGTFTMGSPEMELDRESFREVRHQVQISAFYLAPKELSVGEFRRFVEDTNYVTTAEADGGAFAYDDAKGESGFRADVNWRNPGFRQGDDHPVVCVSWFDAVQYCNWLSVKEGLKPAYTIVGQTVNWDRNANGYRLPTDAEWEYACRAGTSTPLFTGESISTSQANFNGSIAHNYGNIGLFRKATVSTGSFTANAWGLYDTHGNVWEWCWDYYSNPNMTPLSDPAGPASGTHRINRGGSWSSPGKLLRSAVRASDLPETAGSNLGFRLARNK

SEQ ID NO: 60225 - DNA, 615 bp, Unknown
  Obtained from environmental sample
  misc_feature (1)..(615): n is a, c, g, or t
ttggttgacgccgagtggtctgcccgcaaatccaaccgcctgaagcggcttataaaaaatgcccgttatgctatctcaggcgcttgtgttgaagatattgcctaccatgcggatcgaaagctggacaagtcccttgtttcacgccttgcggcctgttcctacatccatgaaaaccacaatgtcattataatgggggctaccggagtagggaaaacctacctcgcctgcgctttaggcatagccgcaaaccgtaatttctttgccgtcaggtattcaaggcttcccgacctttttagcgacctggccttggcccgggccgacggttcttaccgaaaagtaataaaccaatacacacaggtaaaactgctcatcctggatgaatggcttttattccctcttaaggaaaccgaagcccgcgaccttctggaaataatcgaagccaggcatagccaaggttccactatcttctgttcccagtttgatgttgacgggtggtacactaaaatcggggaacctatcttggctgaggctgtatgtgaccgcattgtacataactcatacacagtcgtactcgcaggagattccatgagaaaaagaaacggtattgctgaatag

SEQ ID NO: 60226 - protein, 204 aa, Unknown
  Obtained from environmental sample
  DOMAIN (11)...(189): IstB-like ATP binding protein
  misc_feature (1)..(204): Xaa is any amino acid
MVDAEWSARKSNRLKRLIKNARYAISGACVEDIAYHADRKLDKSLVSRLAACSYIHENHNVIIMGATGVGKTYLACALGIAANRNFFAVRYSRLPDLFSDLALARADGSYRKVINQYTQVKLLILDEWLLFPLKETEARDLLEIIEARHSQGSTIFCSQFDVDGWYTKIGEPILAEAVCDRIVHNSYTVVLAGDSMRKRNGIAE

SEQ ID NO: 60227 - DNA, 2013 bp, Unknown
  Obtained from environmental sample
  misc_feature (1)..(2013): n is a, c, g, or t
atgaataaaaaatcaaggtccttttcttttcttttcaggcgcaagaagtcgaaaaaagtcggattgtctgaacgccgcgccgccattgttgaagccttaaacaaatcgatcgaaattttttcaaaccgcaatgaagatacatttgaggaaacgatgaccaacggcatacggccttttgcggatgcgcttggcctggatcgcgtagttttttacactttggcagaaaaggatggcgcaagacacttcgggcagacccaccgctgggacaaatcggaaggcggtttgatgtatcttgccgaagagttgcgggttttacccgatgtcccgattttaaagcattggatctcggttttaacaaacggcagccaaatacggcttcggaaaagcgaatattctgaagacgaggcggcaattctggatgcatatggcattaaatcaatactgctgatacctattatcactcacggtgaggtatggggtagcgttgcctttcaggaccataccaacgaccggtattttgacaaagattgcaccgatttgctgtattcggcggcacgcatattctcaaacggcattatcagaacaggaatgagccgtactgccgaggaaaccttcgaagcgctcaaacgccgcgaaaaaatggcggctgcgttgaacagggcttctgtcaggtttctctctcaaagcgaaggatcttttgaggatagtttgacaacgggcgtaagggagatagccgacgtttttgatttggacagattttccctgttgcgtaacttaacagtggttgacggcgtacaatacggagggcagatttaccgctgggacagaaaatcaggagggactacggcgccgataaaagggctggaatctttttctcctgaacagtatgtgtcgagctggaggggaatttttacttcaggcgggacgattaatggtccggtacggcttatgcccgaagcggccgttctgcaatcgtttggtttagtgtcgatatgcgttacgccggtttttatcaacaactttttctggggcattgccctttttgaggatcttcataacgaacgcttttttgaagaggacagcgtcgaaatgatgcgctcggcggcatttctgtgcgcgaacaccgtcatacgcgccgatatggagcgcgatatagccaacgctaacgaatttaatcgcgccatccttgatgcatcgcctgtgggctttaccgtttttgacgaanacgcccgcattattgactgcaacgattttattattaaggcatttgatactacaaagaaatactatattgatcatttttttgaatttttacccgaataccagagtaacggggaaaaatccgatgaaaaggcaattgagttaatcaaacagacgattgccggtaaaaaactgtcattcgagtggacgtatcgctcgtcttcgggagagattattccctttcaagttacgctgacgcacgcgaagtacaacgaaaaaaacatagtgatgggttatcaatacgatttgcgcggcatcaaagaaatgatgaaaaacattaacgaacaaagcgagctgctcaaaatcaggctggaacagcaggagttaatttccgagatttcaaggggttttatttcgtccggtgattcaaaaacgcacataaaagaagccatttcaaaactgggacgctatcacaatgtgtccatggtgtttatttttggcattgactacgagcgtaacgatacttatatggcctataattgggccgccgataatgtgtcgatgcgcctggttgattttgatttttttggttatgttaattcccgctttcccgaaacattgcctgaatccgccacagtgccgataatttcctgcgcggataccgccgccagtacggatgaagtgtgcgccgcgttattgtccgtcggcgttcaatcgtttatctgcgcgccgctgtacgttgaaggccgtttgtggggggtcttgaatgtagaacagtgttttaatccccgtcagtggacagactacgaatag

SEQ ID NO: 60228 - protein, 670 aa, Unknown
  Obtained from environmental sample
  DOMAIN (232)...(376): GAF domain
  misc_feature (1)..(670): Xaa is any amino acid
MNKKSRSFSFLFRRKKSKKVGLSERRAAIVEALNKSIEIFSNRNEDTFEETMTNGIRPFADALGLDRVVFYTLAEKDGARHFGQTHRWDKSEGGLMYLAEELRVLPDVPILKHWISVLTNGSQIRLRKSEYSEDEAAILDAYGIKSILLIPIITHGEVWGSVAFQDHTNDRYFDKDCTDLLYSAARIFSNGIIRTGMSRTAEETFEALKRREKMAAALNRASVRFLSQSEGSFEDSLTTGVREIADVFDLDRFSLLRNLTVVDGVQYGGQIYRWDRKSGGTTAPIKGLESFSPEQYVSSWRGIFTSGGTINGPVRLMPEAAVLQSFGLVSICVTPVFINNFFWGIALFEDLHNERFFEEDSVEMMRSAAFLCANTVIRADMERDIANANEFNRAILDASPVGFTVFDEXARIIDCNDFIIKAFDTTKKYYIDHFFEFLPEYQSNGEKSDEKAIELIKQTIAGKKLSFEWTYRSSSGEIIPFQVTLTHAKYNEKNIVMGYQYDLRGIKEMMKNINEQSELLKIRLEQQELISEISRGFISSGDSKTHIKEAISKLGRYHNVSMVFIFGIDYERNDTYMAYNWAADNVSMRLVDFDFFGYVNSRFPETLPESATVPIISCADTAASTDEVCAALLSVGVQSFICAPLYVEGRLWGVLNVEQCFNPRQWTDYE

SEQ ID NO: 60229 - DNA, 528 bp, Unknown
  Obtained from environmental sample
  misc_feature (1)..(528): n is a, c, g, or t
gtgcttcaaaccggctgttcggctattggaagcgcaaaggcggggctgttaaaaccggaagtcgcgttggagcaggcgggcgcaggacttagggaagtttgcgaagccgtgggcatcccgcctattctgcacatgggaagttgcgtagacaactctaggattcttgaggcggcgacggaaattgtttttgagggcggcttaggcgatgatattgcgagccttcccgccgtaggcgtagcgcctgagtggatgagcgagaaggctgtagcaatcggttgctactttgtggcaagcggagttgacgtaatactgggaaatcctttttatgtttcaggatcgcaggccgtcagcgattacctccacaacaaggtgagggacgaatacggggcgagttttcatttaattgaagacccgataaaggcggcggatcgtattgtagaactgatcaatcaggcgagggacgctcttggaattaacaaaaaagctgagcgcaaactcttcgatatgaaagacaggagggcgctgtaa

SEQ ID NO: 60230 - protein, 175 aa, Unknown
  Obtained from environmental sample
  misc_feature (1)..(175): Xaa is any amino acid
MLQTGCSAIGSAKAGLLKPEVALEQAGAGLREVCEAVGIPPILHMGSCVDNSRILEAATEIVFEGGLGDDIASLPAVGVAPEWMSEKAVAIGCYFVASGVDVILGNPFYVSGSQAVSDYLHNKVRDEYGASFHLIEDPIKAADRIVELINQARDALGINKKAERKLFDMKDRRAL

SEQ ID NO: 60231 - DNA, 336 bp, Unknown
  Obtained from environmental sample
  misc_feature (1)..(336): n is a, c, g, or t
atggtcggaggaaacgaaaatgtaattctgtgcgaaagaggaatacgcacatttgaaacgtatacaagaaacacgcttgacttgtccgcagtgcctgttctgaaagagctcacacatttgcctgtgattattgatccaagccacgcggtaggcgtatcccgttatgtgaaaccaatggcgctggcggctgtggcgtccggcgcggacgggctgatcatcgaggtgcacaacgatccgccgaacgcggcctgcgatggggcgcagtccctcacgcctgagcagttcgccgatcttgcgggaagaatccagcgggttcgcgaagcgattcaatcttaa

SEQ ID NO: 60232 - protein, 111 aa, Unknown
  Obtained from environmental sample
  DOMAIN (1)...(111): DAHP synthetase I family
  misc_feature (1)..(111): Xaa is any amino acid
MVGGNENVILCERGIRTFETYTRNTLDLSAVPVLKELTHLPVIIDPSHAVGVSRYVKPMALAAVASGADGLIIEVHNDPPNAACDGAQSLTPEQFADLAGRIQRVREAIQS

SEQ ID NO: 60233 - DNA, 927 bp, Unknown
  Obtained from environmental sample
  misc_feature (1)..(927): n is a, c, g, or t
atggggcgcagtccctcacgcctgagcagttcgccgatcttgcgggaagaatccagcgggttcgcgaagcgattcaatcttaaggaagacggcatgaacatcggcattatcggccttgggttaatcggcggctcgcttgccaaagcgtacaaggcagtcgggcacactgtatacgcaagcgagaccgataaaagcatactggatttcgccattctttcaggcgcggtagatgccccgctggataacgatgcgttgcggcgttgcgagctgatcctgattgcgatatacccgcaggcggcgatcaaataccttgaagagacagcgcaatacatcccgcctgaaaccacggtcatcgactgttgcggcacaaaaaaaaatgtatgcgcagtcgggtttaaggcggctgagcgttacggttttacttttgtaggcgggcacccaatggcgggtacagagcagtcgggctttaaacacagcaaggcaaccatgttcaaaggcgcgcccatgatcatagtgccgcccgtgtacgacgacatcctgtttctcgacaagatcaagcgcctgcttgcgcccgctgaattcggcaggctgaccgtgaccacggcggaaaagcacgacgcgatgatcgcttttacctcgcaaatggcgcatctggtttccaacgcgtttataaaaagcccgaccgtatttgagcacaagggattttccgctggaagctacaaagacttgacgcgtgtggcgtggctcaacgaacagttgtgggccgagctgttcatggaaaaccgggattatctattgtacgagcttgatttattccttgcttctcttgcacagtacagggacgcgctccgtaatgatgattttgacgatctccgtgcccttcttcacgatggcagatgcctganagaaaaggttgaccgccaatga

SEQ ID NO: 60234 - protein, 308 aa, Unknown
  Obtained from environmental sample
  DOMAIN (31)...(173): NAD binding domain of 6-phosphogluconate dehydrogenase
  misc_feature (1)..(308): Xaa is any amino acid
MGRSPSRLSSSPILREESSGFAKRFNLKEDGMNIGIIGLGLIGGSLAKAYKAVGHTVYASETDKSILDFAILSGAVDAPLDNDALRRCELILIAIYPQAAIKYLEETAQYIPPETTVIDCCGTKKNVCAVGFKAAERYGFTFVGGHPMAGTEQSGFKHSKATMFKGAPMIIVPPVYDDILFLDKIKRLLAPAEFGRLTVTTAEKHDAMIAFTSQMAHLVSNAFIKSPTVFEHKGFSAGSYKDLTRVAWLNEQLWAELFMENRDYLLYELDLFLASLAQYRDALRNDDFDDLRALLHDGRCLXEKVDRQ

SEQ ID NO: 60235 - DNA, 573 bp, Unknown
  Obtained from environmental sample
  misc_feature (1)..(573): n is a, c, g, or t
ttgaccgccaatgagaagcgtggaggtcaacgcgtcaaaaaatattctgtgtggatagatggcggagaagagggcttgctgtctcatgctggcgagaggattactgctgtctgcggaggagaagcggcggcacttgtaaccgacgatacagtgaacgaattatacggagacacggtcgagcaatccttacgggctgccggatattctacaacgcgctttgtgtttcctcacggcgagcagtcaaaaaacatgtcaacctatacttcgctcctctgcgctctgaccgaggcaaatctgacgcgccaggatgttgttgtcgcgcttggcggcggtgtcgtgggcgacctggcgggttttgcggcggccacttatctgcgcggcatcaggttcacgcagatacctaccacgttgcttgcgatggtggattcgtcggtgggcggcaaacggcagtggatctgcccgccggcaaaaaccaggtcggcgcgttctaccagccggatcttgttttgtgcgatatcggggctcttaaaacattgccggatgaaatattccatgacggctgcgccgagatga

SEQ ID NO: 60236 - protein, 190 aa, Unknown
  Obtained from environmental sample
  DOMAIN (23)...(190): 3-dehydroquinate synthase
  misc_feature (1)..(190): Xaa is any amino acid
MTANEKRGGQRVKKYSVWIDGGEEGLLSHAGERITAVCGGEAAALVTDDTVNELYGDTVEQSLRAAGYSTTRFVFPHGEQSKNMSTYTSLLCALTEANLTRQDVVVALGGGVVGDLAGFAAATYLRGIRFTQIPTTLLAMVDSSVGGKRQWICPPAKTRSARSTSRILFCAISGLLKHCRMKYSMTAAPR

SEQ ID NO: 60237 - DNA, 1023 bp, Unknown
  Obtained from environmental sample
  misc_feature (1)..(1023): n is a, c, g, or t
gtggatagatggcggagaagagggcttgctgtctcatgctggcgagaggattactgctgtctgcggaggagaagcggcggcacttgtaaccgacgatacagtgaacgaattatacggagacacggtcgagcaatccttacgggctgccggatattctacaacgcgctttgtgtttcctcacggcgagcagtcaaaaaacatgtcaacctatacttcgctcctctgcgctctgaccgaggcaaatctgacgcgccaggatgttgttgtcgcgcttggcggcggtgtcgtgggcgacctggcgggttttgcggcggccacttatctgcgcggcatcaggttcacgcagatacctaccacgttgcttgcgatggtggattcgtcggtgggcggcaaacggcagtggatctgcccgccggcaaaaaccaggtcggcgcgttctaccagccggatcttgttttgtgcgatatcggggctcttaaaacattgccggatgaaatattccatgacggctgcgccgagatgatcaagcacggcgttatccttagcgcggagctgtttgagttgttgaaagagcctataaagtcccaaatggaagatataatagcgcgtaatgttacgattaagcgtgatattgtggtcgcggatgagagagataccggcatccgtcagatattgaacttcggccacactatcggccacggaatcgagaaacactcaaactatggcgtgacgcacgggaaagccgtcgcaatcggtatggtaatcgccagccggggcgctgcccgcatgggcttgtgtagcgaggaatgccacacgggaatcgtcgaggccgttagtcgctatcagctgccgaccgagactgatataatgcctgaaagtctgatcgaagccgctttcttcgacaaaaagcgaagcggtcagcgcattacgctgatcctgcctgagagaatcggtaaatgcgtagcaaaaaccttcaccatggacgagctcgcgaatttcatccgtcttggcatgaaggcttaa

SEQ ID NO: 60238 - protein, 340 aa, Unknown
  Obtained from environmental sample
  DOMAIN (45)...(305): 3-dehydroquinate synthase
  misc_feature (1)..(340): Xaa is any amino acid
MDRWRRRGLAVSCWREDYCCLRRRSGGTCNRRYSERIIRRHGRAILTGCRIFYNALCVSSRRAVKKHVNLYFAPLRSDRGKSDAPGCCCRAWRRCRGRPGGFCGGHLSARHQVHADTYHVACDGGFVGGRQTAVDLPAGKNQVGAFYQPDLVLCDIGALKTLPDEIFHDGCAEMIKHGVILSAELFELLKEPIKSQMEDIIARNVTIKRDIVVADERDTGIRQILNFGHTIGHGIEKHSNYGVTHGKAVAIGMVIASRGAARMGLCSEECHTGIVEAVSRYQLPTETDIMPESLIEAAFFDKKRSGQRITLILPERIGKCVAKTFTMDELANFIRLGMKA

SEQ ID NO: 60239 - DNA, 858 bp, Unknown
  Obtained from environmental sample
  misc_feature (1)..(858): n is a, c, g, or t
gtggtaaaaatttttaagaattattataggagtaccaagagtctgttgtttaagtttttaaaaagaatatttagtaaaaaaagcaccaagggggagatgaccgaagaggaattgcatcttgcccttctggaaggcgagaagtccggcgtggtggaaagcaaagaacggacaatggtcgagggggttttttatctgggggacaagccggtaagcgcctttatgacccaccgctcggagatacaatggcttgacataaactcgtccgccgaagattccagaagggccgccgagagctctcccagccaaatctggtttcccgttgccgaaggagaacttgacgaagtagcaggggcggtttctgccagggatattttcagggccctccttgacgagccctggccgggactgaaatccattatgcatcccccttactttgttcctgaaaccatgtcggccctcaaagcctttgaagcctttaaaaaggccgacgccagcgatctttttgtgatggacgaatacggcggtttttcggggatacttacgatccgcaaccttatcgaagaaattgtcggggagctttccgcttccggaaaagaagaagaagccatagtcaaacaggaagacggaacctggctcgccgacggaggcgtcagcatagacgatgccgcanaggaactgggacttgagcgccttgtggacgagcaaaacgaataccacacccttgcgggctttattctttacctggccgaagagataccaaaaaccggcgcgtgttttgactacgaaggctttcgttttaaggtcattgatcttgacaacaacagaatcgacaagatactaatctcaaaaaatgattaa

SEQ ID NO: 60240 - protein, 285 aa, Unknown
  Obtained from environmental sample
  DOMAIN (74)...(190): CBS domain pair
  misc_feature (1)..(285): Xaa is any amino acid
MVKIFKNYYRSTKSLLFKFLKRIFSKKSTKGEMTEEELHLALLEGEKSGVVESKERTMVEGVFYLGDKPVSAFMTHRSEIQWLDINSSAEDSRRAAESSPSQIWFPVAEGELDEVAGAVSARDIFRALLDEPWPGLKSIMHPPYFVPETMSALKAFEAFKKADASDLFVMDEYGGFSGILTIRNLIEEIVGELSASGKEEEAIVKQEDGTWLADGGVSIDDAAXELGLERLVDEQNEYHTLAGFILYLAEEIPKTGACFDYEGFRFKVIDLDNNRIDKILISKND

SEQ ID NO: 60241 - DNA, 498 bp, Unknown
  Obtained from environmental sample
  misc_feature (1)..(498): n is a, c, g, or t
ttgccagcgccgccggacgggcaaacaccggtatctggttcgccgacgcccaaacgccggagagcttgcccccgccgtcgtagggttcgtagacaccgccgccggccccgtaattcaccacactgtagaatgcgccggcgcccaaaaccgacaccgacgtccaaaggaactccgagaggttgtctaccggcgggccaaagtacgcgcccatcctattcagctccctcttgtcgccgtgaatacggtcgacggcggccattagcacctccttggccggaacgcccaatgctccttccaaactcactgtcgctatcggtttaccgctcaccacgttcagcaacacaaggcgcacggcggaacgcgatccggttatatcgaaagtaccgaaaatcatcctgcggacgccaagcgcccggcctatgccgtagacgcactgcgggtcgcggcaactacccttacccaagcgcgtaccggcaagggcgtcatctatgtcgctag

SEQ ID NO: 60242 - protein, 165 aa, Unknown
  Obtained from environmental sample
  misc_feature (1)..(165): Xaa is any amino acid
MPAPPDGQTPVSGSPTPKRRRACPRRRRVRRHRRRPRNSPHCRMRRRPKPTPTSKGTPRGCLPAGQSTRPSYSAPSCRREYGRRRPLAPPWPERPMLLPNSLSLSVYRSPRSATQGARRNAIRLYRKYRKSSCGRQAPGLCRRRTAGRGNYPYPSAYRQGRHLCR

SEQ ID NO: 60243 - DNA, 444 bp, Unknown
  Obtained from environmental sample
  misc_feature (1)..(444): n is a, c, g, or t
gtgcgcattagaaaaacaggcgttgaattgtacgggcagtgcaaaccaacacattttgtttcaggaacaggcacttcgggaacttttatgggcgtttccaaacggcttaaagatattgattcgtccataaaagttgttcttatgcagccggactctccttttcacggacttgagggaatgaagcacatggaatcgacaataacgccgaaaatatttgacaagagtattgccgatttacacataatagtaaaaacagaagacgcttacaaaacctcccggcgtcttgccgcagaagaaggcatatttgtggggataagctcaggggcaaatgtgttcgccgcgatggagttggcaaagaccctgccttcaaactcgcgtgtagctacaattctgtgcgataacggcagccgttatatgtcacaacctttatggaaagatatctga

SEQ ID NO: 60244 - protein, 147 aa, Unknown
  Obtained from environmental sample
  misc_feature (1)..(147): Xaa is any amino acid
MRIRKTGVELYGQCKPTHFVSGTGTSGTFMGVSKRLKDIDSSIKVVLMQPDSPFHGLEGMKHMESTITPKIFDKSIADLHIIVKTEDAYKTSRRLAAEEGIFVGISSGANVFAAMELAKTLPSNSRVATILCDNGSRYMSQPLWKDI

SEQ ID NO: 60245 - DNA, 450 bp, Unknown
  Obtained from environmental sample
  misc_feature (1)..(450): n is a, c, g, or t
atggaaagatatctgatgttaaaactttcttccgaatttgaaaaaaaaataaaagcggacggcgaagccgcttatcccaacgaatgctgcggcgttttaatcggcgaagttgataatgaaggtgtaaaaactgtaaggaatacgctgaccattcataacgccagggaagacagcgaacaatatcaccgttttctcataacgccggaggatatgatgaatgcggaacaaactgcaagatcgatgaaacttgacgttataggtttttaccactcgcaccccgatcatccgtctgcgccgtcaggatatgataaagatcacgcgcttcctttttattcttatgtgattgtatctgtggataaaggtaaagcgcagattcttacaagctgggaacttgcgaatgacagaagtgattttatacaggaaaaaattataaaggaggtttctaattga

SEQ ID NO: 60246 - protein, 149 aa, Unknown
  Obtained from environmental sample
  misc_feature (1)..(149): Xaa is any amino acid
MERYLMLKLSSEFEKKIKADGEAAYPNECCGVLIGEVDNEGVKTVRNTLTIHNAREDSEQYHRFLITPEDMMNAEQTARSMKLDVIGFYHSHPDHPSAPSGYDKDHALPFYSYVIVSVDKGKAQILTSWELANDRSDFIQEKIIKEVSN

SEQ ID NO: 60247 - DNA, 1374 bp, Unknown
  Obtained from environmental sample
  misc_feature (1)..(1374): n is a, c, g, or t
gtggaagtaaacggcggcacggcgggcgaggctgtaaacgcgctggcggacgcctaccctgcccttaaaacccacctgttcacggaagacggccggcttcgcgacttcatcaacttgttcgcgggcggcgtaaacataaacagcttgcagggacttaacacgccgattgcagataacggcgaattgatgatagttcccgccattgccgggggaagcggcggcgataataccggctctgagattaccaatgaggaaatcgcgcgttacagccgccatctgcttttgccggaaatcggcgttgaggggcaaaaaaaattaaaggcggcgaaagttctaattgtaggcaccggcgggcttggcgcgccgcttgccctgtaccttgccgcggccggcgtgggaacaatagggctggtggattttgacgtggttgacgaatcaaaccttcagcggcagataattcacagcacacgcgacgtaggaaggcccaagacagcgtcggcaaaggacagaatcaagggaataaacccgcttgtaaacgtggcgacgcataacgagatgcttacaagcaaaaacgcgcttgagctttttgcggattacgacattatcgcggacggaaccgacaattttcaaacgcgctaccttgtaaacgacgcatgcgtatttacaggaaaattgaacgtttacggctcaatattccagtntgagggacagtcgagtgtgttcggggcgaaggagggcccatgctaccgctgtttgtatccctccccgccgccgcccgggcttgtaccctcctgcgccgagggcggggtgatgggcgtattgccgggcatcataggaaccatacaggcggcggaggtcataaaacttatagtgggcggggctaaaccgcttatcgggcgcttgctacacttcgacgcgtggcgcatgtcgttccgcgaactcaaattggataaagatcccaactgcccggtatgcggaaaaaatcccaccatacacgaactcatcgactacgagcagttctgcggccttaagaagacgcaggagagcgagcccatagataccatcaccgccgtcgacttaaagcggcgtcttgacgatggcgacaagatccaattcatagacatccgcgaaccccacgaacgcgccatagtgaaatttcccgacgctataataatgccgctcggtcaattggtgcgccgcatggaagagttagaccccgaaatcgactccgtattcctctgcaaaataggccaacgtagcatactggggataagagcgctgcgcgaagcagggtacaagggcagactgctgaacctgcaagacggcctgaacgcttgggcgcgggatgtggataaatctatgccggtgtattga

SEQ ID NO: 60248 - protein, 457 aa, Unknown
  Obtained from environmental sample
  DOMAIN (1)...(71): ThiS family
  misc_feature (1)..(457): Xaa is any amino acid
MEVNGGTAGEAVNALADAYPALKTHLFTEDGRLRDFINLFAGGVNINSLQGLNTPIADNGELMIVPAIAGGSGGDNTGSEITNEEIARYSRHLLLPEIGVEGQKKLKAAKVLIVGTGGLGAPLALYLAAAGVGTIGLVDFDVVDESNLQRQIIHSTRDVGRPKTASAKDRIKGINPLVNVATHNEMLTSKNALELFADYDIIADGTDNFQTRYLVNDACVFTGKLNVYGSIFQXEGQSSVFGAKEGPCYRCLYPSPPPPGLVPSCAEGGVMGVLPGIIGTIQAAEVIKLIVGGAKPLIGRLLHFDAWRMSFRELKLDKDPNCPVCGKNPTIHELIDYEQFCGLKKTQESEPIDTITAVDLKRRLDDGDKIQFIDIREPHERAIVKFPDAIIMPLGQLVRRMEELDPEIDSVFLCKIGQRSILGIRALREAGYKGRLLNLQDGLNAWARDVDKSMPVY

SEQ ID NO: 60249 - DNA, 603 bp, Unknown
  Obtained from environmental sample
  misc_feature (1)..(603): n is a, c, g, or t
ttgatggagaagatgggcttagaggctatttatcgcaagcccaagctgtcggaaccgcatcccagccacaaggtttatccctacttgttgcgcggagtgaagatcacaagggtcaatcaggtctggagtacggacatcacgtacatccggttgcgtcgcggctttgtgtatctgacggcggttgtcgactggtacaaccgctgcgtgctgtcgtggcgtctctcgaccggccttgacacaagcttttgcgttgatgcgcttgaggaggctattgagcgttacggcacaacagacgtcttcaacaccgatcaggggggctcagttcaccagtatggcctttacgtccgtcttgaacaaacacggcgtaaaaatcagcatggacgcaaaggcagggcgttggacaacgtcttcgtggagcggctttggagaaccgttaaatacgaagaggtttatctgaaggagtacgggagtgtcgcggaatgccgtgccgaaatggcggcgttcttcgaccggtacaacacccggcggccacatcagtccttggggtaccggtatcctaaagacgtttttatggaggggattacccactccattgcggcataa

SEQ ID NO: 60250 - protein, 200 aa, Unknown
  Obtained from environmental sample
  DOMAIN (34)...(191): Integrase core domain
  misc_feature (1)..(200): Xaa is any amino acid
MMEKMGLEAIYRKPKLSEPHPSHKVYPYLLRGVKITRVNQVWSTDITYIRLRRGFVYLTAVVDWYNRCVLSWRLSTGLDTSFCVDALEEAIERYGTTDVFNTDQGGSVHQYGLYVRLEQTRRKNQHGRKGRALDNVFVERLWRTVKYEEVYLKEYGSVAECRAEMAAFFDRYNTRRPHQSLGYRYPKDVFMEGITHSIAA

SEQ ID NO: 60251 - DNA, 591 bp, Unknown
  Obtained from environmental sample
  misc_feature (1)..(591): n is a, c, g, or t
gtgtttattcccctttgcgtgggcggcggcatacgttgccttgacgatatgcgtgacgcgatgaacgccggcgcggacaaggtatcggtttgcacttcggctttgaaccgccccgaactgttaagcgaaatggcaaacgcctacggcagccagtgcgtggtgttgtcgattgacgcgaagagggtaggagagggcttacaatggcacgccttttcccacgggggcagaagggataccggaattgacgctattgagtgggcggttcgcgcggttaatcttggcgctggcgaaatccttctcaattccattgacgcggacggcaccggcggcggttacgatcttgagctgaccaggcgtattctcaattccgtgccggttccggtaatcgcctcgggcggcgcgggaacccttgaacagatagctgatgttctgctcagtaccgccagccctgaggccggctcaggctgtggggtcgaaactcccggcgccgatgccgcgcttattgcgtcgcttttgcatttcggcatgactacgatcagggagataaaaaagaccgcggaggcaaaaggcgtctgcgtcagattcaattaa

SEQ ID NO: 60252 - protein, 196 aa, Unknown
  Obtained from environmental sample
  DOMAIN (1)...(178): Histidine biosynthesis protein
  misc_feature (1)..(196): Xaa is any amino acid
MFIPLCVGGGIRCLDDMRDAMNAGADKVSVCTSALNRPELLSEMANAYGSQCVVLSIDAKRVGEGLQWHAFSHGGRRDTGIDAIEWAVRAVNLGAGEILLNSIDADGTGGGYDLELTRRILNSVPVPVIASGGAGTLEQIADVLLSTASPEAGSGCGVETPGADAALIASLLHFGMTTIREIKKTAEAKGVCVRFN

SEQ ID NO: 60253 - DNA, 543 bp, Unknown
  Obtained from environmental sample
  misc_feature (1)..(543): n is a, c, g, or t
ttgtttccggcgtggacgagcttgccccgggaacaacgccctttgaaaggattatcttcccgggcgacggccatttcgcgacggcaatggcttctctgtcgaaatccggttatgatcaggcgatcagggaatggatacaggccgacaggcctttttctgggaatatgcatcggcctgcagctgctttttgaatcatcggaagaggcaccgcctgttaacggcgttgaagttaagggtctctctgtgattcccggaaccgttaggcgttttcccgggcgcaaactgccccaaatcggctggaaccaaacggaagcgcggcccaattcaacgctgttcaaaggcataaacgaaaaaagttttttttattatatacattcttattacgccgatccggcggatgaatcaatatgcgccgccgaagccgaatattatttgcgctactgctgcgcggtggaacgcggcgccctggctgcggtgcagttccatcctgagaaatcaggcgcggcggggcttgcgctgttaagaaattggatcaacgggtga

SEQ ID NO: 60254 - protein, 180 aa, Unknown
  Obtained from environmental sample
  DOMAIN (13)...(180): Glutamine amidotransferase class-I
  misc_feature (1)..(180): Xaa is any amino acid
MFPAWTSLPREQRPLKGLSSRATAISRRQWLLCRNPVMIRRSGNGYRPTGLFLGICIGLQLLFESSEEAPPVNGVEVKGLSVIPGTVRRFPGRKLPQIGWNQTEARPNSTLFKGINEKSFFYYIHSYYADPADESICAAEAEYYLRYCCAVERGALAAVQFHPEKSGAAGLALLRNWING

SEQ ID NO: 60255 - DNA, 540 bp, Unknown
  Obtained from environmental sample
  misc_feature (1)..(540): n is a, c, g, or t
atgggacacatgcttaatacttttgcccgccacgggctttttgatctggaaattgccgcaaggggtgatcttgaggttgaccaacaccacctggtggaggatacgggaatcgttttgggacagtgtttcgcaaaggccttaggtgaaaaaagagggatacgccgcagcgggagctgccttttccccatggatgagacccttgcccgcgccgcggttgatattggcggccgcagttatttgtttttcgaaggccagcttggcggcacgcctttattgtcagcagatgattcagacgggcttttcaggttccagagcgacaccatagaagatttttggcagggctttgtgggcgcggcaggctgcaatctgcatttggaaattatccggggcagaagcgaccaccacaaaatagaggccctgtttaaagcggccgcccgttccttccgcatggcctgcgaatttgacgatcgggcgcgtgacgtaatcccctcgacaaaaggctcattgccgggatttgacgctccgggggtgcttgtgtga

SEQ ID NO: 60256 - protein, 179 aa, Unknown
  Obtained from environmental sample
  DOMAIN (3)...(149): Imidazoleglycerol-phosphate dehydratase
  misc_feature (1)..(179): Xaa is any amino acid
MGHMLNTFARHGLFDLEIAARGDLEVDQHHLVEDTGIVLGQCFAKALGEKRGIRRSGSCLFPMDETLARAAVDIGGRSYLFFEGQLGGTPLLSADDSDGLFRFQSDTIEDFWQGFVGAAGCNLHLEIIRGRSDHHKIEALFKAAARSFRMACEFDDRARDVIPSTKGSLPGFDAPGVLV

SEQ ID NO: 60257 - DNA, 366 bp, Unknown
  Obtained from environmental sample
  misc_feature (1)..(366): n is a, c, g, or t
gtgaggatttttaagtatccatggtttagcagatttgccaataaagaaggtataacagatgctgaattgcgggaactggtcaatcaacttgaggcggagcaagtcgatgcagaccttggaggtggcgtttataagatccgagtggctcggcctggtgaagggaaagcaagcggctaccgtgttattgtgtactttaggaataaatttcgtgttttttttgtatatgcttttgcgaagtctgacagaggcaatatagatgaaggagaattgaaagcgttcaaggttgatgccaaagatcaatttgctctgaccgacgatcagattggagttcgtttgaaaaatggaaccctaattgaaatcctttag

SEQ ID NO: 60258 - protein, 121 aa, Unknown
  Obtained from environmental sample
  DOMAIN (1)...(121): Protein of unknown function (DUF1044)
  misc_feature (1)..(121): Xaa is any amino acid
MRIFKYPWFSRFANKEGITDAELRELVNQLEAEQVDADLGGGVYKIRVARPGEGKASGYRVIVYFRNKFRVFFVYAFAKSDRGNIDEGELKAFKVDAKDQFALTDDQIGVRLKNGTLIEIL

SEQ ID NO: 60259 - DNA, 1059 bp, Unknown
  Obtained from environmental sample
  misc_feature (1)..(1059): n is a, c, g, or t
ttgaaccctttgctgttggtgccaatcggtttcggtattgtttttgccaatatccccttcgcgaacatgggcagccctggaatctggaacgaagaactccaccttttcgagcatcagggtttcttgagcgttatttataacagcggggtagggaacgaattcttccccctgataatattcatcggcataggggccatgaccgatttcggcccgcttatcgcgaaccccaaaaccgcccttttgggcgcggcggcccagttcggcgtttttgcgtccatgttttttataagcgttgccaacttcctgccgggagtggcctttaacctgaaagaggcctgcgctgtggctatcatcggcggcgcggacggccccaccacgatttacatcgcggcaaagctcgcccctcatcttcttgcaactgtggcggtcgcggcctattcgtacatggccctggtaccgctgattcagccgcccattatgagggcgcttacaaccaaacaagaacggctaatcagaatgaggcagttaaggccggtttcaaaagcggaaaaagtcgccttcccaatgctggtatttattctcgcgatatttctcattccgcccgccgccccgcttatcggctgtctaatgttcggcagttttatccgggaaatcggcgtcgtagacaggctctccaataccgcccagaacgatctgatgaatgtggtgtctatgttcctttctttgggcgtgggcagtcagatgactcccgaaaagttcctgaacccctcgtccctcattatcgttgtgatggggcttgttgcttttgccatcgccacagccggcgggttaatggtagccaagttcatgaacctcttccttaaagaaaagatcaatcctctcatcggttccgccggtgtttccgccgtaccaatggccgcccgcgtttccaacagggtcggtcttgaagaagatcctggcaacttcatcctgatgcacgcaatgggccccaacgtggccggcgtcatcggaaccgccattgccgcaggtgtcatgatcgcagtttacggcgcgcactaa

SEQ ID NO: 60260 - protein, 352 aa, Unknown
  Obtained from environmental sample
  SIGNAL (1)...(23)
  DOMAIN (1)...(350): Na+-transporting methylmalonyl-CoA/oxaloacetate decarboxylase, beta subunit
  misc_feature (1)..(352): Xaa is any amino acid
MNPLLLVPIGFGIVFANIPFANMGSPGIWNEELHLFEHQGFLSVIYNSGVGNEFFPLIIFIGIGAMTDFGPLIANPKTALLGAAAQFGVFASMFFISVANFLPGVAFNLKEACAVAIIGGADGPTTIYIAAKLAPHLLATVAVAAYSYMALVPLIQPPIMRALTTKQERLIRMRQLRPVSKAEKVAFPMLVFILAIFLIPPAAPLIGCLMFGSFIREIGVVDRLSNTAQNDLMNVVSMFLSLGVGSQMTPEKFLNPSSLIIVVMGLVAFAIATAGGLMVAKFMNLFLKEKINPLIGSAGVSAVPMAARVSNRVGLEEDPGNFILMHAMGPNVAGVIGTAIAAGVMIAVYGAH

SEQ ID NO: 60261 - DNA, 513 bp, Unknown
  Obtained from environmental sample
  misc_feature (1)..(513): n is a, c, g, or t
atgtttgatagaaaagttgatccaatttgggtattgaaaggatgcttgatcctgcttgtagccgcctttttgtttaattttgtcggctccgctttttcttccagggccgaggcgcaaaccgccgcgtcaagcgacgagcttccttctttcagaaatatgagtggccttatccccaacagccgtgatttgcctcggataacccttggaacctttcttgcaaacatagcaaggactacagggatatatgcctttttcactgatgtaatacaaggtgaaactcccgcgggtcagaaaataaccgtgtttggttggcatgaactcataatggttctggtcgggtttttggttatttatttgggggcggcaaaggattttgaaccctttgctgttggtgccaatcggtttcggtattgtttttgccaatatccccttcgcgaacatgggcagccctggaatctggaacgaagaactccaccttttcgagcatcagggtttcttgagcgttatttataa

SEQ ID NO: 60262 - protein, 170 aa, Unknown
  Obtained from environmental sample
  misc_feature (1)..(170): Xaa is any amino acid
MFDRKVDPIWVLKGCLILLVAAFLFNFVGSAFSSRAEAQTAASSDELPSFRNMSGLIPNSRDLPRITLGTFLANIARTTGIYAFFTDVIQGETPAGQKITVFGWHELIMVLVGFLVIYLGAAKDFEPFAVGANRFRYCFCQYPLREHGQPWNLERRTPPFRASGFLERYL

SEQ ID NO: 60263 - DNA, 1908 bp, Unknown
  Obtained from environmental sample
  misc_feature (1)..(1908): n is a, c, g, or t
ttgaacgaagatccctgggagcgtcttaagaaactcaagtccgccatgcctaattcaaagatcatgatgctgctgcggggccagaaccttcttggctacaggcattacgcggacgatgtggtcgccaagtttgtggaatacgccgcaaaagacggggtggatgttttccgtatttttgatgcggtaaacgaccccaggaattttgaagccgccaccaaagcggccaagaaaaccggcaagcatattcaggctaccatttcctatgctgtaacacccttccatacaatcgaaaagtacgcggaattcgccaaacagcttgtgaacataggcgcggattccatttgtataaaagatatggccggtcttcttaaaccctacgaaggctacgaccttgtaaaagcgattaagaaagtaacggatattcctattgaaattcatacccacgcgactaccggtatgtcggtagccacccttaccaagtgtgccgaagcgggcgccgagatcctggacacgaccatttcttccatgtccatgggaaccagccacagccccaccgagaccatggtggaaatcttcaggggcaccgaatacgacaccggccttgatatcaacctgcttttggaaattgccgcctacttccgcgatgttcgcaagaactacaagaagttcgagtccagtttccttggcgcggacacccgtatcctcctttctcaggtgcctggtggtatgctcagcaacctggaaagccagctcaaggagcaaaacgccgccaacaaaattgacgacgttctgaaagagatcgcgatagtccagaaagatgccggctatccgccgctggtcacacctacaagccaaattgtcggaacccaggcggtgttcaacgttctctttggccgctataacaggctttctggtgaattccaggatttgatggctgggaaatacggcgcctgcccggctcccaaaaacagggacgtggtcaaaaaggcccttgaagccctcaaaatggaaaaagaaataacttaccgcccggctgacgacattccggacgaatacagcaaactcgaaggcgaatgtaaaaccctccttgggacaagcactgttaccccggaggatgtccttacccttgccatgttccccaaagtggcgccagacttcttcaagaaccgttccaaggggcccgtggtctttaagccagaaccggaagcaacgacggccccagttgccgcttctgccgcagcggtaccgaaagccggtcaggcggcccagtacagcgtcaacgttgacggcgtcaactacaacgtggtggtggctccggcgggtactatcgctgttgccccggcatcgggttcagtacccgtggcttctaaggcggtcgcgccctcaggcggcggagccgcggttcttgctcctgtggcgggaaacatcatccgctacgcagtagccgaaggcgcgactgtgaaagcgggagacaacgtgatcatcatggaatccatgaaaatggaactggaaataaaagctacagcggcgggaaaggttcatttcctggttgccgcgggtactacagttgcgtcccagcagcccatcgctgaaattggcggcggggtgggagcggttccagttgcgcctgcatccgttccagcggcgcccgctcctgttgccccagccgccgccgcgcccattgcggccccctcaggcgggacagcggtcctcgcgccggttgccgggactatcatccgctacgcggtagccgaaggcgcggctgtgaaatcaggagacaatgtggtcattatggaatccatgaaaatggaactggaaattaaagctactgcggcggggaaggttcatttcctttcgacgcccggcgctcgggttgcctcccagcagcccattgctgaactaaagtag

SEQ ID NO: 60264 - protein, 635 aa, Unknown
  Obtained from environmental sample
  DOMAIN (1)...(219): HMGL-like
  misc_feature (1)..(635): Xaa is any amino acid
MNEDPWERLKKLKSAMPNSKIMMLLRGQNLLGYRHYADDVVAKFVEYAAKDGVDVFRIFDAVNDPRNFEAATKAAKKTGKHIQATISYAVTPFHTIEKYAEFAKQLVNIGADSICIKDMAGLLKPYEGYDLVKAIKKVTDIPIEIHTHATTGMSVATLTKCAEAGAEILDTTISSMSMGTSHSPTETMVEIFRGTEYDTGLDINLLLEIAAYFRDVRKNYKKFESSFLGADTRILLSQVPGGMLSNLESQLKEQNAANKIDDVLKEIAIVQKDAGYPPLVTPTSQIVGTQAVFNVLFGRYNRLSGEFQDLMAGKYGACPAPKNRDVVKKALEALKMEKEITYRPADDIPDEYSKLEGECKTLLGTSTVTPEDVLTLAMFPKVAPDFFKNRSKGPVVFKPEPEATTAPVAASAAAVPKAGQAAQYSVNVDGVNYNVVVAPAGTIAVAPASGSVPVASKAVAPSGGGAAVLAPVAGNIIRYAVAEGATVKAGDNVIIMESMKMELEIKATAAGKVHFLVAAGTTVASQQPIAEIGGGVGAVPVAPASVPAAPAPVAPAAAAPIAAPSGGTAVLAPVAGTIIRYAVAEGAAVKSGDNVVIMESMKMELEIKATAAGKVHFLSTPGARVASQQPIAELK

SEQ ID NO: 60265 - DNA, 864 bp, Unknown
  Obtained from environmental sample
  misc_feature (1)..(864): n is a, c, g, or t
gtgatcggcggcggttacaaccggatgaaccccttcacggtgcgtcgggcgacccagggtttggccaactacgtctccaaagccgtgccggacggcgcctccgcggtcatagcctacgactcccgcaactactccgacctcttcgcgctgcaagccgcgctcgtcttctgcgccagcgggatcaaggcctacctattcacaggcttgcgccccacgccggagctctcgttcgccgtcaggcagttaaaagctaccgtcggcatcgtagtcaccgccagccacaacccgccggaatacaacggctacaaggcctattggaacgatggcgctcaggtcgtccccccccacgacaaggccattataaaagaggtgctgtccgtcggcgacgcgatcaaggccatggacaaggacgaggcgatcaaggccggactgcttgtgatgatcgacaaagagatagaccgcccgtttatagatatggtcaagagatgcgccatccgccccaacctgctgaaggagggcggcaagagcgtcaaggtagtgtacaccccgctccacggcacaggcgctatgcccgttgacaccgcgcttaaagagatgggcgttgacgtcacgttcgtcaaggagcagcaggcgcccgacggaaacttccccacggttagctaccccaacccggaagaggcctccgcgatgaggctcgcgctcgagctcggcgagaaaatcggcgccgacttagtgctcgggaccgaccccgacgccgaccgcctcggcatagccgcgccggacggcggcgcgctcaagcttgtcaccggaaaccagttaggctcgctctggccgactacgtcttcagcgcctcggccgatctga

SEQ ID NO: 60266 - protein, 287 aa, Unknown
  Obtained from environmental sample
  DOMAIN (154)...(264): Phosphoglucomutase/phosphomannomutase, alpha/beta/alpha domain II
  misc_feature (1)..(287): Xaa is any amino acid
MIGGGYNRMNPFTVRRATQGLANYVSKAVPDGASAVIAYDSRNYSDLFALQAALVFCASGIKAYLFTGLRPTPELSFAVRQLKATVGIVVTASHNPPEYNGYKAYWNDGAQVVPPHDKAIIKEVLSVGDAIKAMDKDEAIKAGLLVMIDKEIDRPFIDMVKRCAIRPNLLKEGGKSVKVVYTPLHGTGAMPVDTALKEMGVDVTFVKEQQAPDGNFPTVSYPNPEEASAMRLALELGEKIGADLVLGTDPDADRLGIAAPDGGALKLVTGNQLGSLWPTTSSAPRPI

SEQ ID NO: 60267 - DNA, 1608 bp, Unknown
  Obtained from environmental sample
  misc_feature (1)..(1608): n is a, c, g, or t
gtgcaggaggagatttcgcagggggtcgggcggctcgccgggcatctcgggctctccaacttcatcatgttctttgattcaaatgacgtgcagctctccactaagaccgacgcggtcacgagcgaggacaccgaggccaagtacagggcttgggggtggagcgtttccgtggtggacgggaacgatgataaccagatacgcggcgcgcttgcgtcggcgcaaaacgagagggagcggcccacgctcataatcggcaagacggtcatgggcaagggggcgcgtaccgcggacgggtcgtcctttgaggggaaggtctgcacccacggtcagccgctctccgaggccggcgcgtcggcggaggcaacgataaagagtctgggcggcgatccggcaaacccgttcgccgtatttcccgacgtggcggagcgttaccgcgccgtgctggagagtaagcgggcctacgcccgcgcaaagagggccgagcaggcggcttgggagagggacaatcctgatcttgccaagaaattcgcctcttacattaataataagcttcccgacatagactggtcgtcgatagcgcataaaccaggcgtggccagccgcgccgcctccggtacggtgctggcggagttttcggccaaggtgggcaacatgatagtctcctccgccgacctctgcaacagcgacaagacggacggtttcctaaaatcgtcaaagatattgagtagaggagacttctcaggcggctttcttcaggccggagtggcggagctgacgatggccgcggtgatgaacggcatagcctcgcacggcggtgtgctggccgtctgcggcacgttcttcacttttctcgactacatgaagccggcggtgcgcatggccgccctgatggaactgccggtaaagtacgtttggtcgcacgataacttcagggtaggggaggacggcccgacccaccaaccggtagaacacgaggcgcaaatcaggttgttggagcgtatggccaacctgaatggccgcaggagcatgctcgtactgcgccccgccgacgccgccgagacgacggaggcgtggcgaatggcgctggaaaatatgaccggccccacagccctattgctgagccgccaagcgctggccgacgtacccgctaaaggatcatcctcccgcgccgtcgatgcccaaggggcgaaatttggcgcgtacgcggtagtcgatagcggtaatccaaaattgataatgatagccaacggagccgaagtagtgacctgcgtggaagccgccaaggcgataaagaatgaacacggtatagatgtaagggtgatcagcgcgatatcggagggcttgtttaaggaacagtctcaagaatataaagacggattgatcccattcggcgtcccgacgttagcctttaccgcaggactgcccgtcaatttcaaggatatggtaggccccttaggtaaagtgataggcatggaaagattcggagcgtcggcaccgttcaaagtacttgaggaaaagttcggctatacgccggaagcgttgataaagcggacgcttgattatttaaaagagtatgaggtattaattaataggatggcgaagctgtaa

SEQ ID NO: 60268 - protein, 535 aa, Unknown
  Obtained from environmental sample
  DOMAIN (400)...(514): Transketolase, C-terminal domain
  misc_feature (1)..(535): Xaa is any amino acid
MQEEISQGVGRLAGHLGLSNFIMFFDSNDVQLSTKTDAVTSEDTEAKYRAWGWSVSVVDGNDDNQIRGALASAQNERERPTLIIGKTVMGKGARTADGSSFEGKVCTHGQPLSEAGASAEATIKSLGGDPANPFAVFPDVAERYRAVLESKRAYARAKRAEQAAWERDNPDLAKKFASYINNKLPDIDWSSIAHKPGVASRAASGTVLAEFSAKVGNMIVSSADLCNSDKTDGFLKSSKILSRGDFSGGFLQAGVAELTMAAVMNGIASHGGVLAVCGTFFTFLDYMKPAVRMAALMELPVKYVWSHDNFRVGEDGPTHQPVEHEAQIRLLERMANLNGRRSMLVLRPADAAETTEAWRMALENMTGPTALLLSRQALADVPAKGSSSRAVDAQGAKFGAYAVVDSGNPKLIMIANGAEVVTCVEAAKAIKNEHGIDVRVISAISEGLFKEQSQEYKDGLIPFGVPTLAFTAGLPVNFKDMVGPLGKVIGMERFGASAPFKVLEEKFGYTPEALIKRTLDYLKEYEVLINRMAKL

SEQ ID NO: 60269 - DNA, 690 bp, Unknown
  Obtained from environmental sample
  misc_feature (1)..(690): n is a, c, g, or t
atgagtaacataaaaaacgcttttaaaaacggaaaagcttttatcgcctttgtcaccggcggcgacccaagtatcgaaaaaacaaaagagtttgtccttgagatgattcgcgcgggcgcggatttaatagaaatcggcattcctttttccgatccaatcgccgaagggccggtaattcaggaagcgaacaaccgcgcccttgccgccggagcgacagtagaaaagctattcggtcttgtcgccgaattacggaaagagacaagcgtccccatcttattcatgacatacgtcaacccggttttccactataattacgacgcttttttcaaacgctcaagcgatgtcggcttagacggcattatcatccccgatctcccttttgaagaacaggctcccgtgaaagaagcggcaagtaaattcggtatagaccttatttccctaatcgctcccacttccgaagcgcggataaaagaaatcgcgaaaaccgcaagcggttttatctatcttgtttcctcaatgggggtaacgggcatacgcggaaaaattaccacagacctcgattcaatcacaaaagcgattaaatccgtttcatcggttccgctcgccataggcttcggcattcacactcccgcgcaggcgtcgcagatggcaaaaatcgcggacggcgttattgtcggaagcgccatgtaa

SEQ ID NO: 60270 - protein, 229 aa, Unknown
  Obtained from environmental sample
  DOMAIN (8)...(229): Tryptophan synthase alpha chain
  misc_feature (1)..(229): Xaa is any amino acid
MSNIKNAFKNGKAFIAFVTGGDPSIEKTKEFVLEMIRAGADLIEIGIPFSDPIAEGPVIQEANNRALAAGATVEKLFGLVAELRKETSVPILFMTYVNPVFHYNYDAFFKRSSDVGLDGIIIPDLPFEEQAPVKEAASKFGIDLISLIAPTSEARIKEIAKTASGFIYLVSSMGVTGIRGKITTDLDSITKAIKSVSSVPLAIGFGIHTPAQASQMAKIADGVIVGSAM

SEQ ID NO: 60271 - DNA, 1185 bp, Unknown
  Obtained from environmental sample
  misc_feature (1)..(1185): n is a, c, g, or t
atgaataacggaagattcggcgaatacggcggccggtatatacccgaaacactgatgaacgagatcatcaatcttgaaaaagcctacaaccattacaaggacgacggcgcgttcaaggcggaacttgaaagcctgatgaagaattacgcgggcaggccgtctcttttatactacgcggaaaaaatgacgcgcgatctcggcggggcgaaaatctaccttaagcgcgaggacttgaaccacaccggctctcacaagatcaacaacgttctgggacagaccctgctcgccaaaaaaatgggcaagacaagaataatagccgaaaccggggccggccagcacggggtagcggcggcgacagcggcggctctccttggaatggaatgcgaaatcttcatgggcaaggaagatacagagaggcaggcgcttaatgtctaccgcatggaactgttaggcgcaaaggttaatccggtaacgaccggaactatgacgttaaaagacgccgtaaacgaaacaatgcgcgaatgggtcagccgcgtccatgatacccactatgtgttaggctccgtgatggggccccatcccttcccgatgattgtgcgcgattttcaatcggtaatcagcaaggaggcaagggagcagattctcgccgcggaaggcaaactgccggcggcagtccttgcctgtgtaggcggcggcagtaacgcgatgggcgctttttacaattttataaatgacaagaatgtcaggctgattggctgcgaagccgccggtcttgggatagagacggaaaaacacgccgcctcaatcgcgaagggtactgtcggtatttttcacggaatgaagtcgtacttctgccagaacgaagaagggcagatcgcgcccgtgtactcaatctccgcggggcttgattatcccggcatcgggcctgaacacgcgtggctgcatgacaccaaacgcgccgaatatgtgcccgtcacggacgaggaagccgtctgcgccttcgagtacctttcccgcaccgagggaattatctgcgcgatagagagcgcccacgcggtagcgcatacgcagaaaatagcgcgtaacttcggcaaggatgagagcgtaattatctgcctttcagggcgtggagacaaggacgtggcttcaatagcgcggtacagggggaaaacaatcaatgagtaa

SEQ ID NO: 60272 - protein, 394 aa, Unknown
  Obtained from environmental sample
  DOMAIN (47)...(376): Pyridoxal-phosphate dependent enzyme
  misc_feature (1)..(394): Xaa is any amino acid
MNNGRFGEYGGRYIPETLMNEIINLEKAYNHYKDDGAFKAELESLMKNYAGRPSLLYYAEKMTRDLGGAKIYLKREDLNHTGSHKINNVLGQTLLAKKMGKTRIIAETGAGQHGVAAATAAALLGMECEIFMGKEDTERQALNVYRMELLGAKVNPVTTGTMTLKDAVNETMREWVSRVHDTHYVLGSVMGPHPFPMIVRDFQSVISKEAREQILAAEGKLPAAVLACVGGGSNAMGAFYNFINDKNVRLIGCEAAGLGIETEKHAASIAKGTVGIFHGMKSYFCQNEEGQIAPVYSISAGLDYPGIGPEHAWLHDTKRAEYVPVTDEEAVCAFEYLSRTEGIICAIESAHAVAHTQKIARNFGKDESVIICLSGRGDKDVASIARYRGKTINE

SEQ ID NO: 60273 - DNA, 369 bp, Unknown
  Obtained from environmental sample
  misc_feature (1)..(369): n is a, c, g, or t
gtgatcaaagttgcagggtttttatcaataaaacggaaaaagaatccaacagaaaaggaagaagacaaccgggattttgcgtattttgcgtattcgggaataataaataataaaaattctgattatatccttattgattcaggagcgggctcaggaaaaacttttaattgggacttgttgaaaaaattaaaaatagaaaaaccatggtttctcgccggaggcatcaatactgacaatatagccagggcgcttgccttaaacccttttgcagtagacataagcagcggggccgaaacagacggtatcaaaaaccgcgaaaaaatattacaattaatcgctagcgcaagaaaaggaaataaacatgaataa

SEQ ID NO: 60274 - protein, 122 aa, Unknown
  Obtained from environmental sample
  DOMAIN (1)...(114): N-(5'phosphoribosyl)anthranilate (PRA) isomerase
  misc_feature (1)..(122): Xaa is any amino acid
MIKVAGFLSIKRKKNPTEKEEDNRDFAYFAYSGIINNKNSDYILIDSGAGSGKTFNWDLLKKLKIEKPWFLAGGINTDNIARALALNPFAVDISSGAETDGIKNREKILQLIASARKGNKHE

SEQ ID NO: 60275 - DNA, 816 bp, Unknown
  Obtained from environmental sample
  misc_feature (1)..(816): n is a, c, g, or t
atggccgagcactggcgcgaccgccgctatgaagttttccgctgggatcgttttccttcgttgctgatatttgacactgccgattatgcggtgcaggacaggatgttcaagcggctggctttttttgttgaaaaagccgattttcggggcaggttggctttcgatgatgaaatagcggaactgcacggctggaatgcccacgattaccgcgcggaagaccttgcccgcttttttcagacagcccgcaaacaaaattttcccctgcttgccgaggaacgcgaactggaacgtattcttttggatgcgggcgtcattaaggaatccgatgccggtctgcaagcgggggaaggggggatcatttcgatttcacgggaatcggagtcttatctccgtttccttttcatggcccacgaaggattccacggtctcttttttattgatgaagattttcgcgatttcagccgccaacgctggcggcagcttccggcggaggcaaggcgttttatcgtttcatattttaatttccagcattatgccacagcggatgaatacctgctggtcaatgaatttatggcgcatcttttacagcagccggtctcgcaggcagcgcgttactttggccaaaccctgccctcccgcattgaagacggctggcggaaggcggatctccctgcgaaagatcaatcttccaactcatggcccacccttgcgcgaaccttcacccgcgaagcggacgccttttccgcctatgttggcggacgctggggccttgccgccggcagggttcatttggtaacggtaaggaataaagaataa

SEQ ID NO: 60276 - protein, 271 aa, Unknown
  Obtained from environmental sample
  misc_feature (1)..(271): Xaa is any amino acid
MAEHWRDRRYEVFRWDRFPSLLIFDTADYAVQDRMFKRLAFFVEKADFRGRLAFDDEIAELHGWNAHDYRAEDLARFFQTARKQNFPLLAEERELERILLDAGVIKESDAGLQAGEGGIISISRESESYLRFLFMAHEGFHGLFFIDEDFRDFSRQRWRQLPAEARRFIVSYFNFQHYATADEYLLVNEFMAHLLQQPVSQAARYFGQTLPSRIEDGWRKADLPAKDQSSNSWPTLARTFTREADAFSAYVGGRWGLAAGRVHLVTVRNKE

SEQ ID NO: 60277 - DNA, 978 bp, Unknown
  Obtained from environmental sample
  misc_feature (1)..(978): n is a, c, g, or t
gtgattttcttcattccaaagatgatgaaaaagacggcgaacaggaaaaatcaaggaatgaaaacaatggcgaacagtaacatggtggaagaataccttagctacctttcttccgtgcggggggtctccgaacgcaccgcttctgcctacaggcgcgacctcctacatttttcagcctattgcgaaaaccacggcttttctcccgaaaaggctacgccggtgcaggttagggggtttatcgccgacctttccgccgagggagccgcttccgtaagcgttaaccgctccctgtcttccatccggggtttttaccgctggatgctgcgttttggcttccgccaggacgacccttcttctcccttaagaaaccttaaaacgccaaaaacgcttcccgtctttttgtgggaagccgaaatggcccacttttccacgctcccggaaaaggctggcatactctggccggaacgggacaaggcgctgatcctggcgatgtattcaggcggccttcgcatatccgaagccgcgtcaataagccttaaaaacatggcccatgattttttatccgccaggatcgtcggaaagggaaacaaggagcggcaggtatttttctccgaggaagcaaaagaagccctgctcgcttatctgccagccagaacagcccgcgtcaaagcggaacgccccaccgataagctttttatcagccttaaaggggatcctatttctgttcctggcttgcgctggataatctcaaagtactcagaaagatcgggtctggataaaaatatacatccccattccctgcgccacagcttcgctacccatcttgtaaattccggctgcgacgtacgggttgtacaagagctcctgggtcatgccagcataagcacgacccagcgttatacccatgttaacatggagcatttaaagaaagtttaccagaaagcgcatccacacggaggagaaaaaagtgaaggctga

SEQ ID NO: 60278 - protein, 325 aa, Unknown
  Obtained from environmental sample
  DOMAIN (29)...(111): Phage integrase, N-terminal SAM-like domain
  misc_feature (1)..(325): Xaa is any amino acid
MIFFIPKMMKKTANRKNQGMKTMANSNMVEEYLSYLSSVRGVSERTASAYRRDLLHFSAYCENHGFSPEKATPVQVRGFIADLSAEGAASVSVNRSLSSIRGFYRWMLRFGFRQDDPSSPLRNLKTPKTLPVFLWEAEMAHFSTLPEKAGILWPERDKALILAMYSGGLRISEAASISLKNMAHDFLSARIVGKGNKERQVFFSEEAKEALLAYLPARTARVKAERPTDKLFISLKGDPISVPGLRWIISKYSERSGLDKNIHPHSLRHSFATHLVNSGCDVRVVQELLGHASISTTQRYTHVNMEHLKKVYQKAHPHGGEKSEG

SEQ ID NO: 60279 - DNA, 1326 bp, Unknown
  Obtained from environmental sample
  misc_feature (1)..(1326): n is a, c, g, or t
atgcagattgcccagcagctttacgaaggaataaaccttcaaagttcccgcatcgggcttattacgtacatgcgtaccgattcggtgcgaatttcaaaaagcgccctggaagaagcccgaaaatggattggcgaaaattttccggctgagttaccggatcaggcgcaggaatactcggtggggaaaaaagcccaggatgcccacgaagcaatacggccgacctatgtcagttatacccctgacagtgtaaaagaatacctgacaaaagatcagcttaagctttacacaattatttgggaaaggtttgtgtccagccagatgaaaaacgccagaacaaaaaccgtaagcattgatatctcggcttcctcaattcgaaccgattcggtaggcgataccggcggcgtgttccgcatagcgggcacaaaaataatcgaaaaaggtttttaccgggtaatgaaacttttggcctccagggatgaaaagggggttacctatccgtccttaaagaaaggcgacaaggtaaaagttgaccagttcaggccggaacagcactttacgcaggggccggcccgttttaccgatgcgtccattgttaagactctggaagaaaaaggcatcggcagaccttcaacatacgtgccgataatttccggtcttttggatcgctattatgttgtcagatcgaacaaacagcttgtccctactgttttgggccggatgataagcgatctgctgtggaaaatttttccgcaagtgtgggacgcgggctttaccgcttcaatggaaaccatgctggatgaggtcgaggacagtcaaaggtcatggccggaaatgatacgggaattttgggatccttttaaataccgggtggatgaggttgtcaaaacgctggaatcctttaaggggactctggatgaggaaaccgattacgtttgtgaaaaatgcggccgcaagctcgtaaaaaaacttgggcgtttcggctttttcctggcctgccccggtttccccgaatgtaagaacacaaaatcaataccactggcaaaatgcccgaaatgctcaggcgatatagtttcccggaaaacaaagggccggggcaaggagttttacggatgcaccaggtaccctgaatgtgattttatcagccattttaagcccatcaatcagaactgtccaaaatgcgggcagtttctggtagaaaaatacgacaaaaaaaacgggagccacaaggcatgcataaacccggaatgtgattttcttcattccaaagatgatgaaaaagacggcgaacaggaaaaatcaaggaatgaaaacaatggcgaacagtaa

SEQ ID NO: 60280 - protein, 441 aa, Unknown
  Obtained from environmental sample
  DOMAIN (1)...(268): DNA topoisomerase
  misc_feature (1)..(441): Xaa is any amino acid
MQIAQQLYEGINLQSSRIGLITYMRTDSVRISKSALEEARKWIGENFPAELPDQAQEYSVGKKAQDAHEAIRPTYVSYTPDSVKEYLTKDQLKLYTIIWERFVSSQMKNARTKTVSIDISASSIRTDSVGDTGGVFRIAGTKIIEKGFYRVMKLLASRDEKGVTYPSLKKGDKVKVDQFRPEQHFTQGPARFTDASIVKTLEEKGIGRPSTYVPIISGLLDRYYVVRSNKQLVPTVLGRMISDLLWKIFPQVWDAGFTASMETMLDEVEDSQRSWPEMIREFWDPFKYRVDEVVKTLESFKGTLDEETDYVCEKCGRKLVKKLGRFGFFLACPGFPECKNTKSIPLAKCPKCSGDIVSRKTKGRGKEFYGCTRYPECDFISHFKPINQNCPKCGQFLVEKYDKKNGSHKACINPECDFLHSKDDEKDGEQEKSRNENNGEQ

SEQ ID NO: 60281 - DNA, 372 bp, Unknown
  Obtained from environmental sample
  misc_feature (1)..(372): n is a, c, g, or t
atggaatatgtctatcccgcaatttttcatcggaatgcggacgaaagctatacaattacatatcccgacttgcccggatgtattagcgaaggtaaaaccctcgggaatgccatgtatatggcgcagtctgctttaacccaatggatcggttatctgtcggacaaaaagcaagagatacccaacgcctcaccagcaaaaaaaataaaaacgtctaatgacgactttgtaaatctcatttgtgccgaggtaagggatgccaaagcggtcaaacggacggttagtattcctaaatggatggacgataaggtaatccagtccggtttgagcctgtccagagtattacaagatgcgttgggagagaggctggcgtaa

SEQ ID NO: 60282 - protein, 123 aa, Unknown
  Obtained from environmental sample
  DOMAIN (4)...(51): Uncharacterised protein family (UPF0150)
  misc_feature (1)..(123): Xaa is any amino acid
MEYVYPAIFHRNADESYTITYPDLPGCISEGKTLGNAMYMAQSALTQWIGYLSDKKQEIPNASPAKKIKTSNDDFVNLICAEVRDAKAVKRTVSIPKWMDDKVIQSGLSLSRVLQDALGERLA

SEQ ID NO: 60283 - DNA, 321 bp, Unknown
  Obtained from environmental sample
  misc_feature (1)..(321): n is a, c, g, or t
atgagcagtgttgctataactaccggcagttttcaatccgaagttttggactctcaggttccggttcttcttgatttttgggcgccctggtgcggtccttgtaaaatgatcgcgcctgtattggatcagttggcggaagaatacaaaggacgccttaaagtcggcaaagtaaatgttgatgaggaaggcgcccttgccgaaatgcacggtgtttcttcaattccctcgttgtttgtttatcaaaacggagcgatggcgggccagagaaccggcgccgcccataaacacgaaatcgaagccctgtttaaggatttcatttaa

SEQ ID NO: 60284 - protein, 106 aa, Unknown
  Obtained from environmental sample
  DOMAIN (3)...(105): Thioredoxin
  misc_feature (1)..(106): Xaa is any amino acid
MSSVAITTGSFQSEVLDSQVPVLLDFWAPWCGPCKMIAPVLDQLAEEYKGRLKVGKVNVDEEGALAEMHGVSSIPSLFVYQNGAMAGQRTGAAHKHEIEALFKDFI

SEQ ID NO: 60285 - DNA, 1443 bp, Unknown
  Obtained from environmental sample
  misc_feature (1)..(1443): n is a, c, g, or t
atggaagctcgcgatatttttaaaaatatctccccaattgaccaccggtactctgtttcagaagcgtcagtttacgactcccttgttccttggatttccgaagaagcgttaatttcctcgtgtataaaggcggaaattgcccttatttttgcgcaccttaaagtccgcggagagcttactcccgctgtcagggcggaactggaaaaatgtacggcaagccctgcggaagtttacgcggaggaagaaaagacccgccacaatataagggcgctggttaatgttttaaaaaccaaagtaccggcaaaaatagccccgttaattcatctgggagctacaagcgttgacattcttgatacaagcctttcatggcgaattgccggcgttacccgcgaggcggttcttccgctccttaaaaaactggaactgttgctctgctcttttgcagaaaaggaggcggacacgccgcaggtcgggcgcacacacggacagcacgccgttccaatcacgcttggatttgcttttgcagaatatgtttcacggcttggaaagtcaattttagaaattgaaaaacggtcaaaggaattaaaaggaaaactgtcaggcgctgtgggcgcgtacaacgcgacaagcatgattgtaaaagacccgcaggagcttgagcgcatataccttgaggaacttgggcttgaaccttccgaacattccacccagcttgtcgagcctgaataccttttgcgcctgcttttggaatttaacaccgctttcggcataatcgcaaatcttgcagatgatctgcgaaatttgcagcgcagtgaaatcggcgaagtgtgcgaaggattcggctccgatcaggtcggttcttctacaatgccgcaaaaacgcaatccgtggaattcggagcatgttaaaagtttatggaaggcttttatgccgagggtgaatacttttttcatggatcagatcagcgaacaccagagagaccttacaaattccgcaagccagcgtttcattgcagattacatcgccggtttttgtcttgccgtttcacggatgacaggcataattaaagggcttggcgttgaccgggagcggcttcattcaaacttaaacgatgacggcgggaatttacagggaggaataatggcagaacctgcctacattctgctagcggaaaccggcgtttcagacgctcacgagattatccgaaggattaccctttcagccgaaaaagagaaaacaagttttgccgcagctcttgcaaaagagccgttgttactcgaaaaaataggcggtaaattaaaagaacttggattgattgaaacaacagacagcgcattgtcattctttgaaaatccgcagcgttactgcggtcttgcttccgtaaaagcaaaaacaattgcggaaaaatataaaacattaatgggaggaaataatgttctctga

SEQ ID NO: 60286 - protein, 480 aa, Unknown
  Obtained from environmental sample
  DOMAIN (15)...(310): Lyase
  misc_feature (1)..(480): Xaa is any amino acid
MEARDIFKNISPIDHRYSVSEASVYDSLVPWISEEALISSCIKAEIALIFAHLKVRGELTPAVRAELEKCTASPAEVYAEEEKTRHNIRALVNVLKTKVPAKIAPLIHLGATSVDILDTSLSWRIAGVTREAVLPLLKKLELLLCSFAEKEADTPQVGRTHGQHAVPITLGFAFAEYVSRLGKSILEIEKRSKELKGKLSGAVGAYNATSMIVKDPQELERIYLEELGLEPSEHSTQLVEPEYLLRLLLEFNTAFGIIANLADDLRNLQRSEIGEVCEGFGSDQVGSSTMPQKRNPWNSEHVKSLWKAFMPRVNTFFMDQISEHQRDLTNSASQRFIADYIAGFCLAVSRMTGIIKGLGVDRERLHSNLNDDGGNLQGGIMAEPAYILLAETGVSDAHEIIRRITLSAEKEKTSFAAALAKEPLLLEKIGGKLKELGLIETTDSALSFFENPQRYCGLASVKAKTIAEKYKTLMGGNNVL

SEQ ID NO: 60287 - DNA, 1437 bp, Unknown
  Obtained from environmental sample
  misc_feature (1)..(1437): n is a, c, g, or t
atgttctctgaaggtttatcttatgacgatgttcttttgcagcctggttattcggaaatactgccaaaggactgtaatattcaaactgtgttatgcaaaggaattaaccttaacgttccgataatttcagccgctatggacactgtaactgaagaaaaacttgcaattgcaatcgctcttgaaggaggagcgggagttattcaccgtaacctaagccccgaagaacaggcgcggcaggtttcaggcgtaaaacgttttttaaactggattattgaatctcccgtaaccgttccgcataacgctcatatcagcgatgtcagggaattggtaagcaagcacggtatttcaggtcttccggtagtggacagcgaaggaaaactaaaaggaattattacaaaccgcgatctgcgtttttgtgatgatgattctttgtctgtaaccagcgtgatgacacaaaaacttgtaaaaatggaagatgaaccgtctttggataaagtcaggaaaatattttttgaaaaccggattgaaaaacttccggttgtaaacaaagagggtaaacttactgggcttatcaccgtaactgacatggaaaaacataaaaatttccccaatgcgtcaacggacaaatcaggacgactcatcgtaggagccgcaatatcacctaatgactatcccgaacgccttcccctgttaatcaaagccaaagttgattttgttgttttggatacagctcacggcgattcanaaaatgtaatggacgccgtacgtaaaatcaagaaagattataatattcccgtaatcggcggtaatgtcgcgtcaagagagggaacccgccgcctgattgacgcaggcgctgacgcggtgaaagtcggcatcggccccggctcaatttgcaccacgcggattgtcgcgggcattggcgtgccgcagtttaccgcggtattggactgcgccgaagaagcggcaaagtcgggtattcccgttattgccgacggcggcataaaattttccggcgatattaccaaagccataggcgccggcgccagtgtagtgatgatcggcaacctttttgccggactcaaagaagcgccgggcagggaaataatttttgacggcagaattttcaaggaataccggggcatgggcagcatgggcgccattgccgatggagcgggcgaccgttaccaaatcggcaaggatgaagaaccggttcccgaaggcatagaaggccgcgttccctacaaaggcgaactgtccacctacatgaaccagcttatttcgggcctccgcaaaggaatgggctactgcggctgtcacaatattgatgagttaaaaaagcaccgcaaatttgtaaaaattaccgccgccggcctgcgggaaagccacgcccacgacatcaccatcacccatgaagcccccaattattcacgggcgtga

SEQ ID NO: 60288 - protein, 478 aa, Unknown
  Obtained from environmental sample
  DOMAIN (88)...(201): CBS domain pair
  misc_feature (1)..(478): Xaa is any amino acid
MFSEGLSYDDVLLQPGYSEILPKDCNIQTVLCKGINLNVPIISAAMDTVTEEKLAIAIALEGGAGVIHRNLSPEEQARQVSGVKRFLNWIIESPVTVPHNAHISDVRELVSKHGISGLPVVDSEGKLKGIITNRDLRFCDDDSLSVTSVMTQKLVKMEDEPSLDKVRKIFFENRIEKLPVVNKEGKLTGLITVTDMEKHKNFPNASTDKSGRLIVGAAISPNDYPERLPLLIKAKVDFVVLDTAHGDSXNVMDAVRKIKKDYNIPVIGGNVASREGTRRLIDAGADAVKVGIGPGSICTTRIVAGIGVPQFTAVLDCAEEAAKSGIPVIADGGIKFSGDITKAIGAGASVVMIGNLFAGLKEAPGREIIFDGRIFKEYRGMGSMGAIADGAGDRYQIGKDEEPVPEGIEGRVPYKGELSTYMNQLISGLRKGMGYCGCHNIDELKKHRKFVKITAAGLRESHAHDITITHEAPNYSRA

SEQ ID NO: 60289 - DNA, 339 bp, Unknown
  Obtained from environmental sample
  misc_feature (1)..(339): n is a, c, g, or t
atgagtcgtcctgatttgtccgttgacgcattggggaaatttttatgtttttccatgtcagttacggtgataagcccagtaagtttaccctctttgtttacaaccggaagtttttcaatccggttttcaaaaaatattttcctgactttatccaaagacggttcatcttccatttttacaagtttttgtgtcatcacgctggttacagacaaagaatcatcatcacaaaaacgcagatcgcggtttgtaataattccttttagttttccttcgctgtccactaccggaagacctgaaataccgtgcttgcttaccaattccctgacatcgctgatatga

SEQ ID NO: 60290 - protein, 112 aa, Unknown
  Obtained from environmental sample
  misc_feature (1)..(112): Xaa is any amino acid
MSRPDLSVDALGKFLCFSMSVTVISPVSLPSLFTTGSFSIRFSKNIFLTLSKDGSSSIFTSFCVITLVTDKESSSQKRRSRFVIIPFSFPSLSTTGRPEIPCLLTNSLTSLI

SEQ ID NO: 60291 - DNA, 378 bp, Unknown
  Obtained from environmental sample
  misc_feature (1)..(378): n is a, c, g, or t
atggcgcccatgctgcccatgccccggtattccttgaaaattctgccgtcaaaaattatttccctgcccggcgcttctttgagtccggcaaaaaggttgccgatcatcactacactggcgccggcgcctatggctttggtaatatcgccggaaaattttatgccgccgtcggcaataacgggaatacccgactttgccgcttcttcggcgcagtccaataccgcggtaaactgcggcacgccaatgcccgcgacaatccgcgtggtgcaaattgagccggggccgatgccgactttcaccgcgtcagcgcctgcgtcaatcaggcggcgggttccctctcttgacgcgacattaccgccgattacgggaatattataa

SEQ ID NO: 60292 - protein, 125 aa, Unknown
  Obtained from environmental sample
  misc_feature (1)..(125): Xaa is any amino acid
MAPMLPMPRYSLKILPSKIISLPGASLSPAKRLPIITTLAPAPMALVISPENFMPPSAITGIPDFAASSAQSNTAVNCGTPMPATIRVVQIEPGPMPTFTASAPASIRRRVPSLDATLPPITGIL

SEQ ID NO: 60293 - DNA, 1359 bp, Unknown
  Obtained from environmental sample
  misc_feature (1)..(1359): n is a, c, g, or t
gtgtcgggctctgagagtgaaatttccggcttgcggggccgcggcggcgcaggtttccccacctggatgaagtgggacctggcgcgtaaagcccagggagcgcccaaatacgttatctgcaacgccgacgagggagaccccggagcctacatggacaggtcgactatcgaaggagacccccactcggttatagaaggcatgataactgccggcaaagccataggcgctaatcacgggattgtgtatatacgcgccgaatacccgcttgctgtggaacggctaaagatagcgatggcccaggcggaagaatacggccttttgggcaagaacattctcggttcaggctttgactttgacattgaaatccgcctgggcgcgggcgcctttgtgtgcggcgaagaaacagccctgattaagtctgtcgaagggagccggggtatgcctgttcccaaaccgcccttcccggcaaacaaggggctttggcaactgccgacaataatcaacaacgttgagacattggcgaatattccggttattaccgccaggggcggggcctggctcgcgaaaatcggcacggaaaaatccaagggcactaaggttttcgcccttacaggcaaggtaaagaattccgggcttgtggaagttccgatgggaaccaccctgcgggaaatcatctttgagattggcggcggcattaagggcggcaagaagttcaagggcgttcagaccggcgggccttccggcggtatcctcaccgaaaaagccctggatctgccgattgactttgacaccctgtcggccaacggttccatgatgggttcaggcggcatgatcgtcatggacgaggacgactgcgtcgttgacgtcgcgcgtttctacatggacttctgtgttgacgaaagctgcggtaaatgttctccctgccgcatcggcacgacccagatactcaaactactggaaaaaatcaccaacggaaacggtgaggaagcggatcttgacaagcttgaagagatcggcgtcgccatgaccaaggcaagcctctgtatgcttggcggcagcgcggcgaacccgaccctgtccacgttgaggaatttccgcgacgagtaccttgagcatatccatgacaagaaatgccgcgccggcaagtgcaaaaaactgctgcgcttcagcattgacgcggaaaaatgcatcggctgcgggatgtgcgcgaagaaatgccccgcaaactgcatcacggcgctggatccggcgaaatatccgaacaagaaaaagcctccttacgccatcgatcagggcgcctgtatcaaatgcggcgaatgtctgaagaactgcaaatttagcgcggtcttgcgtggttaa

SEQ ID NO: 60294 - protein, 452 aa, Unknown
  Obtained from environmental sample
  DOMAIN (427)...(450): 4Fe-4S binding domain
  misc_feature (1)..(452): Xaa is any amino acid
MSGSESEISGLRGRGGAGFPTWMKWDLARKAQGAPKYVICNADEGDPGAYMDRSTIEGDPHSVIEGMITAGKAIGANHGIVYIRAEYPLAVERLKIAMAQAEEYGLLGKNILGSGFDFDIEIRLGAGAFVCGEETALIKSVEGSRGMPVPKPPFPANKGLWQLPTIINNVETLANIPVITARGGAWLAKIGTEKSKGTKVFALTGKVKNSGLVEVPMGTTLREIIFEIGGGIKGGKKFKGVQTGGPSGGILTEKALDLPIDFDTLSANGSMMGSGGMIVMDEDDCVVDVARFYMDFCVDESCGKCSPCRIGTTQILKLLEKITNGNGEEADLDKLEEIGVAMTKASLCMLGGSAANPTLSTLRNFRDEYLEHIHDKKCRAGKCKKLLRFSIDAEKCIGCGMCAKKCPANCITALDPAKYPNKKKPPYAIDQGACIKCGECLKNCKFSAVLRG

SEQ ID NO: 60295 - DNA, 1776 bp, Unknown
  Obtained from environmental sample
  misc_feature (1)..(1776): n is a, c, g, or t
atgataaacttgaaaataaacggcgttccgatccaggtcgaagaaggaaccacgattctcgaagctgccaagaaggcgaatattatcattccttcgctttgctacaatcccgatcttccggcgtgggcttcctgcggcatctgcatagtccgcgtgggcggcagccccaagctgatccgcgcctgcacgaccccggttgacgggagtctggaaggcaaggatattatcacccatgacggagagatcatcgccacgcggcgcgttgtgctggaattgatcctttccaaccaccccaacgactgtctgcaatgcccccgtaacaataactgcgaactacagacgcttgccgcggaattcggcatacgcgaatctccttataaaaaggtaacggaggggatacccattgacgattccaacccggcgattatccttaaccccgagaaatgcatacgctgcggcaggtgcgtcaaggtctgccaggacgtacagaacgtctgggcgcttgaatttctgggaagaggtattaagggaaagatcgccagcgccgccgacgttccgttaggcgatggtccgtgcatcaagtgcggtcagtgttccgcccattgtcctgtcggtgcgatttacgagcgcgatgacacggcaaaagtctgggctgccctgcataaccaggatcttcatacggtggtgcagatcgccccggcgattcgcgtcgcccttgctgaggaattcgggcttgatccgggcacgattgtcactaaaaaaatctacgccgcgctcaggcggctcggcttcaagaccgtgtttgacacaaacttttccgccgatcttacgatcatggaagagggcagtgaactcaaaaagcgcctgaccgcaaaagacagcaccatcccgctgatcacgtcctgctgcccggcctgggtcgattatatggaaaaatatttcgcggatatgattcccaacttctcaaccgccaaaagcccccagcaaatgatgggcgcaatgatcaaggcttactgggcggaaaaagccgctgtagaccctgagaaaatcttttctgtctcggtaatgccctgtacagccaaaaagtgggagacccaccggaatgatgacatgaagagcgcgggtcacggttgggatgtggacatttccataaccaccagagagctggcccggatgatcaagcaggctggtattgagatcctaaaactaaaagacgaggaagcggacagtccgctggggccgtataccggcgccggaaccatttttggtacgacaggcggggttatggaagccgctgtaagaagcgcgtacttcttggtaacgaaaaaagagctgggcaatgttaactttaagcctgtccgcggccttgaaggggtaaaagaagccgaggttgattttggggtagagctcccgaacggccttggaaaaaagatacgcatagcggttgcccatcagatggggaacatcgaagccgtgctcgaaaaaatccgtgccgccaaggacgccggaaaagagaccccctaccattttgtggaagtgatggcctgtaggggcgggtgtatcgccggcggcggccagccctatggctgtaccgacgagatccgcaagcagagggctgccgggctttacaaagatgacgaanagtcccagttccgctgttctcaccagaacccattaatcgaccaggtatataaggaattcctgggcgagcccaacggccataaagcccaccagttgcttcacacaagtacgaaaactgcctttgtacataaatag

SEQ ID NO: 60296 - protein, 591 aa, Unknown
  Obtained from environmental sample
  DOMAIN (142)...(165): 4Fe-4S binding domain
  misc_feature (1)..(591): Xaa is any amino acid
MINLKINGVPIQVEEGTTILEAAKKANIIIPSLCYNPDLPAWASCGICIVRVGGSPKLIRACTTPVDGSLEGKDIITHDGEIIATRRVVLELILSNHPNDCLQCPRNNNCELQTLAAEFGIRESPYKKVTEGIPIDDSNPAIILNPEKCIRCGRCVKVCQDVQNVWALEFLGRGIKGKIASAADVPLGDGPCIKCGQCSAHCPVGAIYERDDTAKVWAALHNQDLHTVVQIAPAIRVALAEEFGLDPGTIVTKKIYAALRRLGFKTVFDTNFSADLTIMEEGSELKKRLTAKDSTIPLITSCCPAWVDYMEKYFADMIPNFSTAKSPQQMMGAMIKAYWAEKAAVDPEKIFSVSVMPCTAKKWETHRNDDMKSAGHGWDVDISITTRELARMIKQAGIEILKLKDEEADSPLGPYTGAGTIFGTTGGVMEAAVRSAYFLVTKKELGNVNFKPVRGLEGVKEAEVDFGVELPNGLGKKIRIAVAHQMGNIEAVLEKIRAAKDAGKETPYHFVEVMACRGGCIAGGGQPYGCTDEIRKQRAAGLYKDDEXSQFRCSHQNPLIDQVYKEFLGEPNGHKAHQLLHTSTKTAFVHK

SEQ ID NO: 60297 - DNA, 546 bp, Unknown
  Obtained from environmental sample
  misc_feature (1)..(546): n is a, c, g, or t
ttgactttaatctttacagtaaaggaactattaccaacaatgtcaacaacacaatccgaaaccccgctagtaggcataataatgggctcctcgtccgactgggagacaatgcgaaatacgtctgatatattgaccgagctctccatcccccacgagtccgaggtagtctcggcgcatcgcacccccgacaagctattcagctacgctgagtcggcgtcggggcgcgggatagaggtgatagtggccggggccggcggagccgcgcacctgcccggaatgaccgccgccaaaacgtcgttgccggttatcggcgttccggttcagtcaaaagccttgagcggtatggattccctcctgtcaatcgtgcaaatgcccgccggaataccggttgcggcgatgtccataggccgcgccggagcggtaaacgccggattaatggcggcggctatattgggaaataagtatccgaagataaaagaggcgttggacgggtacagaaagaggcagacggagaaggtgctggataatcctgatccaaaagggtga

SEQ ID NO: 60298 - protein, 181 aa, Unknown
  Obtained from environmental sample
  DOMAIN (22)...(180): AIR carboxylase
  misc_feature (1)..(181): Xaa is any amino acid
MTLIFTVKELLPTMSTTQSETPLVGIIMGSSSDWETMRNTSDILTELSIPHESEVVSAHRTPDKLFSYAESASGRGIEVIVAGAGGAAHLPGMTAAKTSLPVIGVPVQSKALSGMDSLLSIVQMPAGIPVAAMSIGRAGAVNAGLMAAAILGNKYPKIKEALDGYRKRQTEKVLDNPDPKG

SEQ ID NO: 60299 - DNA, 1197 bp, Unknown
  Obtained from environmental sample
  misc_feature (1)..(1197): n is a, c, g, or t
atgttgtacacacagggaaaaacggattgtaagccaggtgaagttggctataatgaacaacggcttgacgtgttgaaccgccaccttcagcgcgtcattgatgacggcgagatacaatgtgccacttattgcgtttcacgcaagggcaaagttttcgcgcacggcgcgatagggaaaaaatcgttccgtaaggatgacaataccccggttcagccggattccgtgcggtacatagcgtcaattaccaaaacattcacagccgtggcaataatgaaacttgtcgaagacggctttacgcggctggaccagccggtgggtgaaatactgcctcaattcaacactccgccgtataacggcgttacgctgtttcagcttttaacccatacttccggaatgcactcggatgacgggtgttttgaaaacaaataccagtcaagttactggaaaatgattgacgacgcgtacaaactttgcgatcctgacaagaaaaaagaatttgactggataagcgccgctttaggcactataggcagcggtttccgtgttaaacccgataccgaatgggcatattgcagttttggttttgtcgttcttggcgcggttatcgaaaaattatcaggtatatccgctcaaaaatttatcgaagacaatatctgtaaaccgctgggcatgaaggacaccacttttaacataacggcggaaatggcaaaacgatatatcgtttcagatgaggaacttgaaaaatatgtaaatgatacaataaacggaacttacaagcctcaatggatcggagaaatattgaatattccgccaaccgggggcggtctgaattcgacagtttatgatttaagccgctttggtaacatggcgctttcaggcggtacgttaaacggcacgcgtattctgggcagaaaagcagtggaaaaaatgacaaccattgccagcgcccttccaaattacacttggaacgcaaaagaaaaagagcggtactatggagtaggttttgatatgcgaaacggtccagccttcacattttctgccggcactttcatgcatgaaggctcgggcgcgtgttccttgtacattgatccaaaagaggaacttgtcgcggcatggattgtaccgtttgcaaaagaaggctggttctcaagggcgctctttaacgtacaaaatattatttggtcgggtttgatataa

SEQ ID NO: 60300 - protein, 398 aa, Unknown
  Obtained from environmental sample
  DOMAIN (25)...(389): Beta-lactamase
  misc_feature (1)..(398): Xaa is any amino acid
MLYTQGKTDCKPGEVGYNEQRLDVLNRHLQRVIDDGEIQCATYCVSRKGKVFAHGAIGKKSFRKDDNTPVQPDSVRYIASITKTFTAVAIMKLVEDGFTRLDQPVGEILPQFNTPPYNGVTLFQLLTHTSGMHSDDGCFENKYQSSYWKMIDDAYKLCDPDKKKEFDWISAALGTIGSGFRVKPDTEWAYCSFGFVVLGAVIEKLSGISAQKFIEDNICKPLGMKDTTFNITAEMAKRYIVSDEELEKYVNDTINGTYKPQWIGEILNIPPTGGGLNSTVYDLSRFGNMALSGGTLNGTRILGRKAVEKMTTIASALPNYTWNAKEKERYYGVGFDMRNGPAFTFSAGTFMHEGSGACSLYIDPKEELVAAWIVPFAKEGWFSRALFNVQNIIWSGLI

SEQ ID NO: 60301 - DNA, 933 bp, Unknown
  Obtained from environmental sample
  misc_feature (1)..(933): n is a, c, g, or t
ttggttcttccggcgtctattattatttggtttttacttggttcttataatattgttccgtttgactggctgtatcaggtacgatatgaaagccttgcgggagcggttattatcgggcttgtgttttcttttattattgtgtgtaaaaacccttctacaggaaaaatatttattgccgatttatggttcgggcggctgaaaaatccgcaggtaaaaaatggttttattgacgcaaaaatgtggctttacctaatcggggctgtcatgcttcaattacatgtcctttcctttgccgcttttcattggcagacttatcagaatttttttaatcccggctttttacttggctgcgcgatgttaacatggtttgtctgggaataccttacattcgagagagtgcatttgtatacttacgattttatcgcggaacggacaggttttaaattgtgctttggctgtctttcgttttatccgtacttctatgccgtttcactctggtttaccgcaaacctgcccaacccgaatcatccgacctggctcttaataatttttggcgttatcttttttctgggatggacaactgcccgcggcgccaatatgcagaagttttattttaagatttctccggaaaagaaatttcttttcattaaaccagaaaccattagtaacggaaaacacagtatccttgtaaacggttattggggcgcaagccgccatatcaactaccttggagaaatattgatggcttgtggcattgccctcagttccggctatcctttggtttggatggtgtggctgtacccgctttactatataggtcttttgttctcgcgccaggccgacgacgataaaatctgcaaggcaaaatacggagagctttgggatgcctataaaaagaaagtgaaataccggattatcccgtttttatactga

SEQ ID NO: 60302 - protein, 310 aa, Unknown
  Obtained from environmental sample
  DOMAIN (3)...(310): Ergosterol biosynthesis ERG4/ERG24 family
  misc_feature (1)..(310): Xaa is any amino acid
MVLPASIIIWFLLGSYNIVPFDWLYQVRYESLAGAVIIGLVFSFIIVCKNPSTGKIFIADLWFGRLKNPQVKNGFIDAKMWLYLIGAVMLQLHVLSFAAFHWQTYQNFFNPGFLLGCAMLTWFVWEYLTFERVHLYTYDFIAERTGFKLCFGCLSFYPYFYAVSLWFTANLPNPNHPTWLLIIFGVIFFLGWTTARGANMQKFYFKISPEKKFLFIKPETISNGKHSILVNGYWGASRHINYLGEILMACGIALSSGYPLVWMVWLYPLYYIGLLFSRQADDDKICKAKYGELWDAYKKKVKYRIIPFLY

SEQ ID NO: 60303 - DNA, 1026 bp, Unknown
  Obtained from environmental sample
  misc_feature (1)..(1026): n is a, c, g, or t
ttgtataacacaagaatgcgcgaaatggacaactcactggaagatttgcgcaggcacagcagggaaacagccgcagaaaatgacgagcgcatttccgtgttccgccaaaaccttgaagatatccgcaaggaacttggcgttcagaaaaaaatctttgatcaaaccggtacactcaggcaggaaatggaacgcggcatagaggaaattaacggaaatctggatcgccttgatcaaagaaaaaatgaaattactcagcttgaaaacaagtttacgcatatcaagaggcttgaagaagaaattcagagcaagatgaacagtttcctttcggaaagacatcgaatggaagttatggaaaagaatttcgagcgaatcataaaaacttcgcaatcggtagaagaaaagcttgcgcatataactacatcggacgacattctccaagcggtacaggtaaaaatacgagaactggaagacgctcttaaggaaaccgaagaaaaataccagcgaattgaacgcaagaatgcagtgcttgaaaaaaccaatgaaggcatcgatcacaattttcaggcgctgcaaaaaacagagaatgcgatcaaaaatgcgcaggcattcatcacagaaattgccgctcaactggaagagcttaaagcatccattgaaactttatctgcagagaacataaaagctaatgacactgtagaaaaagtcgcttctctggacgaatccctagacaaaatcgaaaaacgtattgccgacatgaatgttgcccgtgaatggcttgctcgcatagaaacagaactaaaagcgctggacaaggatgcaagaactcatcttaagcttgccaaaggattgttcgaacgtgaaagcggcaagactgttcccgcaagcaagggcgctccgccgccgcaggatcgcgacaatgttttaaggcttaaagaacagggttggactgtcgaagaaatagcaaatgcaatgaatatgggcaggggcgaagtcgaattgattctggaaattggctcaagaggctga

SEQ ID NO: 60304 - protein, 341 aa, Unknown
  Obtained from environmental sample
  misc_feature (1)..(341): Xaa is any amino acid
MYNTRMREMDNSLEDLRRHSRETAAENDERISVFRQNLEDIRKELGVQKKIFDQTGTLRQEMERGIEEINGNLDRLDQRKNEITQLENKFTHIKRLEEEIQSKMNSFLSERHRMEVMEKNFERIIKTSQSVEEKLAHITTSDDILQAVQVKIRELEDALKETEEKYQRIERKNAVLEKTNEGIDHNFQALQKTENAIKNAQAFITEIAAQLEELKASIETLSAENIKANDTVEKVASLDESLDKIEKRIADMNVAREWLARIETELKALDKDARTHLKLAKGLFERESGKTVPASKGAPPPQDRDNVLRLKEQGWTVEEIANAMNMGRGEVELILEIGSRG

SEQ ID NO: 60305 - DNA, 789 bp, Unknown
  Obtained from environmental sample
  misc_feature (1)..(789): n is a, c, g, or t
ttggctcaagaggctgatacttctttgaatcgcagcgtatggaacaagtttgtaaaagcaaaagaacacttccgttatgtgacagaggagacagagcgatctgtcccgcatctaaaaaagatacagcaaaaacttgccgtcagccgtaccggtaaaaattcatcttatactgttgaaactcccgtagtatacaacagcgcacttgacgatataactgcgggtgatgaaattaagttaatccttgtcgcggataaccccggccgccgcgaacaggctgcggaaaaaagacggtatcttgtangaccgtcaggnaaaatagcgcanaaatttttccgtgataatccgcagcttggaattgattttacgaaaaatgtaattattctaaataaaactccgaatcattcgccgcgtaccgctgaactgcgccggctttgcttgcctgaaaccggctcaaactcaatcgctgcggttattagagaatcgcagataaaaatggcgcagcttcttctggaattccacgaagctctttgcgttccggtttatataatccgatactcggagatgaaaaaaggcgggatttttgaaacatacacggaaacactaaaaaaaatatacacagataaaaaatatttatatgatcaaatttttctgttccgccatttttcaatgaaccaatttacaattgatttgaaaaagcagtccttaaaaggagagactgtcaataaaagccttgcgcgaatcggtacatcatacagaaatagaattattaacctgacagatagtccgtaa

SEQ ID NO: 60306 - protein, 262 aa, Unknown
  Obtained from environmental sample
  misc_feature (1)..(262): Xaa is any amino acid
MAQEADTSLNRSVWNKFVKAKEHFRYVTEETERSVPHLKKIQQKLAVSRTGKNSSYTVETPVVYNSALDDITAGDEIKLILVADNPGRREQAAEKRRYLVXPSGKIAXKFFRDNPQLGIDFTKNVIILNKTPNHSPRTAELRRLCLPETGSNSIAAVIRESQIKMAQLLLEFHEALCVPVYIIRYSEMKKGGIFETYTETLKKIYTDKKYLYDQIFLFRHFSMNQFTIDLKKQSLKGETVNKSLARIGTSYRNRIINLTDSP

SEQ ID NO: 60307 - DNA, 1080 bp, Unknown
  Obtained from environmental sample
  misc_feature (1)..(1080): n is a, c, g, or t
atgaagtttaaaataaaactgagcataattatgattgccattgtggcagtcatagtgggcggaatagcggtaattgaactggtgcgggcttccgatatcagcctgagattaagcctccgtggacttaattattttgccagagagcaagcccagtactggcaaggaagggaagaaagctatataaagcagttaaccgcaattgcggatataatgggcgaatttgaaatgctgcccgcacaggacaggagggatctgtatgacaatatgctgaaggctaccctgaataacaatgacaacttcgtccgcatattttccatctggaaaccgaacgccatggacggcatggacagccgatatataggccgttcgggatcaagtccaacagggcagtacgcaatgacctggggcagggataccggcccgattgaagtaaagcccaacctcgttcttaatgagattaacgcatggatgaacggccccaacgcgctcaagacccgggttgagaaccccacgccttttaagaataacggaaaagacacctttattatcagaataggagttcccataaccagaagcaccggcagcgaagtagtcggacacttaggtgttcttatagacatcgcaccaatgcagtccgtggtggaaaaaaccattaaaagttacgaagaaatatcggcattggctctttattccggtaacggaatgataatgggacatttggttcctgaacgtgtaggaaagatgctctctgatgtggatatgatatacggcaattatataaaggaagcagataaagccgtgcagggagggatggaatttcaatgcagcggctattcacccatcctgaaagcagatatgaaaataaccatgattcccttccagataggcgattctgacatgtactggacagtaatgatagctacatcagaaacgtacattatgaaagaagttaacgcgattacaagatttactattatccttgttgcaatctctattatagcggcttcggtaattgtgtactttatcttcgatttcacaactaagccaatcgtcaatgtgacatttcagaaggcgacctga

SEQ ID NO: 60308 - protein, 359 aa, Unknown
  Obtained from environmental sample
  SIGNAL (1)...(23)
  misc_feature (1)..(359): Xaa is any amino acid
MKFKIKLSIIMIAIVAVIVGGIAVIELVRASDISLRLSLRGLNYFAREQAQYWQGREESYIKQLTAIADIMGEFEMLPAQDRRDLYDNMLKATLNNNDNFVRIFSIWKPNAMDGMDSRYIGRSGSSPTGQYAMTWGRDTGPIEVKPNLVLNEINAWMNGPNALKTRVENPTPFKNNGKDTFIIRIGVPITRSTGSEVVGHLGVLIDIAPMQSVVEKTIKSYEEISALALYSGNGMIMGHLVPERVGKMLSDVDMIYGNYIKEADKAVQGGMEFQCSGYSPILKADMKITMIPFQIGDSDMYWTVMIATSETYIMKEVNAITRFTIILVAISIIAASVIVYFIFDFTTKPIVNVTFQKAT

SEQ ID NO: 60309 - DNA, 894 bp, Unknown
  Obtained from environmental sample
  misc_feature (1)..(894): n is a, c, g, or t
atggatgcttccgtaacgatttcaaggaggatctttatgatcatcaatcacaaccttagcgcaatgtttgcggacaggtcactcggtgtaactcaggtttacctgacaaaaaacatggaaaaactgtcttcgggacttcgtatcaaccgtgccggcgatgacgcgtcgggactggcggtttccgagaaattacggagccagattcgtggtcttaatcaggcatcaacaaatgcccaaaacggcatttcgttcattcagacttcagaagggtatttgcaggaatcccaggacattcttcaacgtcttagggaattgtcagttcaggcggcaaacggtatctattccgacgaggacagaatgtacatccaggtcgaagtttcacagctcgttgacgaattggacagaattgcaagccatgcccaatttaacggcatgaacatgcttacaggacgctttgcccgcataaccggagacaatatagctacagcctccatgtggttccatatcggcgccaacatggaccagagggaacaggtctttatcggtacaatgaccagtaaaggtctcggagtccgccaaatggacgaatcctttgtaaccttacagaccccggatgacgccaacaggaccatcggtgtttgcgatgcggctcttaaaatcatcaacaaacaaagagcagaccttggagcctaccaaaaccgtctggaacacgctgtccgcggcttagacgtaggagccgaaaatctgcaggcttctgagtccagaataagggataccaacatggctaacaagatggttgactatgtaagggaccagattctgaatcaagccggcactgcgatgcttgcgcaggctaaccaaagatcaacttcggtcttgtcattacttcaataa

SEQ ID NO: 60310 - protein, 297 aa, Unknown
  Obtained from environmental sample
  DOMAIN (204)...(275): Bacterial flagellin C-terminus
  misc_feature (1)..(297): Xaa is any amino acid
MDASVTISRRIFMIINHNLSAMFADRSLGVTQVYLTKNMEKLSSGLRINRAGDDASGLAVSEKLRSQIRGLNQASTNAQNGISFIQTSEGYLQESQDILQRLRELSVQAANGIYSDEDRMYIQVEVSQLVDELDRIASHAQFNGMNMLTGRFARITGDNIATASMWFHIGANMDQREQVFIGTMTSKGLGVRQMDESFVTLQTPDDANRTIGVCDAALKIINKQRADLGAYQNRLEHAVRGLDVGAENLQASESRIRDTNMANKMVDYVRDQILNQAGTAMLAQANQRSTSVLSLLQ

SEQ ID NO: 60311 - DNA, 819 bp, Unknown
  Obtained from environmental sample
  misc_feature (1)..(819): n is a, c, g, or t
atgaaaccgaagttcgtaatacgccgaataaccattctcttgctgttgacaatagttttggctttgctttctgggtgtaacagacgggagggaaagatgcaggctttatttgacggattgaccctggcggcgccgtacaaggtttatggcgatgttaaccctatttatctccagcgctttggcgccgatccctgggggctggtatataaggatagggtatatgtgtacatgaccggcgacacgttcaggttaacttcgggatcaaaacccgagccggatttttccaacttgcaggcgaacgattactcaaacatcaataccatacgggtggtgtcttcttccgatcttgtaaactggacggagcatcccgaaataaaggcggccggcccacagggggcggcggtacgggcggccaactcatgggccccggccgcggcttacaaaaacataggcgggaaagattattttttcctgtacttcgccgacaacgccagcggcatttatgtgattagcgcggaaagcccccttggcccctttacaaacccccggccggacggcagcgccctcatcaacaggtcaacgcccaattgttctaatgttacctggatgtttgatcccgccgttctggaggacgatggcggaaagttctacatctattttggcggcggggttccgccgggaggcagcgcggcggagtttacgtctaatgacccgcttcccggaaccgagcgcgccgtacagcttgnggacgacatgatcagccttgccggaattccgcagagtttaaatgtcccgtttatttttgagattccggcataa

SEQ ID NO: 60312 - protein, 272 aa, Unknown
  Obtained from environmental sample
  SIGNAL (1)...(28)
  misc_feature (1)..(272): Xaa is any amino acid
MKPKFVIRRITILLLLTIVLALLSGCNRREGKMQALFDGLTLAAPYKVYGDVNPIYLQRFGADPWGLVYKDRVYVYMTGDTFRLTSGSKPEPDFSNLQANDYSNINTIRVVSSSDLVNWTEHPEIKAAGPQGAAVRAANSWAPAAAYKNIGGKDYFFLYFADNASGIYVISAESPLGPFTNPRPDGSALINRSTPNCSNVTWMFDPAVLEDDGGKFYIYFGGGVPPGGSAAEFTSNDPLPGTERAVQLXDDMISLAGIPQSLNVPFIFEIPA

SEQ ID NO: 60313 - DNA, 795 bp, Unknown
  Obtained from environmental sample
  misc_feature (1)..(795): n is a, c, g, or t
ttgcagaggcggcgggaatttcccgcagccgtgacaataggcaaaaacggggctatcacgtatatgacaagcgacaatccgctgggaccctatacattgcaaaaaatgatactgccaaatcccggagaaatgtttaataccaagggcggaaacaaccatcacgcgatatttgaattcaggggaaagtattacatagtgtatcacacacggttactggaaatggcaatgggcgtgcctgaaactcttccgagggaagggtatcgaagcacccacattgacgaagttaccgtactgccggacggaaccattgaagaaattaaaggcagcagaaaaggcgccgcgcagtcgggcaggtttgacccgtatagattgacaagcgcggcgaccataagcaaccaggcgggaataagtaccgtggccgttcctggcgaacagcggatgaaggtgacggacattgattcaggcgactggatcgccctgtacggagtggatttcagcggtgccgtgtacggaacagacttaggcgatgcgggggcgcgaacgtttagctgtcgcgtaacaccgacgaagtcggcaccgacgcccaaaagcggcagcggccatcccgggggcgtaatccagatcaagctggacggcttggacggcaaacccgtcggctatgtcaatgtcgagcccggaaaggcagaaataactgtaaagctattgcagaccgttaccggtgtgcatgatctggtttttgtcttctacggccagggctatgactttgagcagtggcagtttttccccggcacttag

SEQ ID NO: 60314 - protein, 264 aa, Unknown
  Obtained from environmental sample
  DOMAIN (126)...(262): Carbohydrate binding module (family 6)
  misc_feature (1)..(264): Xaa is any amino acid
MQRRREFPAAVTIGKNGAITYMTSDNPLGPYTLQKMILPNPGEMFNTKGGNNHHAIFEFRGKYYIVYHTRLLEMAMGVPETLPREGYRSTHIDEVTVLPDGTIEEIKGSRKGAAQSGRFDPYRLTSAATISNQAGISTVAVPGEQRMKVTDIDSGDWIALYGVDFSGAVYGTDLGDAGARTFSCRVTPTKSAPTPKSGSGHPGGVIQIKLDGLDGKPVGYVNVEPGKAEITVKLLQTVTGVHDLVFVFYGQGYDFEQWQFFPGT

SEQ ID NO: 60315 - DNA, 552 bp, Unknown
  Obtained from environmental sample
  misc_feature (1)..(552): n is a, c, g, or t
atggcggacgcgctggcggttggctgtatgctgatcaccctgttaaaaaacgctgaccgtgtaaaaatcgcgtgccttgcacagttggtaaatgtcatcgcgccaattatgacggaaaaaaacggcggcgcgtggcggcagacgattttttatccgttccgcgacgcgtcattatacggacgtggctctgtgcttcgctgtcctgtcattgttgacaaatatgattcgcgggaattctgcgacgtgccgtatcttgaagccgcaggagttcacaatgccaaaaaaaatgaaatagccatttttgcggtaaaccggaatttgaaggaagcgataaatcttgaagctgaaatcgccggttttggaaaaatgaaccttattgaacaccgcgttatgtgtaataaagacttgaatatgtgtaactcaataaatgaagaaaatgtaaaacctgtcattcaaacaggcggcacgcttgaaggcggcgcggaaggaatgtggttaaaacttattttaccgccggcttcatggaacgtgataagactgaagttgttttaa

SEQ ID NO: 60316 - protein, 183 aa, Unknown
  Obtained from environmental sample
  DOMAIN (1)...(174): Alpha-L-arabinofuranosidase C-terminus
  misc_feature (1)..(183): Xaa is any amino acid
MADALAVGCMLITLLKNADRVKIACLAQLVNVIAPIMTEKNGGAWRQTIFYPFRDASLYGRGSVLRCPVIVDKYDSREFCDVPYLEAAGVHNAKKNEIAIFAVNRNLKEAINLEAEIAGFGKMNLIEHRVMCNKDLNMCNSINEENVKPVIQTGGTLEGGAEGMWLKLILPPASWNVIRLKLF

SEQ ID NO: 60317 - DNA, 678 bp, Unknown
  Obtained from environmental sample
  misc_feature (1)..(678): n is a, c, g, or t
gtgtcttccagtgattatatgcttgcgggcgaggcgatgatcgccctggctaaaatgcgcgatcttgcgttccatccccagattgaaaatatcatccttgagatgcaaaaccccaagttaaaaattatgggcgtggaggctttgggcatatacgccctgcccgattcgcttaatacctttataaaaataattaaaaatacggatccgcctccctatctgctttacgagattttacttgcgatgtcggcaattctgggcacgcaggatcaattttaccgcatactggtacgctttatcgctgatccttcgctggtctctgcgcttgcccttgacgaggcggaatccgccgttgcgtattgcaaatccaatataggttggcggaaaggcggtaagaaaaaacccgaattgcccattctggaaaggcaggcgggcaatcttcaggcggctgtttctgccatggaacaagacagcaaggttttatcggactggatacaggcccttccggccttcgccttttccgatgagccttcatttaagaccgcgcagactcttttttcagaaattcttgtagatgacggaatggcttcccaaaaatgcctgcgtcttttgatagtcccactgggcggcgtctcaaattcggtcatggacgcagatgttaaaataacaagtaacaggtaa

SEQ ID NO: 60318 - protein, 225 aa, Unknown
  Obtained from environmental sample
  misc_feature (1)..(225): Xaa is any amino acid
MSSSDYMLAGEAMIALAKMRDLAFHPQIENIILEMQNPKLKIMGVEALGIYALPDSLNTFIKIIKNTDPPPYLLYEILLAMSAILGTQDQFYRILVRFIADPSLVSALALDEAESAVAYCKSNIGWRKGGKKKPELPILERQAGNLQAAVSAMEQDSKVLSDWIQALPAFAFSDEPSFKTAQTLFSEILVDDGMASQKCLRLLIVPLGGVSNSVMDADVKITSNR

SEQ ID NO: 60319 - DNA, 723 bp, Unknown
  Obtained from environmental sample
  misc_feature (1)..(723): n is a, c, g, or t
gtgggttattatgaaataaacaaaaaatgtgcagtatgccgtttagctgttttctggctgtcggcggttgttttggctttgcctttgggatgtaacagtaaggagggaaagatgcaggctttatttgacggattgactctggcaaagccgcttaaggcttatggcgatgttaaccctatctatctccagcggtttggagccgatccctggggactggtatataaagacagggtatatgtgtacatgacaggcgacacgttcaagctttcttcaggttcaagccctacgccggatttttcaaacttgcaggcaaatgattatttgaacataaataccatacgagtggtgtcttcttccgatttggtaaactggacggaacatcctgaaataaaggcggctggttcacagggggctgcgacaaaggcgacaaattcatgggctccggccgcggcttacaaaaacatagacgggaaagattattttttcctgtactttgccgacaacgccagcggcattttcgtgcttcgcgcggaaagtccgctcggcccctttataaacccgcgacctgacggcagcgctctcatcaacaggtcaacgcctaactgttcaaatgtcacatggatgtttgatcccgccgttctggaggatgacgacggaaagttctatatctattttggcggcggtgttccaccccggaggcaacgcggcccagtttacttctaa

SEQ ID NO: 60320 - protein, 240 aa, Unknown
  Obtained from environmental sample
  SIGNAL (1)...(26)
  misc_feature (1)..(240): Xaa is any amino acid
MGYYEINKKCAVCRLAVFWLSAVVLALPLGCNSKEGKMQALFDGLTLAKPLKAYGDVNPIYLQRFGADPWGLVYKDRVYVYMTGDTFKLSSGSSPTPDFSNLQANDYLNINTIRVVSSSDLVNWTEHPEIKAAGSQGAATKATNSWAPAAAYKNIDGKDYFFLYFADNASGIFVLRAESPLGPFINPRPDGSALINRSTPNCSNVTWMFDPAVLEDDDGKFYIYFGGGVPPRRQRGPVYF

SEQ ID NO: 60321 - DNA, 660 bp, Unknown
  Obtained from environmental sample
  misc_feature (1)..(660): n is a, c, g, or t
atgtcacatggatgtttgatcccgccgttctggaggatgacgacggaaagttctatatctattttggcggcggtgttccaccccggaggcaacgcggcccagtttacttctaatgatccgcttcccgggaccgagcgcgccgtgcggcttggtgacgacatgatcagtattgccggaataccgcagaatttgaacgtcccgtttatttttgaagattccggcattaataaaatcggcaatacctattactattcgtattgctctaattatcaggtaagaaattatttgcagaggccgcaggaatttcctgccgcattaactataggcaagaacggggcaatcatgtacatgacaagcgacaagccgcttgggccgtatacattacaaaaaatgatactgccaaatcccggtgaaatgtttatcactaagggcggaaacaaccatcacgcgatatttgaattcaggggaaagtattacattttgtatcacacgcggttactggaaatggcaatgggcgtaccagaaactcttccgagggaggggtatagaagcacccacattgacgcagttaacatattgacggacggaaccattgaagaaattaaaggcagtagaaaaggcaacggcacccctcgggccggtttaacccatttgaattga

SEQ ID NO: 60322 - protein, 219 aa, Unknown
  Obtained from environmental sample
  misc_feature (1)..(219): Xaa is any amino acid
MSHGCLIPPFWRMTTESSISILAAVFHPGGNAAQFTSNDPLPGTERAVRLGDDMISIAGIPQNLNVPFIFEDSGINKIGNTYYYSYCSNYQVRNYLQRPQEFPAALTIGKNGAIMYMTSDKPLGPYTLQKMILPNPGEMFITKGGNNHHAIFEFRGKYYILYHTRLLEMAMGVPETLPREGYRSTHIDAVNILTDGTIEEIKGSRKGNGTPRAGLTHLN

SEQ ID NO: 60323 - DNA, 1218 bp, Unknown
  Obtained from environmental sample
  misc_feature (1)..(1218): n is a, c, g, or t
gtgaagcaaaagagttatgagcggcggttcaagaaacgggaacaggacttcacccggaaacggaaaatgacattcaccgagattatctatttcatgctcagcatggtcaaggaaagcacacaaaacgccttggaacgggtgtttccgcaattacaaaaagaaaatctggagatgagccagcaagccttgagcgcggcccggcagaaaataaaatgggaagtgtttgaagaattattccggacaagcgtaacaggctcgtatcaagaagaatggaaactgtggcgcggataccgggtgatggcggcggacgggagctttatacaactgccttctgacgcggcgctattgaaatactacggagggctggggcaggatcggacggctgctgcggcattggtgtcgctactgtacgaccttcagaataatatcattgtagacgcgaagatagcggcggtaagtgaaaacgagcgtgcgttggcaaaagaacatctgtgcgcgttacagaagatggacagttataaccgtgggcaccgggaattaataatttttgacaggggatacccttcccatgagttcattaactccttatcagacaaggaaatagcgtatgtgatgcgggcgcaaaagggttttattcgggaacaggatatagcaggggtgaaagacggctgggtgccgctggggaaaaccgggcggcaagtacgtgtaattcaaataccgcttacaagcggggaacttgaaatactgataacaaatctgggtgaaactgagatggaatacggggcatttggggaactgtattacaagaggtgggggatagagacgaagtacaaagaactaaagcaaaaactggaaacagaaaacttttccggcaggctggtagacaacgtaaagcaggatttttacgcgatgatgacggtggcgaatatggcggccagttgcgtgcgggaggcaaaccggaacgcacagaagaaacgggaggggaacggaaacctctatgagtatcaggtaaatataaatcatgcgataggagtattcaaggatcggttaatacgtgtaattatcgaagaagaccggatagcgcggcgttatctgatgagcgaattggtgcgctgtatggaacggcgggtagtgccgatacgtctaaaccgtgaggtagtccgtaaagactgcaatcgtaaagccaaatttcatcataaccataaatcgaattgttaa

SEQ ID NO: 60324 - protein, 405 aa, Unknown
  Obtained from environmental sample
  DOMAIN (99)...(310): Transposase DDE domain
  misc_feature (1)..(405): Xaa is any amino acid
MKQKSYERRFKKREQDFTRKRKMTFTEIIYFMLSMVKESTQNALERVFPQLQKENLEMSQQALSAARQKIKWEVFEELFRTSVTGSYQEEWKLWRGYRVMAADGSFIQLPSDAALLKYYGGLGQDRTAAAALVSLLYDLQNNIIVDAKIAAVSENERALAKEHLCALQKMDSYNRGHRELIIFDRGYPSHEFINSLSDKEIAYVMRAQKGFIREQDIAGVKDGWVPLGKTGRQVRVIQIPLTSGELEILITNLGETEMEYGAFGELYYKRWGIETKYKELKQKLETENFSGRLVDNVKQDFYAMMTVANMAASCVREANRNAQKKREGNGNLYEYQVNINHAIGVFKDRLIRVIIEEDRIARRYLMSELVRCMERRVVPIRLNREVVRKDCNRKAKFHHNHKSNC

SEQ ID NO: 60325 - DNA, 561 bp, Unknown
  Obtained from environmental sample
  misc_feature (1)..(561): n is a, c, g, or t
gtgtcggaggtgggtatgcccgcacgttcaccgatcccagaaaacaggctgaaggaactcgccgcctacgggcagaccaaatgggtggggcttgagcaccagcgctacctgtgcgtctggctgcgggctgagaaaggcaagacatccgcagagatcgcagacatactaaactgccaccccgtgacggttagggcgatacagcgggacttcatagcgaggggcacggcggtcttccgtgacgaaaacaacggcggcaggcgcaaccagatgatgacggaggcggaggagaaggcgttcctagacggcttcgccgccgcagccgccgcagcctcgatcctggtggtcagcgacataaaggcggcgctggaggagagggtgggccgcaccgtccacaagaccactgtctaccgcctactgaagcgtcacggctggcggaaggtcgccccccgcccgaggcacccgaagaaggacgggggggccggcgaggccttcaaaaagggggcttcgcggaaagggccgccgaagcccgcgggagggcggaggcgaaagggaggcccctga

SEQ ID NO: 60326 - protein, 186 aa, Unknown
  Obtained from environmental sample
  misc_feature (1)..(186): Xaa is any amino acid
MSEVGMPARSPIPENRLKELAAYGQTKWVGLEHQRYLCVWLRAEKGKTSAEIADILNCHPVTVRAIQRDFIARGTAVFRDENNGGRRNQMMTEAEEKAFLDGFAAAAAAASILVVSDIKAALEERVGRTVHKTTVYRLLKRHGWRKVAPRPRHPKKDGGAGEAFKKGASRKGPPKPAGGRRRKGGP

SEQ ID NO: 60327 - DNA, 501 bp, Unknown
  Obtained from environmental sample
  misc_feature (1)..(501): n is a, c, g, or t
atgttccaggacgaggcgaggatcggcaggatcagcgacccgaaggcttgctgggcgcccaggcgggtgcggccagaggcgccctgccagatggtgagggagtacgcctatgtgttcggcgccgtcagcccggcagacggctgccacgacagcctggtgctgccgtgggccgacaccgaggccatgtcgctgttcctcaaggaggtcgcaaagcgccaccggggcgagcacgtcctggtattcatggaccaggccgcgtggcacaggtcgggggcgctgaaggtgccccggaacatggagctggcgtacctgccgccgcactcccccgagctgaacccgcaggagcaggtgtgggacgagctgagggagaagtttttcgggaacatggccttcaagagcatcgatgcggtgatggacaggctggtcgagggcctccggtgcatggaggcgtcccctgacgccctgaagagcctgacccaaagggactggatgaaaaaataa

SEQ ID NO: 60328 - protein, 166 aa, Unknown
  Obtained from environmental sample
  misc_feature (1)..(166): Xaa is any amino acid
MFQDEARIGRISDPKACWAPRRVRPEAPCQMVREYAYVFGAVSPADGCHDSLVLPWADTEAMSLFLKEVAKRHRGEHVLVFMDQAAWHRSGALKVPRNMELAYLPPHSPELNPQEQVWDELREKFFGNMAFKSIDAVMDRLVEGLRCMEASPDALKSLTQRDWMKK

SEQ ID NO: 60329 - DNA, 504 bp, Unknown
  Obtained from environmental sample
  misc_feature (1)..(504): n is a, c, g, or t
gtgtgcaatgtcgatgaagaaggaattcgctccattgccgcaggcggagatggaaacattcatgtgcaagccgtgaaaaaacgcgctcaggcggaaggctctacggcaatctgtatctgcggcaagtttgaggcggagctttcggacataaccaacatagaagaaaagctcgccttccttgaagaactggggcttaaagaacccggactttcttcccttatccgctcggcgtaccaactgcttaacctgcgtactttcttcacggcgggagaagatgaatgccgggcgtggacaattcactcaggcgacagcgctcccaaagcggcgggcgttattcacacggattttgaaaaaggttttataaaagctgaagtatattcatgcgatgatatttttaaatacggaacagaagctaaaataaaagaagccggaaaataccgggttgaaggaagagattatatcgttcaagacggcgatgtaatgttcttcaagtttaacgtataa

SEQ ID NO: 60330 - protein, 167 aa, Unknown
  Obtained from environmental sample
  DOMAIN (83)...(166): Protein of unknown function (DUF933)
  misc_feature (1)..(167): Xaa is any amino acid
MCNVDEEGIRSIAAGGDGNIHVQAVKKRAQAEGSTAICICGKFEAELSDITNIEEKLAFLEELGLKEPGLSSLIRSAYQLLNLRTFFTAGEDECRAWTIHSGDSAPKAAGVIHTDFEKGFIKAEVYSCDDIFKYGTEAKIKEAGKYRVEGRDYIVQDGDVMFFKFNV

SEQ ID NO: 60331 - DNA, 1290 bp, Unknown
  Obtained from environmental sample
  misc_feature (1)..(1290): n is a, c, g, or t
atggacaaactgacaatcctcagggaaaaattcggctactcctcttttcgtccgggacaggaagaagtgatagacgccattcttgaggggacggacgctcttgcggttatgcccacgggagcgggaaaatctctttgctaccaaatacccgcccttttacttgacggcatgaccgtcgttatctcgccgcttatttcactgatgaaagatcaagtcaccgcattgaaagaagcgggatgcggcgcggcttttttaaacagttcgttaagcggcagggaatacatggagactatggacgaaataatgatcggcaatattaaactgctctatatcgctcccgagcgtctgcaaaggactgatatgtctgagtttgcagctaacagtatcccgcttgttgtagttgacgaggcgcattgcgtgtcacagtgggggcatgactttagaatgagttatctgcaaatagcggaatttatcagaagcattaaaccgcgccctgtagttgccgcttttaccgcgaccgcgaccgtcaatgtgagggaagacatccgcaaattgctggctctgcgcaatcccctttgcgtaaataccggttttgacagacccaatctttattttgaagtacggaaaccaaaagacaaaaaaatcgcacttttggaatatcttgataagcgaaaaaaagcaagcggtataatttattgcgctaccagaaaaaccgtggaagaaacttgcgattttttaattaaccgtggttttaacgctacccgttatcacgccggtcttgatgatgaggagcgcagaaaaaatcaagatgattttatttacgacaacaagacagtgatggtagcaacaaacgcttttggaatggggattgataagtcaaacgtatcgtatgtaattcattacaatatgcccaaaaacattgaaagctattatcaggaagccggacgagcagggcgtgacggctctccctcggactgcattcttttgtacaacggtcaggatgtgcggataaaccagtaccttataacccataacgaagatgaagaaactgcgaactttgaattgcagactcacaatctggaattgcttaaacagatgactttttacgccacaggacacgactgccttcgccgccgtttgctcgcttactttggcgaacagatgacagcgaactgcggtaactgttcaaactgcctgacggaatttgaggagaccgatgttactttggaagcgagaaaaattgtttcctgcgtattccgtctgaaacaacgaggcagaagtttcggctag

SEQ ID NO: 60332 - protein, 429 aa, Unknown
  Obtained from environmental sample
  DOMAIN (13)...(176): Type III restriction enzyme, res subunit
  misc_feature (1)..(429): Xaa is any amino acid
MDKLTILREKFGYSSFRPGQEEVIDAILEGTDALAVMPTGAGKSLCYQIPALLLDGMTVVISPLISLMKDQVTALKEAGCGAAFLNSSLSGREYMETMDEIMIGNIKLLYIAPERLQRTDMSEFAANSIPLVVVDEAHCVSQWGHDFRMSYLQIAEFIRSIKPRPVVAAFTATATVNVREDIRKLLALRNPLCVNTGFDRPNLYFEVRKPKDKKIALLEYLDKRKKASGIIYCATRKTVEETCDFLINRGFNATRYHAGLDDEERRKNQDDFIYDNKTVMVATNAFGMGIDKSNVSYVIHYNMPKNIESYYQEAGRAGRDGSPSDCILLYNGQDVRINQYLITHNEDEETANFELQTHNLELLKQMTFYATGHDCLRRRLLAYFGEQMTANCGNCSNCLTEFEETDVTLEARKIVSCVFRLKQRGRSFG

SEQ ID NO: 60333 - DNA, 888 bp, Unknown
  Obtained from environmental sample
  misc_feature (1)..(888): n is a, c, g, or t
atgaatattatccgaaaaagctataaattattgagtgactttaataaagttcatgaatatctgacagatgtttatgatattgaaacgcttaatggttatttacttccacagtattttgaatatgcccatactcatccgtcatttaactataaactggcgcatagatttggtttatgggaatatgaaaatgagcttatcgggattgcgtgttatgatatgtatcccggcgaatgttttataagcgtaaaaaatagctttaattcattattgcctgaaatgataagttattcagaagaatatttatctgaaaaaagcgatggtaaaacatctttatcaatatcaattcttgataaagaaatcgaaaagaaaggattattggaaaaatatggttatacaaaagttcaatctataccggtaactatattctcatatgaaaacccattcccccatcaaattcttcctgaagggttttctgttatatcattggacgatgaanatgatttaaaaaaaataaatgattgcctatggtatggatttgatcacggcccggatccagatcctgacaatgatattgacagccggatattagctcaaagcggaccgaatttccgcaaagacttaactacaataataaaagccccaaatggcgaatacgcgtgttttgccggaatgtggctggacaagcaaaatagctatgcgtatctggaaccattggcgacagtgccaaaataccggcgcatgggattggcaaaagccgcgttgattgaaggaatgaaaaagacgaaagagttgggcgcaaagtattgcttcggcggaacgggagaattttataaaagcataggttttaatgctattgctaaccgtgaattatggaaaaaggaatggtaa

SEQ ID NO: 60334 - protein, 295 aa, Unknown
  Obtained from environmental sample
  DOMAIN (210)...(283): Acetyltransferase (GNAT) family
  misc_feature (1)..(295): Xaa is any amino acid
MNIIRKSYKLLSDFNKVHEYLTDVYDIETLNGYLLPQYFEYAHTHPSFNYKLAHRFGLWEYENELIGIACYDMYPGECFISVKNSFNSLLPEMISYSEEYLSEKSDGKTSLSISILDKEIEKKGLLEKYGYTKVQSIPVTIFSYENPFPHQILPEGFSVISLDDEXDLKKINDCLWYGFDHGPDPDPDNDIDSRILAQSGPNFRKDLTTIIKAPNGEYACFAGMWLDKQNSYAYLEPLATVPKYRRMGLAKAALIEGMKKTKELGAKYCFGGTGEFYKSIGFNAIANRELWKKEW

SEQ ID NO: 60335 - DNA, 1356 bp, Unknown
  Obtained from environmental sample
  misc_feature (1)..(1356): n is a, c, g, or t
atgtttgataaattaacgcaaaaggttaccgacgccctgcgctttgtcgccgggaaatcaaccatcagcgaaaaaaatattgaagatgccgttgacgccatcaagatggcgctgctggaagcggatgtcaatttacgcgtggtcaggcgttttgtcaattccaccattgaagaggcaaagggcgagaaagtgctgcgcgccgtggatccgggccagcagtttgtaaaaattgtccatgacaaacttgtaacatatctgggcggcaacgatcccgaggagcgtaagctgaaactccgggggccggatgttatttccacggtgctaatgctgggcttgcagggctcaggtaaaaccaccagctccgcaaagctggccctgcgcctgaaaaaagaaggccgtaagcccctgctggtcgcctgcgacctgatacgccccgcggcaatggaacagcttgccgttctcggcaggcaaatcggcgtgcctgttcaccgtgaggacggggcgacggacagctccgcagtatacagaaacgcccttgcatgggcaaagcagaacctgatcgacaccctgattgttgataccacgggccgtctgcagatcgatgaaaccatgatggcggagctttcccggctgaaagaaaccgtacaaccagatgaaatgctcctggtcgccgactcgatgaccggtcagtccgccgttgacatagcgaaaacttttgatgaaaaaatcggcctaacgggcgttgttctgaccaagttcgactctgacacgcggggcggcgcggcgctttcccttaaaaccattaccggcaagccgcttaaatttacgggaaccggggagaagccggaggactttgagcctttccaccccgagcgcatggcaggccgtatccttggcatgggcgacgttgtaagcctggtggaaaaagcccaggaggtaattgatcagaaagaggccctggaacttcagaaaaaaatggagaaagagaactttactctgaaagactggctttcccagcttcgcgccgttaaaaaaatgggttcgcttcaaaaaatgctggaaatgattcccggaatgcaggggcagatcagcgaggacgacattaacaaagaggaactaaaacatcaggaggcgattttaagttccatgacgcacaaggagagagcgaaccatttgatcatcgggccgccgcgcagaagcagaatcgcccgtggctccggcacgtcggtcgccgaagtggcgcgcttgcttaaaaagtttgaaaagatgcgcggcatgatgaaaaagatggcaaagggcgcgagaaacggcgccatgaacggaatgatgggcggcttccctggatttgggcaatag

SEQ ID NO: 60336 - protein, 451 aa, Unknown
  Obtained from environmental sample
  DOMAIN (1)...(87): SRP54-type protein, helical bundle domain
  misc_feature (1)..(451): Xaa is any amino acid
MFDKLTQKVTDALRFVAGKSTISEKNIEDAVDAIKMALLEADVNLRVVRRFVNSTIEEAKGEKVLRAVDPGQQFVKIVHDKLVTYLGGNDPEERKLKLRGPDVISTVLMLGLQGSGKTTSSAKLALRLKKEGRKPLLVACDLIRPAAMEQLAVLGRQIGVPVHREDGATDSSAVYRNALAWAKQNLIDTLIVDTTGRLQIDETMMAELSRLKETVQPDEMLLVADSMTGQSAVDIAKTFDEKIGLTGVVLTKFDSDTRGGAALSLKTITGKPLKFTGTGEKPEDFEPFHPERMAGRILGMGDVVSLVEKAQEVIDQKEALELQKKMEKENFTLKDWLSQLRAVKKMGSLQKMLEMIPGMQGQISEDDINKEELKHQEAILSSMTHKERANHLIIGPPRRSRIARGSGTSVAEVARLLKKFEKMRGMMKKMAKGARNGAMNGMMGGFPGFGQ

SEQ ID NO: 60337 - DNA, 1086 bp, Unknown
  Obtained from environmental sample
  misc_feature (1)..(1086): n is a, c, g, or t
atggcggcacaaatagcggttatcggggcgggcgcgtggggaacgacgcttgccaaagttattgccgaaaaagggaaggatgttatcatctggagctttgaggaagacacctgcgatgatataaacaaacgccacaggaattcccgctatctgccgggggtagatctgccggagaatctgcgggcaagtactgatcttttggataccgcttccgggcgcgacttcctcatcctggccatcccttcactctacttgctgcaaaccgcgaagcaaatgcttgaggcgccctcgattcgtgaggggacaaccgccatcgcggttttgacaaaagggtttttatccacagacaaaggctccaggcttatcctggaaacccttgaggattaccttccgggcttttaccggcagtcccttgtgtacatagccgggcccagccacgccgaggaagtttcgcggggaaaaatcacaggccttatcgcggcaagcgaaaacgcgaaaaactccataaggtttcgtgacctgttaaaaagcaaaagcctgtttgtcttttcatcgtttgacgtgcgcggggttcaggtggccgccgccgccaagaacgtcattgccatcgcgttcgggatgctggacgcctttaagactatggacagtatcaacagcggcgctttggggtatacgaatctgtttggcgacggaaccgaatccatgcttttggcggcaggcctgaacgagatacaaaacctgggcatggctatgggttctacccatccggaaacttttacttccatttccggcatcggcgaccttgatgtcacctgccgttccgtctttgggaggaaccggcgtttcggaaaagatatcatcgagaaaaaaatccttgatccgttcaaagacattgacgatcttctggcgcggataaacgatgtcggttattttccggaaggcgcggcggcggcgaaacatgttaaggttcttgccgaaaaatataagcttaaaatgcccatcgccacaggcgtatataatattttaaaccgcgagattgagccggctgtttttctggaaaatttcctgaatgaactggggcattaa

SEQ ID NO: 60338 - protein, 361 aa, Unknown
  Obtained from environmental sample
  DOMAIN (186)...(355): NAD-dependent glycerol-3-phosphate dehydrogenase C-terminus
  misc_feature (1)..(361): Xaa is any amino acid
MAAQIAVIGAGAWGTTLAKVIAEKGKDVIIWSFEEDTCDDINKRHRNSRYLPGVDLPENLRASTDLLDTASGRDFLILAIPSLYLLQTAKQMLEAPSIREGTTAIAVLTKGFLSTDKGSRLILETLEDYLPGFYRQSLVYIAGPSHAEEVSRGKITGLIAASENAKNSIRFRDLLKSKSLFVFSSFDVRGVQVAAAAKNVIAIAFGMLDAFKTMDSINSGALGYTNLFGDGTESMLLAAGLNEIQNLGMAMGSTHPETFTSISGIGDLDVTCRSVFGRNRRFGKDIIEKKILDPFKDIDDLLARINDVGYFPEGAAAAKHVKVLAEKYKLKMPIATGVYNILNREIEPAVFLENFLNELGH

SEQ ID NO: 60339 - DNA, 510 bp, Unknown
  Obtained from environmental sample
  misc_feature (1)..(510): n is a, c, g, or t
atgaagtgggaaacagtcatcggtcttgaggttcataccgagctatcaacaaaatcaaaaattttctgcggttgcaccacatcctacggcggtgaaccgaatacacacgtctgccccgtctgcgcaggaatgcccggcgtattaccggtacttaaccgctccgtagtggagtacgctatccggctcggtcttgcccttgattgcaccatcaccaaatactgcaagtttgaccgtaaaaattatttttatcctgatctgccaaaagcctaccaagtatcgcaactatatgccccaatttgcaaagacggtcatcttgacatcgaagttaacggacaaaaaaagactatcaacatacgtgagatacacatggaagaagacgcgggaaaattgattcatgacgcaaacggcacgaacactttcatggactttaaccgctgtggcgtgcctcttctggaaattgtttcccaaccgcgacttccgcagttcagccgaggtaatcgcctatcttga

SEQ ID NO: 60340 - protein, 169 aa, Unknown
  Obtained from environmental sample
  DOMAIN (1)...(168): PET112 family, N terminal region
  misc_feature (1)..(169): Xaa is any amino acid
MKWETVIGLEVHTELSTKSKIFCGCTTSYGGEPNTHVCPVCAGMPGVLPVLNRSVVEYAIRLGLALDCTITKYCKFDRKNYFYPDLPKAYQVSQLYAPICKDGHLDIEVNGQKKTINIREIHMEEDAGKLIHDANGTNTFMDFNRCGVPLLEIVSQPRLPQFSRGNRLS

SEQ ID NO: 60341 - DNA, 954 bp, Unknown
  Obtained from environmental sample
  misc_feature (1)..(954): n is a, c, g, or t
gtgccaatagcaattaaagataatatttccaccacaggaattgaaactacctgcgcgtcaaaaatgcttaaagggtacacgcccgtgttcaacgcggcggttatcgacaagctggagagcgccggcatggttgtaatcggcaagctcaacatggacgagtacgcgatgggcggctccagcgaaacgggcgtaaaagggccggtacacaatccctgggatgttacgcgagtcgcgggcggttcatcgggcgggagcgccgccgccgtaatcgcgggatcaacgcccatcgcgcttggttccgacacggggggcagcatacgccagccctgcgctttctgcggcgttaccggaatcaagccgacctacggttccgtgtcgcgctacgggcttttggcttacgcgtcgtccctcgaccagataggcactatcggacaaaacattgacgactgcgccgctttgctctcgatcatttcagggcctgacgcgcgggacagtacctgcgttatagaaaagccctttgaattcggcgaggggagcaaccgcgccaaattggaaggcgtgaaaatagggctgccccgtaactattacggcagtggtattgacgacgaggtaaaaaacgccgttctggctgtcgctaaagagcttgaggcggcgggggctattatagaagaatttgaaatgccgctgatggattatatgatccccacttattacatcatcgcctgcgccgaagcgtcctcaaacctctcccgttacgatggcctgaaatacggttaccgcagccctaacgcgcagtctctttcggaagtgtaccgtctttcccgcaacgagggcttgggttggaagaaaaagaagaatatgcntaggctcgtttgtcctttcatccggatactacgacgcatactacaaaaaagccctgcaggtacgcgctcttatcaaagacgcttacactaa

SEQ ID NO: 60342 - protein, 317 aa, Unknown
  Obtained from environmental sample
  DOMAIN (1)...(317): Amidase
  misc_feature (1)..(317): Xaa is any amino acid
MPIAIKDNISTTGIETTCASKMLKGYTPVFNAAVIDKLESAGMVVIGKLNMDEYAMGGSSETGVKGPVHNPWDVTRVAGGSSGGSAAAVIAGSTPIALGSDTGGSIRQPCAFCGVTGIKPTYGSVSRYGLLAYASSLDQIGTIGQNIDDCAALLSIISGPDARDSTCVIEKPFEFGEGSNRAKLEGVKIGLPRNYYGSGIDDEVKNAVLAVAKELEAAGAIIEEFEMPLMDYMIPTYYIIACAEASSNLSRYDGLKYGYRSPNAQSLSEVYRLSRNEGLGWKKKKNMXRLVCPFIRILRRILQKSPAGTRSYQRRLH

SEQ ID NO: 60343 - DNA, 597 bp, Unknown
  Obtained from environmental sample
  misc_feature (1)..(597): n is a, c, g, or t
atgtattgggcaagatttgaaaatataaacggagcaatattccgatttgatactcgtatttatttacagccaatagagaaaccactctctacagatgtatgtattggcgctttcatcggaaagaatcccggctcggcacagccaactaaccccaaagtttcaacattacaacgaatacaattaggtcgtgataacttgttacctactataaaaagtattatgactaaagcatataaagcagccggaaaagagagtaaaccaaatagctatattcaagttttgaatctgttttacctttgtgatccattacttaatcaagcaaggagaaggatacaaggatttctaccctatcatccaatagatgattctgaaaaaaataaattcccttttgttttttattcatggggaggaccaaatgacaggattaatagttttaaaaatcgatttataaagaatatccgtacaaacaatcatatttggtttgattacaacgtaaatagaacgaacttaacaaaaccatctgaaactgattttgttaaacatattcaaggggtagagcatgataatatattaaacacaatcgcagctgttatataa

SEQ ID NO: 60344 - protein, 198 aa, Unknown
  Obtained from environmental sample
  misc_feature (1)..(198): Xaa is any amino acid
MYWARFENINGAIFRFDTRIYLQPIEKPLSTDVCIGAFIGKNPGSAQPTNPKVSTLQRIQLGRDNLLPTIKSIMTKAYKAAGKESKPNSYIQVLNLFYLCDPLLNQARRRIQGFLPYHPIDDSEKNKFPFVFYSWGGPNDRINSFKNRFIKNIRTNNHIWFDYNVNRTNLTKPSETDFVKHIQGVEHDNILNTIAAVI

SEQ ID NO: 60345 - DNA, 1680 bp, Unknown
  Obtained from environmental sample
  misc_feature (1)..(1680): n is a, c, g, or t
atggcagatgacagcaaaacgctggaactccaaatccgcatcgccgcgcaggaagccgtcagggctgtagcctcgcttaagggcgagatacagaccctcgcgtcagaagcgaagaaattcgcggggtctgacggggcagctcttgaaaaatcattcaaggatgcggaagccgccgccaaagattcagcctcaagcataggcgacatcaaaaaggctatcggaagcctggccgaagtcgccgcagcgacaaaggcgctgtcggttataaaggacatgggcgacttcgcgctccggacagccgacaatttccagaccatgaaaaaccagttcggcgtgctattaggcgacatggaagccggcgccggattgttcaacgaaattaaagctttcaatgacgtgacgccgttcgacctcgacaccctcacccaggcgaccaacgtgctgatcggggccaaggttcccctgcaggacttgcaggcgcaattaaccaaattcggcgacctgtcccaaggcaattcccaaaagatgacaagttacgtcaacgccttttcacaggctgcggccaagggcaaggccgacatgcaggtgcttaatacttacctgcaccagggcgtgccgatactggacgccctcgccaataactttggcaaaacgaccgatgagattattgaaatgtccagtcaggggaaaatcagttttagtgatttctcaaaagcccttgacgatctaaccgctgcgggaggacagtattttggcggtatggaacaggcatcaaagagcctcgcggcgatgcaggaaggcttaaatgaagctgtaaattcacttgcggcttcattcggtgaaatgttgctgcctgttatgattaacattataggagcgttgaccgatatggccaacgcgataaacgaaagtcctattttaaaaggcgtattagctggggcgttagtcgctattacaggatatttaggggctatggctattaaagccggtattgcctttgccgcgcagatgagtcttaaccttgcgattggagcgcttaatcctgtagtgttggcatcaactattgcggtagcagggttagctgctgggtacgcggtatatgccgctgacctccagaaagccaacaaagtaggagaagattttgcttaccagcaacgacagcaaaaagacgcggttgacgctgccgcagaatcagtagcggcattcgcaaaagctctgaaaaatatgtcaggtgaagatttaaacaaaaacatcacgctgataaaccgcgaaataaacgaattaaaaaagaacattgctgaatttgaaaacgagtatggcaaagccatggcaagaggaaatcaaaatagagcgcggcattgggctgacttaattaaaactgaaaaagaaaacctcgcgcaggcggcaaaagatttggtttccgctcaaggcgttttaagtgaacgcagaacaaactggatagattccatgtttggagatacccaaacagcgaaaatacaaaaactaaatgaaaaattagctcttgccagggaatacctcttaggagccagtgacggcgaacggtctaaacttcaggagatcatacaatctcttaccgctgatcttgaaaaacttaccgctaaaggcgatgaagccaaccttttagccgcgcgctgngaagatcatggaatgattttataa

SEQ ID NO: 60346 - protein, 559 aa, Unknown
  Obtained from environmental sample
  misc_feature (1)..(559): Xaa is any amino acid
MADDSKTLELQIRIAAQEAVRAVASLKGEIQTLASEAKKFAGSDGAALEKSFKDAEAAAKDSASSIGDIKKAIGSLAEVAAATKALSVIKDMGDFALRTADNFQTMKNQFGVLLGDMEAGAGLFNEIKAFNDVTPFDLDTLTQATNVLIGAKVPLQDLQAQLTKFGDLSQGNSQKMTSYVNAFSQAAAKGKADMQVLNTYLHQGVPILDALANNFGKTTDEIIEMSSQGKISFSDFSKALDDLTAAGGQYFGGMEQASKSLAAMQEGLNEAVNSLAASFGEMLLPVMINIIGALTDMANAINESPILKGVLAGALVAITGYLGAMAIKAGIAFAAQMSLNLAIGALNPVVLASTIAVAGLAAGYAVYAADLQKANKVGEDFAYQQRQQKDAVDAAAESVAAFAKALKNMSGEDLNKNITLINREINELKKNIAEFENEYGKAMARGNQNRARHWADLIKTEKENLAQAAKDLVSAQGVLSERRTNWIDSMFGDTQTAKIQKLNEKLALAREYLLGASDGERSKLQEIIQSLTADLEKLTAKGDEANLLAARXEDHGMIL

SEQ ID NO: 60347 - DNA, 1134 bp, Unknown
  Obtained from environmental sample
  misc_feature (1)..(1134): n is a, c, g, or t
atgggaagggacaaactaaggataagggattatttttcagaagttgagacggaaaaagagtacaatggctatttctgcagcgtaggggaggcgctgacaatagcgatattgggttcaatatgcggcttgcgaaacaccaatcaaatccatcaatgggcatcaagccaacgcgtcagcgagtttctgtcggtacattttctgataaataacattccctgttattactggcttttatgccttttaaagctgataaagcctgactcgcttaacagatgcttcatgaaatgggcgcaatcactaaggcccggcggggtcaaaggtttcaccatttcatttgacgggaaaacaatccgttctaccgggaagatggacagttatgataacccgctgcatatactcagcgcgcacttggctgaactgggtataaccataggtcaaagaacggtgggggagaaaagcaacgaaatccccgcgatgcgggaactattagagtttttaaccatagagggctgtatggtagtcgccgacgcgttgaactgccagaaagaaacggcagcggcggtaattaagggcaagggagattatttgttttcggtgaaggataatcagcaaacattgaaagaagacatagaaggttacgtgcaagacaagcatttacaaaaaacaatggacatccacacaacaattgaaaaaacgagcggcaggatagaacgtagaaccgcatatacgagcggtgatataggatggctttccggtaaggaggaatgggagaaactggcttgtattggagctgtgaacacccaatgtaccagcaaaaagagagaggcaaacgagtggcattattacatctgcagccgcaacttgacggcggaggaactgctcaggcacgcccgtttggaatggtcggtagaaacaatgcattggctgcttgacgtgcatttcggcgaggatttctgccgtgttgaggatcggaatgtccaggaaaatttgaacattgttcgtaagatagcgcttaacacgattaaaggctacaaaaacaagacggcttctaaacgccctatttcaaagcttatgttcgattgtttgcttgaatccgagaatatcttgtccattttgactgtcaatgaaaattga

SEQ ID NO: 60348 - protein, 377 aa, Unknown
  Obtained from environmental sample
  DOMAIN (109)...(340): Transposase DDE domain
  misc_feature (1)..(377): Xaa is any amino acid
MGRDKLRIRDYFSEVETEKEYNGYFCSVGEALTIAILGSICGLRNTNQIHQWASSQRVSEFLSVHFLINNIPCYYWLLCLLKLIKPDSLNRCFMKWAQSLRPGGVKGFTISFDGKTIRSTGKMDSYDNPLHILSAHLAELGITIGQRTVGEKSNEIPAMRELLEFLTIEGCMVVADALNCQKETAAAVIKGKGDYLFSVKDNQQTLKEDIEGYVQDKHLQKTMDIHTTIEKTSGRIERRTAYTSGDIGWLSGKEEWEKLACIGAVNTQCTSKKREANEWHYYICSRNLTAEELLRHARLEWSVETMHWLLDVHFGEDFCRVEDRNVQENLNIVRKIALNTIKGYKNKTASKRPISKLMFDCLLESENILSILTVNEN

SEQ ID NO: 60349 - DNA, 729 bp, Unknown
  Obtained from environmental sample
  misc_feature (1)..(729): n is a, c, g, or t
ttgtcccttcccatcctttgtttttatcataggttcttttctttgaaaattgatttccgtgctgacaaatatcgtataattgacataaaaaatgatttatattacaattccgtaaattactatacgaggaaaaatatgaagaaaattttatctgttttgtttgtttttacagtcatttctgttcttttaaccggttgttcaaaatcatccggcggacttaccataaaaaaaggggttttatcggttggcatggaaatagggtatcctccgatggaatatcttgctcctgacggaaagacaccggtcggctttgacgtggaactagccaatgccattgccgaaaaattggatttaaaacttgaattaattgatactgcatgggacggcattttcgccggtgttgatacaagaaggtatgactgcataatatcgtctgtaacaattactcctgaacggcttaaagcccacaatttcagcaaaccgtacattcaaaatacccttgctcttgtactgtcgaaaaattcaaaacataatatcagttccccgatggaccttgcagggcttggcgtcgcttatcaggaagaaacaacatccgatcactatatggaacagcttgcgaaagacggcttgaattttaccccttacgaatacgacaaggttatgtattgttttgatgaattgagacttggcagggtagacgctatagtaaccgtttcggtcattgcataa

SEQ ID NO: 60350 - protein, 242 aa, Unknown
  Obtained from environmental sample
  DOMAIN (80)...(240): Bacterial extracellular solute-binding proteins, family 3
  misc_feature (1)..(242): Xaa is any amino acid
MSLPILCFYHRFFSLKIDFRADKYRIIDIKNDLYYNSVNYYTRKNMKKILSVLFVFTVISVLLTGCSKSSGGLTIKKGVLSVGMEIGYPPMEYLAPDGKTPVGFDVELANAIAEKLDLKLELIDTAWDGIFAGVDTRRYDCIISSVTITPERLKAHNFSKPYIQNTLALVLSKNSKHNISSPMDLAGLGVAYQEETTSDHYMEQLAKDGLNFTPYEYDKVMYCFDELRLGRVDAIVTVSVIA

SEQ ID NO: 60351 - DNA, 555 bp, Unknown
  Obtained from environmental sample
  misc_feature (1)..(555): n is a, c, g, or t
atgacgccgggtaggatattcgtcttttcggcgccgtcgggcgcggggaaatccacgattttgagccgccttgcggagacggtgcccaatcttgtttactccatctcggccaccacgcgcaagccgcgcgccggagagacggacggggtgcattacttctttatgaccaaagaagtgtttgaggccaaagcggctaagggcgagtttgccgagtggcagcaggtgttcggcaactactacggcacgccgcgagctttcgtcgactcggtggttgccacagggcgccacattatcatggatatagacgtcttcgggaagaagaagttcgacttggcgtatccggaggccgtcgggatactgatcgtcccgccctccatggatgagctcgcggcacggctttgggcgcgcggcaccgacgacgaggcgacaataaagctgcggctcgagaaagcccgcgccgaaatagagttcgcgcgttccgagggcaagtacgagtacgagatcgtgaacgacgatctggagaccgcggaggcccgagacggcggcgctgaatag

SEQ ID NO: 60352 - protein, 184 aa, Unknown
  Obtained from environmental sample
  SIGNAL (1)...(25)
  DOMAIN (39)...(143): Guanylate kinase
  misc_feature (1)..(184): Xaa is any amino acid
MTPGRIFVFSAPSGAGKSTILSRLAETVPNLVYSISATTRKPRAGETDGVHYFFMTKEVFEAKAAKGEFAEWQQVFGNYYGTPRAFVDSVVATGRHIIMDIDVFGKKKFDLAYPEAVGILIVPPSMDELAARLWARGTDDEATIKLRLEKARAEIEFARSEGKYEYEIVNDDLETAEARDGGAE

SEQ ID NO: 60353 - DNA, 840 bp, Unknown
  Obtained from environmental sample
  misc_feature (1)..(840): n is a, c, g, or t
atgaataacgcggagccaacacagacggccgcaactgcggcggcggcgtttctcttccctctcgacgggcgcgaactcgctatcgggcgcgacgcgtcgtgcgatatatgcctcacgggcataggggtgtcgcgacggcacgccgttgtgcgctgcgacgcggctaagcccgtcgttatagattccggcagcacctgcggcacctctttagacggcgcgccgattacggaagccgttttacggagcgattcggcgctgaccatcggcatcaacgtattgcgggtcgacatcgacgaggtctccatcagttttacgctcttgaactccggcggcggcgactcggcgctcggcgctgagggcggcgtcataaggatcgggcgcgccgcggagaacgacatctgcctgccgcaccctatggtctcacgattccacgccattgtaaaaaaaggggcggacggactctccgtcgtcgatcagggcagcgccaacgccacgtatgtcaacgggcggtcggtgaggacgcgcctgctctgcgagggcgacgtcgtgcatatcgggccgtttcggttctacgtgacgggcggggagttccgccggaccgacgacataagcaggatacgcatagaggcccactccctcggggtgaggctcggcggaaaaagactcttggacggcgtcaacctgacgatagacccgggcgatttcgtggcgctcttggggccgtcgggcgcggggaagtccacgctctgcaaggtgctttcggggcagctcgcccctacgaccgggcggctgttcatgaacggcttccccgcggctaagttcggcgcggtcttcgcctga

SEQ ID NO: 60354 - protein, 279 aa, Unknown
  Obtained from environmental sample
  DOMAIN (26)...(89): FHA domain
  misc_feature (1)..(279): Xaa is any amino acid
MNNAEPTQTAATAAAAFLFPLDGRELAIGRDASCDICLTGIGVSRRHAVVRCDAAKPVVIDSGSTCGTSLDGAPITEAVLRSDSALTIGINVLRVDIDEVSISFTLLNSGGGDSALGAEGGVIRIGRAAENDICLPHPMVSRFHAIVKKGADGLSVVDQGSANATYVNGRSVRTRLLCEGDVVHIGPFRFYVTGGEFRRTDDISRIRIEAHSLGVRLGGKRLLDGVNLTIDPGDFVALLGPSGAGKSTLCKVLSGQLAPTTGRLFMNGFPAAKFGAVFA

SEQ ID NO: 60355 - DNA, 810 bp, Unknown
  Obtained from environmental sample
  misc_feature (1)..(810): n is a, c, g, or t
gtgggcgtggagctcttggcgtcgccctccgtggtgatcctggacgaaccgctcgccggactcgaccccgggctgatcgggaagttcatgcaaatcttcaggcggatatgcgacaagggccacacgctcatcctcatcacccacacgcttgagcggcttgagctntgcgacaggctggtgtatatacaggccggcaagacgctcttttccggcgcgcccgattctatttgcgggtatttcaacgtcacgtctatatcgcaggtctatgaacactccggcgacgccggctttgaaaccaaaaccgacgggggactgccggcggacgccgcaactgcttcggttaacgccgcgtccgctcaggcggcattgccgcgccgcgattgggcggcggcgctgcgccacccgctcacggcgttgcggttcttcttccgccaatcgtacacgctcacggcgcgttacgcgaaagtgtacgtcagggacaggcgcaatatgctgcttttgatggcgcagacgccgctcatcacgctgctcctcggctttgtctacaagatgtccataatgcagttcccgataagtttctacttttgcctcacggtaacgggcatctgggtgggcggtctcgacgcggtgcgcgaggtggcctcggaactgcctcttttggcgcgggaggcgaggtgcgggatgaaccgctgggcgtacatcatagcgcggatagccgtcgccgccgccctttccgccgcgcaagccctgctgttcacggtttcggcggtcatcgtcttcaggcatcggagtctcctcggccgattctga

SEQ ID NO: 60356 - protein, 269 aa, Unknown
  Obtained from environmental sample
  misc_feature (1)..(269): Xaa is any amino acid
MGVELLASPSVVILDEPLAGLDPGLIGKFMQIFRRICDKGHTLILITHTLERLELCDRLVYIQAGKTLFSGAPDSICGYFNVTSISQVYEHSGDAGFETKTDGGLPADAATASVNAASAQAALPRRDWAAALRHPLTALRFFFRQSYTLTARYAKVYVRDRRNMLLLMAQTPLITLLLGFVYKMSIMQFPISFYFCLTVTGIWVGGLDAVREVASELPLLAREARCGMNRWAYIIARIAVAAALSAAQALLFTVSAVIVFRHRSLLGRF

SEQ ID NO: 60357 - DNA, 2466 bp, Unknown
  Obtained from environmental sample
  misc_feature (1)..(2466): n is a, c, g, or t
atgagttcaaaacaaacgcaaatgctgtttgaaaaagaacaatttcggatgtccggactccaggtctttaattggggaacattctccggtctgcacaaggtgcccatttcgccgaaaggttttttatttgtcggaggctccggaaccggcaagactaccctgttggacgcgttttccgcattgctgatacctccccgctggattgattttaacgcggcggcccgcgaatcggagcatcgtaaaggcaaggatcgcaatatcgtcagttacatacgcggagcctgggcggaaaaagaagatgaagtgtcaggtgatattagcacccactatcttcggtccggaacaacgtggtcggctctggcgttgacgtatcaaaatgaaacagggcaaatcgtggtcattgggcagatcttttggattcgcggtaattcaaacggaaccgccgatgtaaaacgttattattttatttttgaacggacattcgatctgcacgagtttgaagatttcggaaaatctgactttgatatccgcaaattaaaacaatcatttccggatatttttattattaacgaatttacgccatattgcgaacgtttccgccgattgctcggcattgagaatgaagtggcgctcagattgctgcacaagactcagtcagccaagaatcttggcgatctgaatacattgttccgggactttatgctcgaaaagcctgagacctttgacgccgccgacaggcttgtcagcgagtttggagaactcaacgccgcgcatcaggcagtggtgaccgcccgcaaacaaatcgagaccctccttccggcaagagaaaaacattgtgaaatggaaacaattatgaagcggcggactgatcttaaagagttgcagagcggtacagatagctattgcgagatacggcgaataggtttattgaaagagcgcatcgccacgcttaccgtcgaaaaagacggctggaaaggcaagatagatcaatgtcaaagcctgttggacaatgagacgaatgttctaagggatctggaacgccaacatcgggagattggcggcgatcagattgagcaatgggaacttgaaaagcggacacttgagagtcagcgtatagaacgtgaacggaagcgggatcaggcgacggcggcctgtgctgagctgggttggacgcttagcggaacaccacagggattcgcggcgctcattggaaaggcgcgcgaggaaatcgaaggaagggaagaaaaaagcaaagcagcccgcgacgagctgctggtacagtacggcaagaaaaaagaggccgagaacgaattcgcgattgccgtaaaggaatatcgggcgcttcaaagtcaacgttcaaatattccggccgatatgctggagctacgaaacagaatcgcttcggcaatcggggtatcagtcaccgctttgccgtttgtcggcgaacttatagaagttaagccggagcagtctatatggcagggcgccattgagcgggttttgcgcggcttcgccttatcccttctggtcgatgaaagccactattcggcgctgtcaaactatgtaaacagcacgcatctgggacaacgccttgtttattatcgcaccggacgcgcggagcaatggcaggagaaactgttttcacctgattcaatggtatttaaactcaatattaaagaagggaattacgccgaatggttgaaatccgaattacgccaacgtttcagttattcatgcgtagagtcgattcaagccttcagagcggcggagcgcgcgttaacacgcgagggacaggtaaaacacagcaaaacccgtcatgagaaaaatgacaagtacgccgtgggcgatagaagaaactggatcctgggcttcgataaccgcgaaaagctggccttgtttcaacagcaagcccaggaactggcggctgcaatttcagacctggataagaagatcaacgcgttatccgaacaggataacctgaacgcgaaacgggcccttcattgccaaacgctggtcaatatgcagtggcaggaaattgacgcgcttccgataatagaacgcatctccgtgattgagaagcaaattcgtgaaatgcgcgacggcaataaagtgttacaagaaatttcggaacgaatcaacatgcagaagtccatcgtctcacgggctgaaaatgacctgagtgatgccaggggtgaatataaaaagacgcttgataaactcacagattcaaaagactatctcaataaattacagaatgacccttcgatcgttgctccaacccctttccagaaaaaaggtcttgatgattactttgcgcgtattacagacaatgtccggcttgataacctcggagatattaccacatctgtagtacaacttctgggcgaagagatcagaaaggtcagtcacgacattgacgtatgcgtaaaagagatagaaaaaatcttacagaactcggcgatctga

SEQ ID NO: 60358 - protein, 821 aa, Unknown
  Obtained from environmental sample
  misc_feature (1)..(821): Xaa is any amino acid
MSSKQTQMLFEKEQFRMSGLQVFNWGTFSGLHKVPISPKGFLFVGGSGTGKTTLLDAFSALLIPPRWIDFNAAARESEHRKGKDRNIVSYIRGAWAEKEDEVSGDISTHYLRSGTTWSALALTYQNETGQIVVIGQIFWIRGNSNGTADVKRYYFIFERTFDLHEFEDFGKSDFDIRKLKQSFPDIFIINEFTPYCERFRRLLGIENEVALRLLHKTQSAKNLGDLNTLFRDFMLEKPETFDAADRLVSEFGELNAAHQAVVTARKQIETLLPAREKHCEMETIMKRRTDLKELQSGTDSYCEIRRIGLLKERIATLTVEKDGWKGKIDQCQSLLDNETNVLRDLERQHREIGGDQIEQWELEKRTLESQRIERERKRDQATAACAELGWTLSGTPQGFAALIGKAREEIEGREEKSKAARDELLVQYGKKKEAENEFAIAVKEYRALQSQRSNIPADMLELRNRIASAIGVSVTALPFVGELIEVKPEQSIWQGAIERVLRGFALSLLVDESHYSALSNYVNSTHLGQRLVYYRTGRAEQWQEKLFSPDSMVFKLNIKEGNYAEWLKSELRQRFSYSCVESIQAFRAAERALTREGQVKHSKTRHEKNDKYAVGDRRNWILGFDNREKLALFQQQAQELAAAISDLDKKINALSEQDNLNAKRALHCQTLVNMQWQEIDALPIIERISVIEKQIREMRDGNKVLQEISERINMQKSIVSRAENDLSDARGEYKKTLDKLTDSKDYLNKLQNDPSIVAPTPFQKKGLDDYFARITDNVRLDNLGDITTSVVQLLGEEIRKVSHDIDVCVKEIEKILQNSAI

SEQ ID NO: 60359 - DNA, 528 bp, Unknown
  Obtained from environmental sample
  misc_feature (1)..(528): n is a, c, g, or t
gtgtcgcgcaaaacgccggttaccgccgttattaatacaaaggtcagcgaaaaatttacccgtatgcttaaggaactgaatccccaatcaatttttgacattatcaacgccgctgagataggtccgcatacggcgatcatactggaggaaaaactggcaaagggagagatggtgaccattgccggagacagaaccgccgccggtaactccaacggttccgtagaaaaacttatgatctcatttttaggagaggaagcgccattttcgccggggattttttatatggcggttttaatgaaagcgcctgtttattttgtctttgccctgcgccgcggggatctgtccataaaaccggagtacgatatgcacgtgcataaatgcgcgctttctcttgaatgttccagaaaggagaggcttactcaaagtaccctccttgcccgatccttcgcggagttgttggaaaactactgtaaccaaaccccttttcagtggtataatttttatgacttctggtataaagaggcgtga

SEQ ID NO: 60360 - protein, 175 aa, Unknown
  Obtained from environmental sample
  misc_feature (1)..(175): Xaa is any amino acid
MSRKTPVTAVINTKVSEKFTRMLKELNPQSIFDIINAAEIGPHTAIILEEKLAKGEMVTIAGDRTAAGNSNGSVEKLMISFLGEEAPFSPGIFYMAVLMKAPVYFVFALRRGDLSIKPEYDMHVHKCALSLECSRKERLTQSTLLARSFAELLENYCNQTPFQWYNFYDFWYKEA

SEQ ID NO: 60361 - DNA, 510 bp, Unknown
  Obtained from environmental sample
  misc_feature (1)..(510): n is a, c, g, or t
gtgtgcgggtatgcttctgcggctgccgctgctgattgctttgaggaaaaaacgcgggaaagagagaaaatgaaagaaccggaagccccctcgctgcactggtcacggcataaagaaaaggccgcggggtactggcacatgaaacttctgctggttttattccggctgtttccggttattatcctgcgtgttctggcgtttccggttggttttttttattttcttttttcaaaaaaggcaagggctgaatcaaaatgttttttgtgcaaagccgccccttttgttacacaacatggcgccgctcagaaatgccgttctccttttggccccctgcggcatattatttccttttcccttaccctggtggaaaaacttgaatcatggggaggcaagtttcaatttaaacacattcattttcagaatgatgacatagacgaacttgttcaggaactggaaaacgggcaggggatttttatgattacttcccatctggggaatatagagctttag

SEQ ID NO: 60362 - protein, 169 aa, Unknown
  Obtained from environmental sample
  misc_feature (1)..(169): Xaa is any amino acid
MCGYASAAAAADCFEEKTREREKMKEPEAPSLHWSRHKEKAAGYWHMKLLLVLFRLFPVIILRVLAFPVGFFYFLFSKKARAESKCFLCKAAPFVTQHGAAQKCRSPFGPLRHIISFSLTLVEKLESWGGKFQFKHIHFQNDDIDELVQELENGQGIFMITSHLGNIEL

SEQ ID NO: 60363 - DNA, 792 bp, Unknown
  Obtained from environmental sample
  misc_feature (1)..(792): n is a, c, g, or t
atgaaacagtttattcaacggggacagttattctggagaatatgtgagacagggcattcttatccccgtatacaggcacggcaaaaccgcctgccccctggccgaacggcttgcggcttatgcgttgccaataatcatggtggacgacggcaacgacgcggaaaccaaagcgctccttacggaatgcgccgccaaaacaccgggtgtttcgctggtaagcctggaaaaaaacagcggcaagggaggagccgttgccagcgtcttcaaaaggcgcgggaatgggggctgacccatgtgctccagatagacgctgacggccagcatgatgacgggagggccgccttctttctcgcagagtccgccaaatatcccgacatgatcatctgcggatacccggaatttgatgaaaccgctccccggagcagggttaccggacgaaaaatttccaatttctgggccgctgtggttacgctttcaacagagctcaaagaggtactgtgcggtttcagggtatacccggtggatgcgtcattacgcataacacggcgtctttttttggatcagcgcatgggctttgacccggaaattctggtgcgcctgtactggaataaggtttttccggtatatcaccccataaaagtcagctatcccccggacggggtttccaatttccgcatggtcagggataatatccgcataagctggatgttcagccggctgtgtgcgggtatgcttctgcggctgccgctgctgattgctttgaggaaaaaacgcgggaaagagagaaaatga

SEQ ID NO: 60364 - protein, 263 aa, Unknown
  Obtained from environmental sample
  misc_feature (1)..(263): Xaa is any amino acid
MKQFIQRGQLFWRICETGHSYPRIQARQNRLPPGRTACGLCVANNHGGRRQRRGNQSAPYGMRRQNTGCFAGKPGKKQRQGRSRCQRLQKAREWGLTHVLQIDADGQHDDGRAAFFLAESAKYPDMIICGYPEFDETAPRSRVTGRKISNFWAAVVTLSTELKEVLCGFRVYPVDASLRITRRLFLDQRMGFDPEILVRLYWNKVFPVYHPIKVSYPPDGVSNFRMVRDNIRISWMFSRLCAGMLLRLPLLIALRKKRGKERK

SEQ ID NO: 60365 - DNA, 1356 bp, Unknown
  Obtained from environmental sample
  misc_feature (1)..(1356): n is a, c, g, or t
atgtacacgtcgggaagcacaggaaaacccaaggcggtacaacagaggcttgcggaatttgaagccgacaaccgttttgtaatttccaagtggggcgacgaattcctaaaacgcaagttatgttcaactgtaagccagcatcatatttacggaattttattttctatacttttaccgtttactctgggagcgcctttgcgaaggaaacggatagaatttcccgaagaaatagaaaaactctccgatacggaatacatgattattacagtgcctgctttccttaaacgcgcggtggaaatagaaaattcatccgtccttaacttaaaatctccatggatatttacttccggcggcgcgcttaaatttgaaaccgcaaaaaaaacaagcgaagttttcggtttctggcctgtggaagtttacggcagtacggaaacttcaggcatagcatggaggcagtcggttcacggtcaggaatggacggtttttgacaatgcggagatcagtcaaaataaagacggatgtttaattatccgttcgccttacatcaaagacccggcaggttttgaaaccgccgacatggtagaaatattgaaagacggacgttttctgctcaaagggcgcgttgactcagttgtaaagatcgaggaaaaacgcatttcatttacagaaatagaaaaccggattttacaatccggccttgtatccgacgtatgcgtgatctctttggaagacaagcgccaataccttgccgccgccgtggtttttacacaaagggggaaggaacgctttaacgggcttgagaagatcgatataaataaattctggagagagtaccttcttcaatattttgaaaacgtggttatccccaaaaaatggcgctatcctgaaaacctgccccttgacgcgcaaggaaagaaaaagaaagaagcgattgagtttcttttctcaggtgaaaaggaagctgcggataacgccattgttacaagcggcgctttaacgagcgcgggtttcggtgtattggacagtgaaaaaattattgaaaaaaccgaaaactcggtaagtatggaattttccattcccggtacaagctcgtattttgacggacattttccgggattccccatcctcccggcggtagcccaggcggaattggttatccgtttcgcggcgcggtattttggaacaggcatcagtccctctgaaataaagcgttttaaatttaccaaattaatccggcctgacgcgcctctcctgctcaaactgacaaaaaaagaaaaaacaatttcctttaatataagttctcctgaaaatgaaacagtttattcaacggggacagttattctggagaatatgtga

SEQ ID NO: 60366 - protein, 451 aa, Unknown
  Obtained from environmental sample
  misc_feature (1)..(451): Xaa is any amino acid
MYTSGSTGKPKAVQQRLAEFEADNRFVISKWGDEFLKRKLCSTVSQHHIYGILFSILLPFTLGAPLRRKRIEFPEEIEKLSDTEYMIITVPAFLKRAVEIENSSVLNLKSPWIFTSGGALKFETAKKTSEVFGFWPVEVYGSTETSGIAWRQSVHGQEWTVFDNAEISQNKDGCLIIRSPYIKDPAGFETADMVEILKDGRFLLKGRVDSVVKIEEKRISFTEIENRILQSGLVSDVCVISLEDKRQYLAAAVVFTQRGKERFNGLEKIDINKFWREYLLQYFENVVIPKKWRYPENLPLDAQGKKKKEAIEFLFSGEKEAADNAIVTSGALTSAGFGVLDSEKIIEKTENSVSMEFSIPGTSSYFDGHFPGFPILPAVAQAELVIRFAARYFGTGISPSEIKRFKFTKLIRPDAPLLLKLTKKEKTISFNISSPENETVYSTGTVILENM

SEQ ID NO: 60367 - DNA, 2976 bp, Unknown
  Obtained from environmental sample
  misc_feature (1)..(2976): n is a, c, g, or t
atgaaggcaatcaatatatcaaacgatattattacaaacataacggtaaacgaagcctgctcttcaggctgcggttcatttctggaaacttttgctgaaaccctgcatatccccgttgaaaaaatcgccgaggccgcctttaacgctaaaaatcccgcgcggctcggaagccgttgcacggtctttatgaacagtactattattaccgaacaaaaaaacggcaaacaagctgacgatattatggcgggtctgtgccgctcaataatagaaaacgtatttacaaaagtcgtgcgcatttcaaataccgcgcaacttggaaaaaaaattgtcgtgcagggcggcacgtttaaaaacgacgcggtacttcgcgcccttgaacaataccttggaagaaacgtggtacgcgccccctatcccggagaaatgggcgcggtcggcatcgcgattcttaccaaacgggaaataattgaacacggttatacctctccacacggcacaagcggacattcccgctttatcggttttgagtctctaaaagattttaattatacgcaacatgcaaatttaatctgccccttttgcaataataactgtaaccgtatgttagtgcgcttttccaacggtctaacatgggtaacaggcaaccgttgcgagcgcggcgagattgtcggcactgcggaagattctgcggtacgggaaaagataaaaacaattaccggaagaatgcagtccgttcccgatcttatgaaaatgcgggaggaacttctttttaaagaatacccggtaacgccacttttgccacagtgcggtactactttcggtctaccccgcgttcttgagttctggaacagtatgcccttctggacgacattctggcgctctcttggttttacgactcttatttcccgcaagtccagcagaagcctgtacgaacaaggacttcactttgtttcctcggataccgtgtgctttccggcaaaacttgttcacgggcacatccgcgatttagttgaaaaaaaagtagacagaatttttatgcctttgattatccgtatgccgcctgagaataccgaatctttatccgattatgtgtgcgccgtggtaaagggctatcctctggttgttcaatacagcgacgatccgcagcgccgttggaacactccctttgatacgcccatctttcattggttaacgatgaaggacaggaataggcaaatatgcgattttgtcagaaagagttttaacattccaagcgttgttacgcgcaaagcgatacatcaggcggacgtggcactttcggcgtttcatggggaacttatttccaacgcgcggcaaataatcgcgcaggttgaaaaggagggaaagtttgccgtagttctcgcgggcagaccctaccataacgacgaacttgtaaaccacacattgtcaggctactttacgcggcttggtattccggtacttacattggactgcctgcctgaattaaatacgacagaccttaaatacacgcgctctgaaattacaaataacttccacgcgcgtatgctctcgggcgcaatttgcgtcgcccgtcatccggcgcttgaatatgtgcagatagtaagtttcggttgcggtcacgacgcaatcctgaccgatgagatcatacggctgatgaacgttatctcaggcaagaccccccttatccttaaacttgacgaaggtgacgccgtcggccctcttacactaaggataaaatcttttgtcgaaacgataaaaacgcgacgcgcaaaaaaggccgtagagacggcgcgagctttagaagacccgtatccagtaaagtttacacgctcggattggaaaaacaaaacgttaattatcccgaatgtatccgtttccttctgtaaaatcattagcgccgcaatacgccgtcagggatttaaagtggaaccaatgcctcttggcggacgtgacgcgatacaacttggaaaaaaatatgttcacaacgatatttgcttcccggcgcaaatgaatataggcgagggactactgatgttggagagcggccggtacaagccggaagaagtggtattgggtcttgggaaatatccatccgactgcagactttcacaatacgcaagccttgcacgcagggcattggacgaggcgggctaccctcaggtttctataattaccactgataaattcgattcaaaaaatatgtatcccggatttaaactcgccacggcctttgaaatacgcatggtctggggcattattatcatggacattctggaagacctctaccgcaagatacgcccctacgaacttgttcccggctctactgagcgttgttttacgtccgcgatagacgcggtcgccgcaggtctttccacgaagggcgtgcgtggcgcggtacgggcttacaaaaaatctattaccgaaatgtgtacgattgcctacgacagaagcgtccgcaaaccgttggtatttattatgggtgagtacctgttaaattaccatcccggttccaatcactatgttgaggaatatttggaaaatcacaacatggaagttatccttcctcgtatgatcgaaattttttggcgtgaatatctgcggaaaatttcagaaatgcgggattttggagtacggtatccttttattgatgtcattacagcctatattggcaacggactttttgagtatgtcctgaacaaattggaaaaaacggcaatcaagcatcctctttacgaaccttccgcgcaactttcaaaaaaagcgactgcaactgatccaataatgcaccgcacttttacaagcgggggaaggctggctcattcccggagaaatctttcactacgcctcccaaggcgtaaaatctttcgtcctcctccaaccattcggctgtctgcccaatcatatcagcggacgcggagttataaaaaagataaaagaattgcaccccgacattcagattctgcctttggattttga

SEQ ID NO: 60368 - protein, 991 aa, Unknown
  Obtained from environmental sample
  misc_feature (1)..(991): Xaa is any amino acid
MKAINISNDIITNITVNEACSSGCGSFLETFAETLHIPVEKIAEAAFNAKNPARLGSRCTVFMNSTIITEQKNGKQADDIMAGLCRSIIENVFTKVVRISNTAQLGKKIVVQGGTFKNDAVLRALEQYLGRNVVRAPYPGEMGAVGIAILTKREIIEHGYTSPHGTSGHSRFIGFESLKDFNYTQHANLICPFCNNNCNRMLVRFSNGLTWVTGNRCERGEIVGTAEDSAVREKIKTITGRMQSVPDLMKMREELLFKEYPVTPLLPQCGTTFGLPRVLEFWNSMPFWTTFWRSLGFTTLISRKSSRSLYEQGLHFVSSDTVCFPAKLVHGHIRDLVEKKVDRIFMPLIIRMPPENTESLSDYVCAVVKGYPLVVQYSDDPQRRWNTPFDTPIFHWLTMKDRNRQICDFVRKSFNIPSVVTRKAIHQADVALSAFHGELISNARQIIAQVEKEGKFAVVLAGRPYHNDELVNHTLSGYFTRLGIPVLTLDCLPELNTTDLKYTRSEITNNFHARMLSGAICVARHPALEYVQIVSFGCGHDAILTDEIIRLMNVISGKTPLILKLDEGDAVGPLTLRIKSFVETIKTRRAKKAVETARALEDPYPVKFTRSDWKNKTLIIPNVSVSFCKIISAAIRRQGFKVEPMPLGGRDAIQLGKKYVHNDICFPAQMNIGEGLLMLESGRYKPEEVVLGLGKYPSDCRLSQYASLARRALDEAGYPQVSIITTDKFDSKNMYPGFKLATAFEIRMVWGIIIMDILEDLYRKIRPYELVPGSTERCFTSAIDAVAAGLSTKGVRGAVRAYKKSITEMCTIAYDRSVRKPLVFIMGEYLLNYHPGSNHYVEEYLENHNMEVILPRMIEIFWREYLRKISEMRDFGVRYPFIDVITAYIGNGLFEYVLNKLEKTAIKHPLYEPSAQLSKKATATDPIMHRTFTSGGRLAHSRRNLSLRLPRRKIFRPPPTIRLSAQSYQRTRSYKKDKRIAPRHSDSAFGF

SEQ ID NO: 60369 - DNA, 783 bp, Unknown
  Obtained from environmental sample
  misc_feature (1)..(783): n is a, c, g, or t
gtgcccaatgtgggcgtgttcgataccgaatttcaccagagcatgcccgaagccgcctatctctatcccctgccctacagcctgtatgaagaaatgcgcatccgccgctacggctaccacggcacttcgcaccgttatgtaacccacaaggcggctgaagccttgggcaagcatgtggatcatgtcaacctgatcacctgccatttgggcaacggctgttccatcaccgccgtgcaaaacggcaaaagcgtggacacctccatgggcgccacccccttggaaggcgtcatgatgggcacccgttgcggcgacatcgatccggccattgcgccctacctgatcacgtccaagggcatgaccgcctctgaagtggacgcgctcatgaacaagcagtccggcctcaagggcgtctgcggcctgaacgacatgcgcgacatccatgccgcctgcgccaccggcgacgccaaggctattcttgctctgaacatgttcatataccgcatcaagaaatacatcggcgcctactatgccattcttggccgggtggatgccctggtcttcacagccggcatcggcgaaaacgacggcatcacccgtgccggcatctgcgaaggcatgcagcacatgggcattgaactcgatcccgccgccaatgccacgcgttccagcacgatacgccggatcagcaaaccggtcgcggcgctgcccgtgctggtggtgccgaccaatgaagaactggccattgccgaagccactgcccggatcgtcagcaagaanaaataa

SEQ ID NO: 60370 - protein, 260 aa, Unknown
  Obtained from environmental sample
  DOMAIN (1)...(250): Acetokinase family
  misc_feature (1)..(260): Xaa is any amino acid
MPNVGVFDTEFHQSMPEAAYLYPLPYSLYEEMRIRRYGYHGTSHRYVTHKAAEALGKHVDHVNLITCHLGNGCSITAVQNGKSVDTSMGATPLEGVMMGTRCGDIDPAIAPYLITSKGMTASEVDALMNKQSGLKGVCGLNDMRDIHAACATGDAKAILALNMFIYRIKKYIGAYYAILGRVDALVFTAGIGENDGITRAGICEGMQHMGIELDPAANATRSSTIRRISKPVAALPVLVVPTNEELAIAEATARIVSKXK

SEQ ID NO: 60371 - DNA, 687 bp, Unknown
  Obtained from environmental sample
  misc_feature (1)..(687): n is a, c, g, or t
gtgagcttgctcgtttcaggcatagcgatcgaggtatgcaaaaagcgcataaaaaatatgcatctgtacgtcaaaccgccgcatggccgcgtgacggtatccgccccgctcgcaatgagcgatgcggccatacagcgttttgtacggacaaagctcggttggatcaaaaggcaaatgggcaagttcgacgcacagccgcgccagacggaacgggaatatgtatccggcgaaaccctgtatgtgtggggcaaacagttttttttgcaagttgagtacgcaaacaggtatgcgctcaccttgtccggcgaaaaagcgattttcgccgcgcccagggaaagcgtagccgcacagcgcgaaaacttcatgcgcgaatggtatcgggagcagttaaaaaccgagatgcggcgcctgcttcccaaatgggagcgccttacgggcttgcgctgcgcaagctggcaaacgaaatatatgaccacgcgctggggaacctgcaacacgacaagcggcaagatatggctgaacgtgcagcttgccaagaaacccctgcaatgccttgagtatgtccttctgcacgaactcgtccacctcgttgagaagcgtcacaatgaacgctttgttgcgctcatggacaagcacatgccgatgtggagagaaattaagtccacgctgaacggacaaattttatga

SEQ ID NO: 60372 - protein, 228 aa, Unknown
  Obtained from environmental sample
  DOMAIN (20)...(226): Protein of unknown function DUF45
  misc_feature (1)..(228): Xaa is any amino acid
MSLLVSGIAIEVCKKRIKNMHLYVKPPHGRVTVSAPLAMSDAAIQRFVRTKLGWIKRQMGKFDAQPRQTEREYVSGETLYVWGKQFFLQVEYANRYALTLSGEKAIFAAPRESVAAQRENFMREWYREQLKTEMRRLLPKWERLTGLRCASWQTKYMTTRWGTCNTTSGKIWLNVQLAKKPLQCLEYVLLHELVHLVEKRHNERFVALMDKHMPMWREIKSTLNGQIL

SEQ ID NO: 60373 - DNA, 528 bp, Unknown
  Obtained from environmental sample
  misc_feature (1)..(528): n is a, c, g, or t
atgttggtatcttatgaaacagcgtcacaattaatcgaaagcgggcggctgctccatattgcggggacggaggccctgcttaaaaaacttcccaaagggaaatggatcggcggttccacggagtatttcatggcaaaggaaggcggcaaagtttccggcgatttattgtttgtaacggatttttccaaaacgaagtccgtctatgaaaaatttaagattcaatcctatgacgagaaaaatatctgcaaagtgtcatccgacgcttatgaaaacggcttttcaatcctgattttgccttttgacagcgcggtacatacggaatacgcgcaaaacgccgccagttatgaaaatatgtttatacgtcacattgcgggatggatctcgggccttaaccctgggcaaacagggacaaacgcctgttgccggtcatgggtctacaggggaatcattttcccgacaaggcggtcgcgcttcattttgcaactaaagaagacaaaaccgtttcagtcacattatcaatatctttga

SEQ ID NO: 60374 - protein, 175 aa, Unknown
  Obtained from environmental sample
  misc_feature (1)..(175): Xaa is any amino acid
MLVSYETASQLIESGRLLHIAGTEALLKKLPKGKWIGGSTEYFMAKEGGKVSGDLLFVTDFSKTKSVYEKFKIQSYDEKNICKVSSDAYENGFSILILPFDSAVHTEYAQNAASYENMFIRHIAGWISGLNPGQTGTNACCRSWVYRGIIFPTRRSRFILQLKKTKPFQSHYQYL

SEQ ID NO: 60375 - DNA, 1119 bp, Unknown
  Obtained from environmental sample
  misc_feature (1)..(1119): n is a, c, g, or t
atgctttggatagatgtgcctgttcttaatgacgatcataaatctgtcggaatagtgggaaccggtctggatttgtctgatttcatcaatgccataaatcataaaaatgagaggatagaagatgaattgtatttctttaatataaccggagaattaatcaaagcaaaagatattgatcttgttgaaaagaaagcgagcataaccgatgttttaggtaaaacaggcgatgaaattcttgccagaacgaaagaactaaaaatcgatgaaattgaatatttcaagtcaaaaaccaaaaggcaaataatcgcaattacatcaattccggttagttcagttccggctttgagctggtatataaccgccgttcgccatgttaccattacagatttcctgcatacgggtatgactgttctcttcggtataatgatggcggttattctgtttgtctttgtattctttaatatatttatcgcgataatgctggagccgctcaaccaaatggtaagaacaataaatcaaacgttttccgactgggatatgaagccccagaagagtgatcatcataaggatgaaatcggaacattaggtgcttttttacacttgaccataatcgatccgcttaccggtatttacaacaggcggtatctggacggcagcttaaaaaagataataaattcccattctcgtaccggcagtaatttaagcgtattaatgatagacattgattatttcaaaaaatacaacgacgcttacggtcatgaggcgggagatggctgccttaaatcggtagcgtcggctctttctcaaagcgtatcaagagacgaagattttgttgcaagatacggcggagaggaatttgccgttgttttgccgagtaccgatgaaaatggcacgcgcctggtcgcggaaagaatgttggaaaaaatacgtgaatgtaatatacctcacaaagcaagcgatatagccggttatgttactatctccattggcggaacaaccggtatcattaatcatttgcaacatggaagcgattatatcaaagccgccgataaagcgttatatgaatccaaaaagaatggccgcaacaagtacacatttttaaaaaataatgatgaataa

SEQ ID NO: 60376 - protein, 372 aa, Unknown
  Obtained from environmental sample
  DOMAIN (198)...(363): GGDEF domain
  misc_feature (1)..(372): Xaa is any amino acid
MLWIDVPVLNDDHKSVGIVGTGLDLSDFINAINHKNERIEDELYFFNITGELIKAKDIDLVEKKASITDVLGKTGDEILARTKELKIDEIEYFKSKTKRQIIAITSIPVSSVPALSWYITAVRHVTITDFLHTGMTVLFGIMMAVILFVFVFFNIFIAIMLEPLNQMVRTINQTFSDWDMKPQKSDHHKDEIGTLGAFLHLTIIDPLTGIYNRRYLDGSLKKIINSHSRTGSNLSVLMIDIDYFKKYNDAYGHEAGDGCLKSVASALSQSVSRDEDFVARYGGEEFAVVLPSTDENGTRLVAERMLEKIRECNIPHKASDIAGYVTISIGGTTGIINHLQHGSDYIKAADKALYESKKNGRNKYTFLKNNDE

SEQ ID NO: 60377 - DNA, 696 bp, Unknown
  Obtained from environmental sample
  misc_feature (1)..(696): n is a, c, g, or t
gtgcgtcctttcgactttatccgccgtacagacccggcgcaccttttgaactttattcaacaggagcacccgcagacaatcgcgctaattctggcttaccttgaacctaacaaggcttctattattcttcaaaatctgccgcacgaagtacaaagcgacgttgcgcggcgtatcgccacaatggacagaacaagcccggaagtattgcgcgaagttgagcgcgttcttgaaaagaaactttcttcgctgtccagcgaagactacactgcggcgggcggcgtagaaagcatcgtcgaaatccttaaccttgttgaccgcgcctctgaaaagcagattatcgaggctcttgaagacgaagaccccgagcttgccgaagagatcaagaaaagaatgttcgtgttcgaagacattgttatgctcgacgaccgcgccattcagaaagttatgcgcgaagtggactcgcaggaactcgcgaaagcgctcaaatccgtcgattcggaagtacaggacaagattttcaagaatatgtccaaacgcgccgcaagtatgctcaaagaagacatggagtatatggggccggtacgtttgaaagacgtagaagaatcgcagcagaagattgtatccattatccgccacttggaggatacgggcgaaatagttgttgcgcgcgccggagaggacgaattagtagtttag

SEQ ID NO: 60378 - protein, 231 aa, Unknown
  Obtained from environmental sample
  DOMAIN (113)...(222): FliG C-terminal domain
  misc_feature (1)..(231): Xaa is any amino acid
MRPFDFIRRTDPAHLLNFIQQEHPQTIALILAYLEPNKASIILQNLPHEVQSDVARRIATMDRTSPEVLREVERVLEKKLSSLSSEDYTAAGGVESIVEILNLVDRASEKQIIEALEDEDPELAEEIKKRMFVFEDIVMLDDRAIQKVMREVDSQELAKALKSVDSEVQDKIFKNMSKRAASMLKEDMEYMGPVRLKDVEESQQKIVSIIRHLEDTGEIVVARAGEDELVV

SEQ ID NO: 60379 - DNA, 1458 bp, Unknown
  Obtained from environmental sample
  misc_feature (1)..(1458): n is a, c, g, or t
atggaagcgatgaaaaggactgccgattgcggggctttgcggaaaggcgacaacggcaagacggtcatacttaacggatgggtgcaccgcaagcggaatcacggcggtattttttttattaacctgcgtgaccgttacggggttacgcaagttacggttgatacagaaggaaagcaggaacttgccggtatttgcgacgaactgcgaaatgagtatgtgatagcggtggaagggcaggtgagccttcgcccagacggaatggttaaccccggcatggaaacgggtgaaattgaggttaccgcctccaaactggtgatactgaacaaggctgaagttttgccgtttcaaattgacgaggaaagcaaggcaagcgaggaaacgcggcttaaataccgctatcttgaccttcgctcctctgctatgcagaaatcaataaaaatgaggagtgagacaactttcgccgtacgcgaatggatgacatctaacggtttttatgaaattgaaactcccacttttattaaatcgacaccggagggggcgagggactaccttgttccgtcaaggctttatcccggcaaattttacgcgctcccccagtcgccgcagctttacaaacaaatcctgatggtagcgggttttgacaaatactttcagattgcccgctgttaccgcgacgaagactcccgaggagacagacagcctgagtttacccagattgacattgagatgtcatttgtaagcagggatgacgttctttcagttacagagggattgatgtgccatgtattcaaaaaagttttaggaaagaacataccgcaaaagtttacaagacttacatgggaagaggcgatggaattttacggcagcgacaagccggatatacgctttgacatgaagctcatggatttcagcccgtttgttgagcaatgcaggtttcaggcgtttaaggacgccctttccgccggcggagctgtaaaagcgcttgtggtaaaaggcgcgtccaatttctcgcgcaaacaaattgacgagttggaaagccacgcgaagatttacaaagcgcggggccttgcttggatgaaagtcgccgcaggcggcgcttttgaaggcggcgtttcaaagtttttcgcggataacgccgtaaaaataacaggcgctcttggagcgaaagatggcgaccttatccttattgtcgccgacgcgaaaaggagcgtcgcaaacaccgcgctcggagcggtgcgttctaaactaggccgcgacttgaacctttacgctcccgacagctttgaattcgcgtggatagtggactttcccatgtttgaatatgacgaggaaaataaaaaatgggaggcggctcaccatttgttcacatggcctcaggacaaataccactcaacaatggaaaccgatcccggctccgttaaaggcgacctttacgaccttgttttaaacgggttatga

SEQ ID NO: 60380 - protein, 485 aa, Unknown
  Obtained from environmental sample
  DOMAIN (22)...(107): OB-fold nucleic acid binding domain
  misc_feature (1)..(485): Xaa is any amino acid
MEAMKRTADCGALRKGDNGKTVILNGWVHRKRNHGGIFFINLRDRYGVTQVTVDTEGKQELAGICDELRNEYVIAVEGQVSLRPDGMVNPGMETGEIEVTASKLVILNKAEVLPFQIDEESKASEETRLKYRYLDLRSSAMQKSIKMRSETTFAVREWMTSNGFYEIETPTFIKSTPEGARDYLVPSRLYPGKFYALPQSPQLYKQILMVAGFDKYFQIARCYRDEDSRGDRQPEFTQIDIEMSFVSRDDVLSVTEGLMCHVFKKVLGKNIPQKFTRLTWEEAMEFYGSDKPDIRFDMKLMDFSPFVEQCRFQAFKDALSAGGAVKALVVKGASNFSRKQIDELESHAKIYKARGLAWMKVAAGGAFEGGVSKFFADNAVKITGALGAKDGDLILIVADAKRSVANTALGAVRSKLGRDLNLYAPDSFEFAWIVDFPMFEYDEENKKWEAAHHLFTWPQDKYHSTMETDPGSVKGDLYDLVLNGL

SEQ ID NO: 60381 - DNA, 1521 bp, Unknown
  Obtained from environmental sample
  misc_feature (1)..(1521): n is a, c, g, or t
gtggaagccgcaatttttgaaaaatatcttgaatccacgcagcgtacagatccgataaaatgtaccggtaaaataattaatgttaaaggtttattgatagaaagccacgggcctcaggccattatcggggagatttgcagaattatcgccccgcgcggcaaaggtcagataagagccgaagtcgtagggcttaaagacgaaatagtacagcttatggcgtttgaggaaacggacgggctggaggtaggagacagggttatcgctctcggaagccgccttgaagtgcccgtatcaaataaacttttgggcagggtgctggacgcgtttggaagccccgtcgacggcaagggcgatattgacgccattgccatgtatccggctcttgcaagccctcctgatccgttaaaacgaaaacggataacggaacgcataacaacgggagtgcgcgccatagacggactccttgcggtaggcaagggacagcgcctcggcattttttcaggttcaggcatcggaaaatcgacgcttctgggcatgattgcgcgtaacacaagcgccgatgttaacgttgtcgccctgataggcgaacgcggcagggaagtaaacgactttatcgaaaacgatctgggaccggcgggtcttgcgcgaagcgtattaatcgtaaccccttccaattcgccgcctcttatgcgttttcgcggggcttatgtcgccacggcggtcgccgaatatttccgcgatcagggaaaagacgtaatgctgatgttcgattccgttacgcgctttgcccgcgccatgagggagatagggcttgcttccggggaacctccggcgcaaaggggctttccccccagcatgtttgactccatgccgaaacttcttgaaagatcgggcacttccgacaagggcagtatcactggattttatacggtacttgtagacggagacgacatggacgaacctgtcgcggataccgcccgcggtattttggacgggcatattgttctttcaagggatttagctcaggcttatcattacccgcctattgacgtactgcagagcatttcccgtcttgcgtcctcggtatcgggaacagagagtaaaagagcggcgggcgttatacgcagaaatatggcgtcttacgctaacgcggaagaccttatcaatgtgggcgcgtaccgtaacggctccaaccctgcgatagacgaagctatagccaagcacggcccgatagaggaatttcttgtgcaggcggttgatgaaccttccccgcttgaagatacccttagagcaatgtcggaaataacaggaattcaaatacctcccgaagaaatgacggacaagaacgcgaaactttttgcaggcggcagttcctctcaagttaaaaaagaaaaacaacaaccgctaaatacgacttccgcgcaggataccgcaaaagctcttaacagcgtagccgcccttttctcctcaatgccgggtatggacagtttgggaattactcgtgaaaaaattttcttttag

SEQ ID NO: 60382 - protein, 506 aa, Unknown
  Obtained from environmental sample
  DOMAIN (25)...(90): ATP synthase alpha/beta family, beta-barrel domain
  misc_feature (1)..(506): Xaa is any amino acid
MEAAIFEKYLESTQRTDPIKCTGKIINVKGLLIESHGPQAIIGEICRIIAPRGKGQIRAEVVGLKDEIVQLMAFEETDGLEVGDRVIALGSRLEVPVSNKLLGRVLDAFGSPVDGKGDIDAIAMYPALASPPDPLKRKRITERITTGVRAIDGLLAVGKGQRLGIFSGSGIGKSTLLGMIARNTSADVNVVALIGERGREVNDFIENDLGPAGLARSVLIVTPSNSPPLMRFRGAYVATAVAEYFRDQGKDVMLMFDSVTRFARAMREIGLASGEPPAQRGFPPSMFDSMPKLLERSGTSDKGSITGFYTVLVDGDDMDEPVADTARGILDGHIVLSRDLAQAYHYPPIDVLQSISRLASSVSGTESKRAAGVIRRNMASYANAEDLINVGAYRNGSNPAIDEAIAKHGPIEEFLVQAVDEPSPLEDTLRAMSEITGIQIPPEEMTDKNAKLFAGGSSSQVKKEKQQPLNTTSAQDTAKALNSVAALFSSMPGMDSLGITREKIFF

SEQ ID NO: 60383 - DNA, 510 bp, Unknown
  Obtained from environmental sample
  misc_feature (1)..(510): n is a, c, g, or t
ttggaaggggttacgattaatacgcttcgcgcaagacccgccggtcccagatcgttttcgataaagtcgtttacttccctgccgcgttcgcctatcagggcgacaacgttaacatcggcgcttgtgttacgcgcaatcatgcccagaagcgtcgattttccgatgcctgaacctgaaaaaatgccgaggcgctgtcccttgcctaccgcaaggagtccgtctatggcgcgcactcccgttgttatgcgttccgttatccgttttcgttttaacggatcaggagggcttgcaagagccggatacatggcaatggcgtcaatatcgcccttgccgtcgacggggcttccaaacgcgtccagcaccctgcccaaaagtttatttgatacgggcacttcaaggcggcttccgagagcgataaccctgtctcctacctccagcccgtccgtttcctcaaacgccataagctgtactatttcgtctttaagccctacgacttcggctcttatctga

SEQ ID NO: 60384 - protein, 169 aa, Unknown
  Obtained from environmental sample
  misc_feature (1)..(169): Xaa is any amino acid
MEGVTINTLRARPAGPRSFSIKSFTSLPRSPIRATTLTSALVLRAIMPRSVDFPMPEPEKMPRRCPLPTARSPSMARTPVVMRSVIRFRFNGSGGLARAGYMAMASISPLPSTGLPNASSTLPKSLFDTGTSRRLPRAITLSPTSSPSVSSNAISCTISSLSPTTSALI

SEQ ID NO: 60385 - DNA, 1131 bp, Unknown
  Obtained from environmental sample
  misc_feature (1)..(1131): n is a, c, g, or t
ttgaaacatttcaccgttgatccgcccaacgactcaatcccgccgtccgggccctacacgttgcgcttcacccccgaccttgtgattttcggcctgggcgtgagcacatacagcggcgcctcgggccaagctctcgccgcgttcagcgacatcatgggcgaccaccgcgtcaccgtcgccggcgacttgcaggtggacatagacgattacgcccaaatattcgcctcctacgagtacctaaaacgccgcgtcaatatgatggccggcgtcttttactacaagtattacagctacgacggactcttcaaccgctacttccacgacctggagacgggcggcatactagggctcagctacccgttctctatgttctcgcgcgccgacctgggactctcaggccgttacatcaggcgcgaatcgctatcgggcgacacggcggttgagtggaacgcggtctcggcgaacctcggctattcgttcgacaacatactctgggggataaccggcccgctcaccggcttacgcgcctccgtgtccgcgcagatcgctccgccgctgccgttcacagacgaggcatacctatcaggcgatatagacatacgccattacacccacatattcaggcgctacgtttgggccaaccgcattgttatgggcgcgagcgcagacttaggcggcaacgaccgagcggcgagaaggtactttctgggcggcaacgaaaactggttcaactacggcgtcaacgtcgaaaactacaacaacaacatcggctacagctactactcaagcatcgtatccccgctgcgcggctggaactacttcgacctggccggcgaccgcgtactcctgatgaactcggagttccgcttcccgttcatccgagaggtgacgacggtatggccgatccccatgcagatccgatacataaacggcgcgctgttcatggacgccggatacgcgtggaccggcagcgacgaggcgctccccccgaagatagctagcggatacggcttcggtatgcgggccaacttgggaatttttgttttgcgatatgaccgcggctggccgacggacttcagagggctttcacgcgggcctattaattacttctcgctgggagcggagttctaa

SEQ ID NO: 60386 - protein, 376 aa, Unknown
  Obtained from environmental sample
  DOMAIN (72)...(376): Surface antigen
  misc_feature (1)..(376): Xaa is any amino acid
MKHFTVDPPNDSIPPSGPYTLRFTPDLVIFGLGVSTYSGASGQALAAFSDIMGDHRVTVAGDLQVDIDDYAQIFASYEYLKRRVNMMAGVFYYKYYSYDGLFNRYFHDLETGGILGLSYPFSMFSRADLGLSGRYIRRESLSGDTAVEWNAVSANLGYSFDNILWGITGPLTGLRASVSAQIAPPLPFTDEAYLSGDIDIRHYTHIFRRYVWANRIVMGASADLGGNDRAARRYFLGGNENWFNYGVNVENYNNNIGYSYYSSIVSPLRGWNYFDLAGDRVLLMNSEFRFPFIREVTTVWPIPMQIRYINGALFMDAGYAWTGSDEALPPKIASGYGFGMRANLGIFVLRYDRGWPTDFRGLSRGPINYFSLGAEF

SEQ ID NO: 60387 - DNA, 969 bp, Unknown
  Obtained from environmental sample
  misc_feature (1)..(969): n is a, c, g, or t
ttgatgtttaaaacccacatcggtcccgccgaggacacggccagtatcatttaccttcgtcccgaaaccgcccagggtatatacgtcaattataaaaatattattcagtccaacagaatgaaaatccctttcggcatcgcgcagattggtaaggcgttccgcaacgaaattgttaccaagaactttattttccgcacctgcgaattcgagcagatggaaatgcagtactttgtaaaaccggggacggacgaggaatggttttccgaatggcgaaaacagcgttgggcttattacgaaaaactcggcgttaaaatggatcacctgcgctggcatcagcacgggccggatgagcttgcgcattacgcgaaagatgcttacgatattgagtacctgttcccgatgggttggcgcgagcttgaaggcgttcacaacagaaccgattacgatcttgggcggcacacccagttctccggcaaggatttacagtacatcgatcaggacaacaacaacgagcgctacataccctacattatcgaaacttccgcagggcttacccgcaacctgttgatggttttctgcgacgcttacgacgaagaaaaagtcgcggacaaaggcaacgaagacgactggagaaccgtcctgcgcttccaccccgatctcgcaccgattaccgtcgccattcttccgctgatgaaaaaagacgggcttgctgaactcgcgcaggacattcgcgcggaactgaaagaagactacgcaactgattacgaccaggcgggcgcaattggccgccgttaccgcaggcaggatgaagcgggtactcccttctgcattactgttgattatcagtccaaagaagacggtactgttactctgcgcttccgtgattctatggagcagattcgtgtgccccgcgcggaacttgcatctcgtcttcgtcaggagataaaaacgtataaacggatcaagtga

SEQ ID NO: 60388 - protein, 322 aa, Unknown
  Obtained from environmental sample
  DOMAIN (1)...(135): tRNA synthetase class II core domain (G, H, P, S and T)
  misc_feature (1)..(322): Xaa is any amino acid
MMFKTHIGPAEDTASIIYLRPETAQGIYVNYKNIIQSNRMKIPFGIAQIGKAFRNEIVTKNFIFRTCEFEQMEMQYFVKPGTDEEWFSEWRKQRWAYYEKLGVKMDHLRWHQHGPDELAHYAKDAYDIEYLFPMGWRELEGVHNRTDYDLGRHTQFSGKDLQYIDQDNNNERYIPYIIETSAGLTRNLLMVFCDAYDEEKVADKGNEDDWRTVLRFHPDLAPITVAILPLMKKDGLAELAQDIRAELKEDYATDYDQAGAIGRRYRRQDEAGTPFCITVDYQSKEDGTVTLRFRDSMEQIRVPRAELASRLRQEIKTYKRIK

SEQ ID NO: 60389 - DNA, 951 bp, Unknown
  Obtained from environmental sample
  misc_feature (1)..(951): n is a, c, g, or t
atgccgtttttgactgtttgtcttaatcctactttacaaaaaactctgagttactcttcaataacacctggaaccgttaaccgtaccgaggcgcattatcttgatgcaagcggtaagggaatcaatgtaacgcgcgttttaacgcaactcggtaaaagcgcggtgcatcttacccagcttggcggcgaattgcggcctctgtttttatcgctttgcaaaaaggacgggctttccgtggaatgggcggaaagccaaagtcgaatccgtttttgttatacgatactcaccggctctgacggcagcgcgataaacagcggcgttgaaaacaaagttacagaacttattgaagaatcagaacctgtcgccgccggtactgaacaacggctgctggaaaaattcggcgctctgttgaacagccggaatttttcttgtctgattgtttcaggcacaaaggcagccggattttcggattacgtgattccttctatagtacaaaaagcaaaagaaaaagggctaaaaataattcttgatataaaaggtaaggatttgacggaaagcctgcagtacggccctgatataataaagccgaatctgcttgaatttaccggaacttttatgccggaactgattgaagataatagtttctatgaatctgaaactgcgatgacacaaataaaatccataatgctggaattgtgcaaaaaatacggctgccgtatcatcctgacaaatggcagccggaaaatcatcgccgcagacagtaaaactttttttgatttacaaactaatccggtaaaagcggtaaatactacaggctgcggagatacatttaccgcaggacttgcttccgctattgaaaacggagccggcttccgcgaagcgattgacgaaggatgcagatgcggcgcgctgaacgccgctcttgtcagaccgggagttataagcaattaa

SEQ ID NO: 60390 - protein, 316 aa, Unknown
  Obtained from environmental sample
  DOMAIN (6)...(316): pfkB family carbohydrate kinase
  misc_feature (1)..(316): Xaa is any amino acid
MPFLTVCLNPTLQKTLSYSSITPGTVNRTEAHYLDASGKGINVTRVLTQLGKSAVHLTQLGGELRPLFLSLCKKDGLSVEWAESQSRIRFCYTILTGSDGSAINSGVENKVTELIEESEPVAAGTEQRLLEKFGALLNSRNFSCLIVSGTKAAGFSDYVIPSIVQKAKEKGLKIILDIKGKDLTESLQYGPDIIKPNLLEFTGTFMPELIEDNSFYESETAMTQIKSIMLELCKKYGCRIILTNGSRKIIAADSKTFFDLQTNPVKAVNTTGCGDTFTAGLASAIENGAGFREAIDEGCRCGALNAALVRPGVISN

SEQ ID NO: 60391 - DNA, 411 bp, Unknown
  Obtained from environmental sample
  misc_feature (1)..(411): n is a, c, g, or t
gtgccttggaatgtccaacggcgtgcttgccgaaggggaggtttgcgcttccaccacgaaccgcaatttctacgggcgcatgggcaagggcggcatggttcaccttgtcagtcccgcggtcgcggcggcatccgcaatagcgggcacgattatagcgggggggcagtgatgaagatattcggcggagaagttttatttcttgatcgcaatgatattaacaccgatgaaattatcccggctaagtatttaaccgaggacacaagaatagcgttaaagccccatcttctggaagatctaaaaataaaaggctttgaccctttaagagatattagcgggaagggggccgtgctgactcgggcaacttcggctgcggctcttcgcgcgaacacgctccctgggcgcttgaggtaa

SEQ ID NO: 60392 - protein, 136 aa, Unknown
  Obtained from environmental sample
  misc_feature (1)..(136): Xaa is any amino acid
MPWNVQRRACRRGGLRFHHEPQFLRAHGQGRHGSPCQSRGRGGIRNSGHDYSGGAVMKIFGGEVLFLDRNDINTDEIIPAKYLTEDTRIALKPHLLEDLKIKGFDPLRDISGKGAVLTRATSAAALRANTLPGRLR

SEQ ID NO: 60393 - DNA, 1530 bp, Unknown
  Obtained from environmental sample
  misc_feature (1)..(1530): n is a, c, g, or t
atggcagaaaaacggataataaaagtttttgacacaacactcagggacggagagcaggcgcccggctgcagtatgaatatggccgaaaagcttgaggtggcgaagcggctggagaaactcggggtagatgtaatcgaggcgggtttcccgatatcaagcccgggcgatcttgagtcggtcagggccattgccggaatcattaaaaactgctccgtggccggactttgcagaagccgcgagggcgacatagacgcggcgaaagaagcgcttgcaaaagcggcaagcccgcgggttcatatattcctggcgacatcgcccgtacacatggaatacaaactcaagatgacgccggagcaggtgctggaacaggcggtttcctcggtaaagtacgcgaagaaattctgcaatgatattgagttttccgctgaagacgcgttccgaagcgatcccgattttgtctgcaaggttttcggcgcggtaatcgaggcgggggcgttaactgtaaatttccccgacaccgtaggttacgcgatgcccgccgaattcggcgagcgcgtccgctatataaaagaacacactccgcatatggataaggcttgtctgtccgtgcattgccacaacgaccttgggctggcggtggcgaacagtatagccgccatcgcgaacggcgcggatcaggttgagtgtacgattaacggaataggagaacgcgccggaaacgcgtctctggaagaagtggtaatgggcctgcgcgtacgccatgactttttttcagccgacacaagaatagacagtacgcagatatacgcggcgagccgccttgtgtcccaggtaaccggggtgaaggttcagccgaacaaggccattgtgggcgacaacgcgttcgcgcatgaggcgggaatacaccagcacggagttttggcgaagagggaaacctacgagattatgactccgcagtcaataggcattccgcaaaaccgcatggttctcggcaaacattcaggccgtcacgcttttgaggaacgccttaaagaccttggtttgagcattgacgctgaggcgtttgaaaaaatattcgccgactttaaggaccttgccgacaaaaagaaagtggtcagcgaccgcgacatgaaagcgctggtaatggacagggctatctctgttcctgaaacatggaaactggatcactgggcagtgaacacaggctcggctttgggcgcggcgggtgttatccgcctacagcacaaggacggcaggtttgaaaaactggtgtgcctgggcgacggccccatagactcaatttttaaagcgattaatcaaattataggcaaagaacctgaacttgagctttatgaaatcggcgctattacaggcggttcttcttcgcagggcgagacaatggtaaaaatcacgatggacggcaggcgatggaacgggcgcggcgtctcaaccgacgtaattgaatcttcgataatggcttacctttcggcgattaacgctatggaatgggatctggcgcagaaggaataa

SEQ ID NO: 60394 - protein, 509 aa, Unknown
  Obtained from environmental sample
  DOMAIN (371)...(502): LeuA allosteric (dimerisation) domain
  misc_feature (1)..(509): Xaa is any amino acid
MAEKRIIKVFDTTLRDGEQAPGCSMNMAEKLEVAKRLEKLGVDVIEAGFPISSPGDLESVRAIAGIIKNCSVAGLCRSREGDIDAAKEALAKAASPRVHIFLATSPVHMEYKLKMTPEQVLEQAVSSVKYAKKFCNDIEFSAEDAFRSDPDFVCKVFGAVIEAGALTVNFPDTVGYAMPAEFGERVRYIKEHTPHMDKACLSVHCHNDLGLAVANSIAAIANGADQVECTINGIGERAGNASLEEVVMGLRVRHDFFSADTRIDSTQIYAASRLVSQVTGVKVQPNKAIVGDNAFAHEAGIHQHGVLAKRETYEIMTPQSIGIPQNRMVLGKHSGRHAFEERLKDLGLSIDAEAFEKIFADFKDLADKKKVVSDRDMKALVMDRAISVPETWKLDHWAVNTGSALGAAGVIRLQHKDGRFEKLVCLGDGPIDSIFKAINQIIGKEPELELYEIGAITGGSSSQGETMVKITMDGRRWNGRGVSTDVIESSIMAYLSAINAMEWDLAQKE

SEQ ID NO: 60395 - DNA, 2223 bp, Unknown
  Obtained from environmental sample
  misc_feature (1)..(2223): n is a, c, g, or t
gtgcgtttacaggctggtggtttaatggaatttttgaggcggcttgaaaaagagcgtttgttctttgacggcgcgacaggaactatgcttcaggacgaacttgcgccgggagaatcccccgtattcttaaacataaaaaaacccgaaagcgtgttaaatgtgcataaagcgtatgtaaaagcaggctgtaatatcataaaaacaaatacattcggcgcgaaccgcctggctctttccggctcaggcttttcggtggatcaggtagtgcaggcggcggtaacgcttgcgaaaaaagcggcggacggcaaggaagtttttgttgcgctggatataggtcctacaggcaggctgcttgccccctttggggatttggattttgaagaagctgtggatattttttcggaaatggtaaaagcgggaatgcaggccggggccgaccttattctgcttgaaaccatgacagacacttatgaaataaaagccgcaatgcttgcggcaaaggaaaattgtgatcttccgctccttgtaacctttaccacggataactcaggcaggctcttaaacggcgcggatgttcaaacggcggtatgccttgttgaaagtcttggagcctgcgctctgggtttaaactgcggtttcggacccgcgcaatttaaatccctgctgcctgaattggcgcgacatacaagtattcctgtcattgtaaaccccaacgccggaattccagatagaataaacggaaaaatccgttatgacttacagcccgaaggatttgcgtcgcaaatggctgaaattgcgcatgacgcgcggcttgtcggcggctgctgcggcactaccccggagcatattgccgcggctgtgcgcgcctgcaaagatatcgcgcttcccgccgtttcgcaaaaacatgaaacagttgtctgctcttacggggaaacaaccgttttcggcgagaaaatcgtcattataggggagaggcttaaccctacaggcaagccgcgcatgaagaaggcccttattgacggcgacatgaactttttataccgcgaaggtctccaacagattgaacacggcgcgcgtatactcgatgtaaacgtaggacttccggaaattgacgaagaggcgtttttagcaaaatttgtttgcggcttgcagagcgtgaccaaaaccgcgcttcaaattgataccgctaacgcaaaggccgccgaacgggccttaaggatttacaacggcaaaccgcttctaaattcggtaagcggcaaaaaggaatcccttgaaacaatacttccacttgtaaaaaaatacggtgcggcggttgtcgcgctttgccttgacgacaacggtatacccgataccgtacaaggacggataatgatcgccgaaaaaattatcgccgccgccgccgcgcacggtatctccaaaaaggacataatcatagacgcgcttactctgacaataagcacaggcgcggacaacgcgggcgttacgcttgataccgttgaatacatcaggcgcaaaatagggatgcatacggttctgggcgtttccaatgtttcgttcgggcttcccggcaaagagataattaacgcggtgtttttttcccttgccatgaaggcggggttaagcgcgggaattgttaatcctttgaataaagcgataatggacgcggtatatgtgtatcaggcgataagcggcgaggacgcgaattgcgcgaattatatcgcccgtttttcaagcatggacaaggcggcggcgaattcggccgcgccggcaaaaaacaccgggcaggaagtgagtctgcataacgcggttgtgcgcgggctaagggaacaagccgcaaaaaccgcagacaggatgagcgataatatgccatccatggaaattgtcaatgagcatataattcccgctctggacaaggtcggcaaggattttgaaagccaaaagctctttttaccccagctattaatgagcgccgaagccgcaaaaacggcgtttgaggccgtcgcggcaaagatgacaaaacacggctccgtccggaaacaatatggaaaaatcctgcttgcgactgtcaaaggcgacgtgcacgatataggcaaaaatatcgtaaaaatactgctggaaaactataattttgaggtaatcgacttgggaaagaatgtggagcccgcccttatacggaaacttctaaaagaaaaaatactcggccgctcggccaatctgtcatga

SEQ ID NO: 60396 - protein, 740 aa, Unknown
  Obtained from environmental sample
  DOMAIN (591)...(677): B12 binding domain
  misc_feature (1)..(740): Xaa is any amino acid
MRLQAGGLMEFLRRLEKERLFFDGATGTMLQDELAPGESPVFLNIKKPESVLNVHKAYVKAGCNIIKTNTFGANRLALSGSGFSVDQVVQAAVTLAKKAADGKEVFVALDIGPTGRLLAPFGDLDFEEAVDIFSEMVKAGMQAGADLILLETMTDTYEIKAAMLAAKENCDLPLLVTFTTDNSGRLLNGADVQTAVCLVESLGACALGLNCGFGPAQFKSLLPELARHTSIPVIVNPNAGIPDRINGKIRYDLQPEGFASQMAEIAHDARLVGGCCGTTPEHIAAAVRACKDIALPAVSQKHETVVCSYGETTVFGEKIVIIGERLNPTGKPRMKKALIDGDMNFLYREGLQQIEHGARILDVNVGLPEIDEEAFLAKFVCGLQSVTKTALQIDTANAKAAERALRIYNGKPLLNSVSGKKESLETILPLVKKYGAAVVALCLDDNGIPDTVQGRIMIAEKIIAAAAAHGISKKDIIIDALTLTISTGADNAGVTLDTVEYIRRKIGMHTVLGVSNVSFGLPGKEIINAVFFSLAMKAGLSAGIVNPLNKAIMDAVYVYQAISGEDANCANYIARFSSMDKAAANSAAPAKNTGQEVSLHNAVVRGLREQAAKTADRMSDNMPSMEIVNEHIIPALDKVGKDFESQKLFLPQLLMSAEAAKTAFEAVAAKMTKHGSVRKQYGKILLATVKGDVHDIGKNIVKILLENYNFEVIDLGKNVEPALIRKLLKEKILGRSANLS

SEQ ID NO: 60397 - DNA, 1161 bp, Unknown
  Obtained from environmental sample
  misc_feature (1)..(1161): n is a, c, g, or t
gtgaaaatgaaatttacaattgctgtaatacccggagacgggatcgggcctgaggtgatagcgccagctctcaaagttcttgacgctgttggtgataaatacagtcacatattcaactacgtcgagctcttggcgggcggacaggctattgataaaactggcgagccgcttccaaaagaaactcttgaaaccgcgaaacagtgcgatgcgcttctcctgggcgcggtcggcgggcccaaatgggattcgcttcccggccatctgcggcccgaaagggcgctgttgggccttcgcgcggggcttggcgttttcgctaacctccgtcctgcggctctgcttcctcaattgaaatccgcctgccccgttaaggacgaggtgcttatcgcaagcaacagcgaaggaaaagccgctttcgatttattgattgtaagggaattgacgggcgggctttacttcggtaagcgcggacgaattgacgaaccttcaaacggacacactcccggttccgcctttgataccgaaacatattcatggatggaaattgagcgcgtactccgcgcgggctacgaagcggcgaaagtgcggcgtaaaaaactctgcgtggtggacaaggcaaatgttcttgagtcgtcacgtttctggcgggaagtcgccgcggttgtctcgaaggattatcccgacatagagacaagttatctatatgttgacaacgccgccatgcagttgatccgcgctccggggcaattcgacgttatcgtaacgtcaaatctttttggagacattctttccgacgaggcctccgtgcttacaggttcaatcggaatgttagcctcggcaagcctcggcgctcctgtgcagggcggaacaagacccggaatgtatgagcctattcacggctccgcccccgacatcgcgggaaaggacattgccaatccacttgcgacaattctttctgcggctatgatgcttcgctactccttcggtcttgaaaaggaagcagtggctattgaaaccgctgttaacaatgtgctggatcagggattgagaacaggagacatagcaagcagaagcggagcggcaagcatcgcagcaagcggcgaaaaaattgtgggtactaaagcgatgggcgaagcggtactcaaagcattggagaaattatga

SEQ ID NO: 60398 - protein, 386 aa, Unknown
  Obtained from environmental sample
  DOMAIN (6)...(379): Isocitrate/isopropylmalate dehydrogenase
  misc_feature (1)..(386): Xaa is any amino acid
MKMKFTIAVIPGDGIGPEVIAPALKVLDAVGDKYSHIFNYVELLAGGQAIDKTGEPLPKETLETAKQCDALLLGAVGGPKWDSLPGHLRPERALLGLRAGLGVFANLRPAALLPQLKSACPVKDEVLIASNSEGKAAFDLLIVRELTGGLYFGKRGRIDEPSNGHTPGSAFDTETYSWMEIERVLRAGYEAAKVRRKKLCVVDKANVLESSRFWREVAAVVSKDYPDIETSYLYVDNAAMQLIRAPGQFDVIVTSNLFGDILSDEASVLTGSIGMLASASLGAPVQGGTRPGMYEPIHGSAPDIAGKDIANPLATILSAAMMLRYSFGLEKEAVAIETAVNNVLDQGLRTGDIASRSGAASIAASGEKIVGTKAMGEAVLKALEKL

SEQ ID NO: 60399 - DNA, 303 bp, Unknown
  Obtained from environmental sample
  misc_feature (1)..(303): n is a, c, g, or t
gtgtgtgtcttggaaagaggcttccaattttttttccgccgcgcgatttcttcttcgttaatcttcacgtttatcgaaagtccgtcaatgtcaatggcgattatgtccccttcgttgatgatgcctatgtttccgcccaatgccgcttctggtgatacatgtcctatagacgcgcccttggatgcgccggagaaacgcccgtccgtaatcagggcgactttatcgtcaagacccatgccggcgagcgccgcggtgggagccagcatctctttcataccggggccgcctctaggtccttcgtaa

SEQ ID NO: 60400 - protein, 100 aa, Unknown
  Obtained from environmental sample
  misc_feature (1)..(100): Xaa is any amino acid
MCVLERGFQFFFRRAISSSLIFTFIESPSMSMAIMSPSLMMPMFPPNAASGDTCPIDAPLDAPEKRPSVIRATLSSRPMPASAAVGASISFIPGPPLGPS

SEQ ID NO: 60401 - DNA, 1005 bp, Unknown
  Obtained from environmental sample
  misc_feature (1)..(1005): n is a, c, g, or t
atgcaagttctgattttttttgccgggattatagtcacatgcgctgttttagttccggcattgctttcctataaaaagcgtatccgcgaattggaagaaaaaaccgaacaatcttttgcgagtgtgtcaaattttaaaggcaaaaccattaagcttgccgcggccgtaaaagaatcggcggatgttgtttcccggacaggaaagaacaacaaaacttccggaggcggacaaacgggcagcatggaaaaggttgaaagcaccattaacgaaaacgccaggattgcggcggatattgttgaaaaaacgcgcagtgtcgccgttatcgcctccaaaatggaagaggacgtgcttgacggctttaaagtgctggaaaaaaacgtcaaaaagatgggagacattaaggaaaaaaattcaggtgtaatcaacggcattatttctttgggcaataaggtaagcaaaatccgcgacattgtaagggtcatcaacaccattacagatcaaacaaaagtaatagcgtttaacgccgctcttgaagcggcaagcgcgggagaaacgggaaagcgttttgccgtggtagcgggggaagtaaacaggcttgcggatgacattgcggccctaacaaggcaaatccgcgaacaagttgaggagatacagaattcttcctcatcacttataatctccagcgaagaaagcgcggataaaatcacggaaggcaataaccttatcaaggaacttgaggatattttccgcgaaattcgttcaggggcggagataaccgccaatcaggcccaaacaataacaatatcaacccaaaaacagcaaaagtcaacggagcaaattaacatagccatttccgatatttcaaagggactgtcgaattttatacaatcaacaagggtggcgacttcatcggcggaagaacttacggaaatgattcagaaattagattccattttaaagggagataaacctttgttagatacggataataaatcaaaagaataa

SEQ ID NO: 60402 - protein, 334 aa, Unknown
  Obtained from environmental sample
  DOMAIN (69)...(323): Methyl-accepting chemotaxis protein (MCP) signaling domain
  misc_feature (1)..(334): Xaa is any amino acid
MQVLIFFAGIIVTCAVLVPALLSYKKRIRELEEKTEQSFASVSNFKGKTIKLAAAVKESADVVSRTGKNNKTSGGGQTGSMEKVESTINENARIAADIVEKTRSVAVIASKMEEDVLDGFKVLEKNVKKMGDIKEKNSGVINGIISLGNKVSKIRDIVRVINTITDQTKVIAFNAALEAASAGETGKRFAVVAGEVNRLADDIAALTRQIREQVEEIQNSSSSLIISSEESADKITEGNNLIKELEDIFREIRSGAEITANQAQTITISTQKQQKSTEQINIAISDISKGLSNFIQSTRVATSSAEELTEMIQKLDSILKGDKPLLDTDNKSKE

SEQ ID NO: 60403 - DNA, 597 bp, Unknown
  Obtained from environmental sample
  misc_feature (1)..(597): n is a, c, g, or t
atgatggaagatatccgcgaccagaaccagaagatcataagcgagattcgtaacctgtcggatatgattatcaggatcagcgaggccataaggatcatagacggtatcgcggatcaaaccaagctgattgcgtttaacgcctcgcttgaggcgtcttcttcgggggaagccggagcgcggttctcggttgtcgcctcggaaataaggcgtttcgcggataatgtggttgaatcaacaaaggaaatcaaacagaagatagaagaagtgcagggcgcttcccaaaccttaatcgcggaagccaacaacggctcaaggcagattgaaatcggctatgaaagaatgagcgagcaaaaaatcgtttttgagcatatcgttgacaactcccagaatgtcgcgacccgttcacagcagatttcaaatttaagcaaacagcaggaactggcttcgtcgcagattttcacggctctaaaggaaatatcagccggggttaaacaattcgttatagccacttcatccacttccaaaattgcggacagcttaaacggcatgtccgaagaattaaaaggaagagtggaaaaataccgtaccgaaaattaa

SEQ ID NO: 60404 - protein, 198 aa, Unknown
  Obtained from environmental sample
  DOMAIN (2)...(197): Methyl-accepting chemotaxis protein (MCP) signaling domain
  misc_feature (1)..(198): Xaa is any amino acid
MMEDIRDQNQKIISEIRNLSDMIIRISEAIRIIDGIADQTKLIAFNASLEASSSGEAGARFSVVASEIRRFADNVVESTKEIKQKIEEVQGASQTLIAEANNGSRQIEIGYERMSEQKIVFEHIVDNSQNVATRSQQISNLSKQQELASSQIFTALKEISAGVKQFVIATSSTSKIADSLNGMSEELKGRVEKYRTEN

SEQ ID NO: 60405 - DNA, 492 bp, Unknown
  Obtained from environmental sample
  misc_feature (1)..(492): n is a, c, g, or t
atgaatatagacagtaataatttaacctacagaaaattggatcataatgatagggaattgtttataaaattacggcttgattttataaatgaatttcataaagacatagataaagccgaaaaagaaaaattaacagcgtctataaaagattattttgaaaggcatataaataccgatgagtttatcggcattgtttgcgaatataataaaaacgttgtttccacagcttttttaatcgtaggcgaatggcctgcaaacagaaaatttataaatggaaaagtggcgacattattaaatgtattcacttatcccgaatacagaaaaaacggaataggcgtaaatgtaataaaaaggcttcttgacgaggcgaaaaaagaaaaaatatcactgattgatctgagggcgaccgaagacggagagaatatatacagaatgttaggtttttcagaacccgaagataaaagtatgcggttaataataaaagacgaatag

SEQ ID NO: 60406 - protein, 163 aa, Unknown
  Obtained from environmental sample
  DOMAIN (64)...(149): Acetyltransferase (GNAT) family
  misc_feature (1)..(163): Xaa is any amino acid
MNIDSNNLTYRKLDHNDRELFIKLRLDFINEFHKDIDKAEKEKLTASIKDYFERHINTDEFIGIVCEYNKNVVSTAFLIVGEWPANRKFINGKVATLLNVFTYPEYRKNGIGVNVIKRLLDEAKKEKISLIDLRATEDGENIYRMLGFSEPEDKSMRLIIKDE

SEQ ID NO: 60407 - DNA, 1338 bp, Unknown
  Obtained from environmental sample
  misc_feature (1)..(1338): n is a, c, g, or t
atgataattttaacattgaattgcgggtcatcatcggctaaatatcaggtttatgactgggaaaacaaagatgttctggcggtgggtattgtggaaaaagtaaccatcggcggctcttttatcacccataaggcaaagggcaaggaagaagtcgttattaaccacgattgccccactcataccgacgctatagacctcatcattaaaacccttacaagcaaggatatgggcgtaatcagcgatatgtcggtaatcaaagctgtgggacaccgtgttctgcacggcggaatgaaatttacaaagagcgttattgtgaatgacgcggcaatggctgcttttaacgaggttaaggatttaggacctcttcancatccggcgaatatcatgggtattgaggcggcgcagaaggttctgccgaatgtgcctcattgcgcagttatggataccgcttggcatcagacaatgccgcctgaggcttttatgtacgcagtgccgaaagaatggtacgaaaaatatcaggtgcgccgttacggtttccatgggacgagtttcctgtataccgcaaaacgcgccgccgtgttattggggcaggaccctttcaaaacaaacgtgataatctgccacatcggaaacggcgcttcggtgaacgccgtcaaaaacggctgttcttttgacacatcaatgggaattaccccgcttgaggggcttgttatgggcacacgttcgggagatattgacgccgcccttcctttctacattatgcgtaagacaggaatgagcgacaccgaaatcgaaaccgcccttaataaaaaatccggtcttttgggactgacaggcaaacatacagacagacgcgatgttcagaaggcggctgtcgaaggagacaagcaagcgttactcacacaatttattgaagcccatcgcgtgaaaaaatatatcggagcgtatcaggctgtattgggcagagtagacgcgttggttttcaccgcgggtgtcggagagtttgcgtggtttatgagagagaaatatcttgacggacttgaaggcatagggatgtcttttgattctcggaggaataaactttcctgtacaagaaataccgagacaattatcagcaagccggaatcgaaaataccgatttttgttattccgaccgacgaggaattggtaatgaccgaggacgcttttgcgttgatgcagggaacctacgacactcacacgcattttacttactctttccagagcaaggactacgtgaacaaggagcgcgccgaaggattaaagcacgatcttgcaaaaaatcccgatcttgccgagataattgccaatccaaaataa

SEQ ID NO: 60408 - protein, 445 aa, Unknown
  Obtained from environmental sample
  DOMAIN (2)...(393): Acetokinase family
  misc_feature (1)..(445): Xaa is any amino acid
MIILTLNCGSSSAKYQVYDWENKDVLAVGIVEKVTIGGSFITHKAKGKEEVVINHDCPTHTDAIDLIIKTLTSKDMGVISDMSVIKAVGHRVLHGGMKFTKSVIVNDAAMAAFNEVKDLGPLXHPANIMGIEAAQKVLPNVPHCAVMDTAWHQTMPPEAFMYAVPKEWYEKYQVRRYGFHGTSFLYTAKRAAVLLGQDPFKTNVIICHIGNGASVNAVKNGCSFDTSMGITPLEGLVMGTRSGDIDAALPFYIMRKTGMSDTEIETALNKKSGLLGLTGKHTDRRDVQKAAVEGDKQALLTQFIEAHRVKKYIGAYQAVLGRVDALVFTAGVGEFAWFMREKYLDGLEGIGMSFDSRRNKLSCTRNTETIISKPESKIPIFVIPTDEELVMTEDAFALMQGTYDTHTHFTYSFQSKDYVNKERAEGLKHDLAKNPDLAEIIANPK

SEQ ID NO: 60409 - DNA, 1053 bp, Unknown
  Obtained from environmental sample
  misc_feature (1)..(1053): n is a, c, g, or t
ttgagttataaaacagaattattatgtatcggcaatccgattgtcgatgtatttgtagacattaatagcagtcttgcgctaaagtacggcatacttgaccccgttcagcatatcgacgccgataaagctgaggcgttgctgagggagccttctatcaattttgcggactctgtaaaaagttcaggcggcggcgcggcgaatgtcgctaaaatagccgccatgcttggaatggacgccgcgttttgcggctgttcgggacaggacgatcttgcggcaatttttgaggaacagataaaagactcaggcgtttcttccatgcttgtaaaattaaatgaaaagacagggttagggtttgcgtgtaacgttgacggcgaattgcgttttgccgcaagccctcgcgcggcgcttgaattaaacgaaactcatatcagcgaagacttaatagccggcgcggaagttatcgttttggacggctttatactcgaccgccgccagttagttcaacacattttaatgaaggcaagccaccgaggaataccggtcgcccttgatgtcgcttcaatcatgcaggtaaaaagcaaggcggaagaaatattgacatacagccgcacttttccgctgtttgtttttatgaacgccgatgaaacaattaccttctttaacacagtaagcaaaggaaccgaagatggaactaacatgacggatagggacaaggaagccctaatcctgcgcgatatttgtcccatgttgaaaatgatgaccgacggcgaaatatacccgattatcgttgtcaaacttggcggcagaggcgcgttagtagttgccggcggaaatgtataccgcgaggaaacctttaccgtcgccgcgccgaaaaacacaataggagccggagacgctttttgcgccgcttttatttccgcgtggataagagaaaaatccctctccgaatgcgccgcgcttggaaacaaagtagcgcgcgaaatccttgaagtccccgggacgcacatcanaagcggaaagttaaaatcgtttgcgaagattttgcagaagtaa

SEQ ID NO: 60410 - protein, 350 aa, Unknown
  Obtained from environmental sample
  DOMAIN (23)...(341): pfkB family carbohydrate kinase
  misc_feature (1)..(350): Xaa is any amino acid
MSYKTELLCIGNPIVDVFVDINSSLALKYGILDPVQHIDADKAEALLREPSINFADSVKSSGGGAANVAKIAAMLGMDAAFCGCSGQDDLAAIFEEQIKDSGVSSMLVKLNEKTGLGFACNVDGELRFAASPRAALELNETHISEDLIAGAEVIVLDGFILDRRQLVQHILMKASHRGIPVALDVASIMQVKSKAEEILTYSRTFPLFVFMNADETITFFNTVSKGTEDGTNMTDRDKEALILRDICPMLKMMTDGEIYPIIVVKLGGRGALVVAGGNVYREETFTVAAPKNTIGAGDAFCAAFISAWIREKSLSECAALGNKVAREILEVPGTHIXSGKLKSFAKILQK

SEQ ID NO: 60411 - DNA, 771 bp, Unknown
  Obtained from environmental sample
  misc_feature (1)..(771): n is a, c, g, or t
atggctcgcgtctgcgcatggtccacgagaccgccgcagagaatgaggagccagagccgcatcattcgatggtctgagagaccgcataggagaatggagcacatttaccgaacaggacctttgccgacacctgcaaacgaggagggaaggatggttaacgtaggaattgatttacacaagacgcaattcacgatttgtgtaagggacggcaaagagagttggtttgcaaaatacccgacaaccccggaaggttaccgggattttctggcacaggcagccggatggcagaagaggggaggggcggtccgggtaggagtggaatcgactgggaacacgaggtacttcaagaaccggatggaagaagccgggataggggtaacggtaatcaacacgctgaagttcaaagtggtcaacgaatcggtgaacaagacggacaagcatgacgcggcgacgatagcggagtttctggagaaggacatcctgcctaaatcacagttatgcagccgggagagcgagcagctgcggcggttgctgagggcgcgggcgtcgctggtaacaacggaagtggtgataaagaaccagatacacgggctgttgacctcggaagggatggaagacgcaaaggggtcgttacaaagcaaaaaagggcgccaggaagtactggacgccctaaaagcgaataaaaacgggctcgtagcccagccgctgtttgaaacgatagatcggcttgaagaaaacatcaaggggatagagaaggaacttcgagcatga

SEQ ID NO: 60412 - protein, 256 aa, Unknown
  Obtained from environmental sample
  DOMAIN (119)...(213): Transposase
  misc_feature (1)..(256): Xaa is any amino acid
MARVCAWSTRPPQRMRSQSRIIRWSERPHRRMEHIYRTGPLPTPANEEGRMVNVGIDLHKTQFTICVRDGKESWFAKYPTTPEGYRDFLAQAAGWQKRGGAVRVGVESTGNTRYFKNRMEEAGIGVTVINTLKFKVVNESVNKTDKHDAATIAEFLEKDILPKSQLCSRESEQLRRLLRARASLVTTEVVIKNQIHGLLTSEGMEDAKGSLQSKKGRQEVLDALKANKNGLVAQPLFETIDRLEENIKGIEKELRA

SEQ ID NO: 60413 - DNA, 525 bp, Unknown
  Obtained from environmental sample
  misc_feature (1)..(525): n is a, c, g, or t
atgacgctcaagccccttatcttagcccccctgctccttgccctctgctgccaaacgccacaggtgcggacggaggcaaatgaatctgtcaaggtctatttcacgccaagcgacagccccacagccgccatcatagaaacactggacaacgctagagagagcgtccacgtccaagcgtacagtttcacatcaggcccaatagccgccgcgctgaaacgcgcacacgacagaggcgtggcggtgagggtcatactcgacaagagccagaagtcggagaggtacagcagcgcgacatttctgacacgcgctggaatccctgtctggattgacggcagacacgccatcgcccacaacaaggtgatggtcgtggacggtcggactgtcataacggggagcttcaacttcaccaagagcgcggaagagcgcaacgctgaaaacctgctcgtcatcaatgacgggcgcatcgccaacagataccttgcgaattgggaaaggtgcaagggacattctgaggaatcacaatga

SEQ ID NO: 60414 - protein, 174 aa, Unknown
  Obtained from environmental sample
  SIGNAL (1)...(24)
  misc_feature (1)..(174): Xaa is any amino acid
MTLKPLILAPLLLALCCQTPQVRTEANESVKVYFTPSDSPTAAIIETLDNARESVHVQAYSFTSGPIAAALKRAHDRGVAVRVILDKSQKSERYSSATFLTRAGIPVWIDGRHAIAHNKVMVVDGRTVITGSFNFTKSAEERNAENLLVINDGRIANRYLANWERCKGHSEESQ

SEQ ID NO: 60415 - DNA, 1233 bp, Unknown
  Obtained from environmental sample
  misc_feature (1)..(1233): n is a, c, g, or t
atgacaggcacaatcgcagacgtaattaaatacgagggcgacaacgccacttttgtctggaaatcgccgattgaggatttcaacaccggtactcagttgatcgtccacgagtcccaagaggccctattcttcatgaacgggcaagctctcgaccttttcggcgccggacgccacacgcttgaaactcaaaatatcccgatgatcaggaagttcctgaacaagccgacggacgaccaaaccccgttccactgcgaggtctacttcataaacaagacggagcagttggcgattaagtggggaaccgacagccaagtccaatacatggaaccgacctacaaattcccgctgaaaataggcgcctccggcgagatggccctgcgcgttgaggattcgagaaagttgctggtaaaaattgtcgggacagagtacttcctcacccaagccgccctaacgcagatgtttcgcgccttcctgatggctaaggtcaaaccgtatctagcgaaaaccatgcaagacagcggtttcggcatatttgaggtcgattcgcacatgggcgagctctcggaagctctgcgcaagcaactcataccggactttacggattacggcgtctccttagaacgcttctttgtaacgacaatcgtcaaacccgagggcgatccggcgtacgaaaagttccgcgacatccatgtccgccagtattccgatatcgccgaggcgcaactccggcagaaggtcggaatcatagaccagcaaaccagcgcgcaaaaattggttatcgaatcccaagcaatagccacaaagcgtgcgcaagaaggttacacctaccagcacgagcgcggcttcgacgtggccgaaaaggtcgcccaaaacgaggccatcggcaacttcacaaacgcgggcatcggcctcggcatgatgggcggcgttgccggtggcatgggcccaatggtcgccggaatcacaaccgacgcgctaaaccaaataacgccgcaaaacggcgcgcaccccgttgtagccggattcggcatagcggcgccggccatagatcccaaaacaggaacccaaccgcccgcaccggcaacgccgacggacgatatggccgcctttaaacaaaaactcgaaaaaatcaaggcgatgaaagatatgngtatgctgtccgacgaggatttngaaccgaaaagaagaaatgctgagcactctataaccaaaaacccggagaatgcgcaatga

SEQ ID NO: 60416 - protein, 410 aa, Unknown
  Obtained from environmental sample
  misc_feature (1)..(410): Xaa is any amino acid
MTGTIADVIKYEGDNATFVWKSPIEDFNTGTQLIVHESQEALFFMNGQALDLFGAGRHTLETQNIPMIRKFLNKPTDDQTPFHCEVYFINKTEQLAIKWGTDSQVQYMEPTYKFPLKIGASGEMALRVEDSRKLLVKIVGTEYFLTQAALTQMFRAFLMAKVKPYLAKTMQDSGFGIFEVDSHMGELSEALRKQLIPDFTDYGVSLERFFVTTIVKPEGDPAYEKFRDIHVRQYSDIAEAQLRQKVGIIDQQTSAQKLVIESQAIATKRAQEGYTYQHERGFDVAEKVAQNEAIGNFTNAGIGLGMMGGVAGGMGPMVAGITTDALNQITPQNGAHPVVAGFGIAAPAIDPKTGTQPPAPATPTDDMAAFKQKLEKIKAMKDMXMLSDEDXEPKRRNAEHSITKNPENAQ

SEQ ID NO: 60417 - DNA, 699 bp, Unknown
  Obtained from environmental sample
  misc_feature (1)..(699): n is a, c, g, or t
atgccggcgctcataagcggaaaatttaccaatcgccagttgtactactcaagctatgtgaaaacatacctggaacgcgatgtccgcgatatagcccccggcattgactttttaaaatttacagcttttataaaagccgccgccgccagaacagcgcagttaataaattataaacatatcgcggacgacgctgaaataaatcaggaaaccgccaagagttggctgcaactgcttgaaacattaggcgttattttttttgtccgaccatatcaccataacgtactaaaacgcatgataaaaacccccaaactctttttttatgacacagggctgccggtatacctgactaaatggaactctcctcaaacgcttatgaacggcgcaatgaacggcgctattctggaaaactattgcgtttctgaaatagtcaaaggatatgaaaatacaggtaaagacctttctctttatttttatcgtaacaaagattcaaaagagatagaccttcttttggaaagagacggcgcgcttgaaccgatagaaataaaaaaaacagcgtctccggcaaaaggaatgatttcttcctttacagcgcttgaaaaaccgcctctgcgccgagggaaaggagccattatatgtttagcggaacatctgggcgcttttgataaggataatttaattgtaccggtagggttgctgtag

SEQ ID NO: 60418 - protein, 232 aa, Unknown
  Obtained from environmental sample
  misc_feature (1)..(232): Xaa is any amino acid
MPALISGKFTNRQLYYSSYVKTYLERDVRDIAPGIDFLKFTAFIKAAAARTAQLINYKHIADDAEINQETAKSWLQLLETLGVIFFVRPYHHNVLKRMIKTPKLFFYDTGLPVYLTKWNSPQTLMNGAMNGAILENYCVSEIVKGYENTGKDLSLYFYRNKDSKEIDLLLERDGALEPIEIKKTASPAKGMISSFTALEKPPLRRGKGAIICLAEHLGAFDKDNLIVPVGLL

SEQ ID NO: 60419 - DNA, 552 bp, Unknown
  Obtained from environmental sample
  misc_feature (1)..(552): n is a, c, g, or t
atggatttaaaattgataagtaattacagtatttacacatggaaagatttattacgctcgcagtacacttcttaccagacaaccagacagcttttattgtttattatggcgttgatagtaattgtcgccgctgtaaatgtttcttccgcaacgagcatgctggttttggaacgccaaaaagatatagccatattaaaaatttcaggctcaagcataaaaggcattacggaaatatttttatggggcagttttcttacaggctttatcggaggcgctgtcggcataacattcgggctgttgataggagtcaacatcaatatattaatccgctctttggaaaaattcttaacttttatttccggtatttttcacggaggagaggtaaaaatactggatcccggtttttatcttgaaacaattcccatagtgatagactgggaagcggtgtttgttatctggtttttcgctattttctgttcggtgtttgcgtcttggataccggcgcgcagagcggggaagcttaaaccgatggaattactgcgaaagacttga

SEQ ID NO: 60420 - protein, 183 aa, Unknown
  Obtained from environmental sample
  DOMAIN (6)...(176): Predicted permease
  misc_feature (1)..(183): Xaa is any amino acid
MDLKLISNYSIYTWKDLLRSQYTSYQTTRQLLLFIMALIVIVAAVNVSSATSMLVLERQKDIAILKISGSSIKGITEIFLWGSFLTGFIGGAVGITFGLLIGVNINILIRSLEKFLTFISGIFHGGEVKILDPGFYLETIPIVIDWEAVFVIWFFAIFCSVFASWIPARRAGKLKPMELLRKT

SEQ ID NO: 60421 - DNA, 525 bp, Unknown
  Obtained from environmental sample
  misc_feature (1)..(525): n is a, c, g, or t
atggaaatacggttaaggttccaaaggggtcaaggtttcttttcaaatgaagagatgcttgttgaagggcccaaaggaaaacttaaacaaaagtaccacagcgttattacctttgaggataaaggcggggaaataattgttggccggacaagcgaagaaaaacaggtaaagtcatttcatggcttgtacaggaatcttcttaataacatggtaatcggggtttcaaccggttttaacaagtcgcttattgttaccggcgtaggttacaaagcggaagtacagggcaaactcctcgcgatgagtcttgggtattcaaacgacatttatgtcgccattcccgaaggcctcgcggtcgcgattgatcagggcggcaagattacgataagcgggattgacaagcaaagagtaggcgagtttgcggctcaggtgcgcaagttaagagggccggagccttataaaggcaagggcatccgttatgataatgagattatcaagcggaaagtcggaaaatcgggcgttaagtag

SEQ ID NO: 60422 - protein, 174 aa, Unknown
  Obtained from environmental sample
  DOMAIN (9)...(77): Ribosomal protein L6
  misc_feature (1)..(174): Xaa is any amino acid
MEIRLRFQRGQGFFSNEEMLVEGPKGKLKQKYHSVITFEDKGGEIIVGRTSEEKQVKSFHGLYRNLLNNMVIGVSTGFNKSLIVTGVGYKAEVQGKLLAMSLGYSNDIYVAIPEGLAVAIDQGGKITISGIDKQRVGEFAAQVRKLRGPEPYKGKGIRYDNEIIKRKVGKSGVK

SEQ ID NO: 60423 - DNA, 363 bp, Unknown
  Obtained from environmental sample
  misc_feature (1)..(363): n is a, c, g, or t
atgttacagaaaatgctggaaaaagacagaaaacgtcttagaagaaaagttcacattcgcaaaagaatttccggtacgcctgagcgcccgcggatgactgtcactaaaagcaaccgcagcatatcggttcagataatagacgataccaaagggcatactctggcgcatgcatcaactttggaaaaagagttaaagaatattaaggctactgtcgcgggcgccgcgcagttaggtgaaataatgggcaaacgcctgctggaaaaaaacatcaaaacggtggtttttgaccgcaacgggtatttgtatcacggaatagtaaaggctttggccgacggaacccgcaaggcggggatagagttctag

SEQ ID NO: 60424 - protein, 120 aa, Unknown
  Obtained from environmental sample
  DOMAIN (7)...(120): Ribosomal L18p/L5e family
  misc_feature (1)..(120): Xaa is any amino acid
MLQKMLEKDRKRLRRKVHIRKRISGTPERPRMTVTKSNRSISVQIIDDTKGHTLAHASTLEKELKNIKATVAGAAQLGEIMGKRLLEKNIKTVVFDRNGYLYHGIVKALADGTRKAGIEF

SEQ ID NO: 60425 - DNA, 756 bp, Unknown
  Obtained from environmental sample
  misc_feature (1)..(756): n is a, c, g, or t
gtgaaggtgggtatcttcggcgcggcgtatatgaggggccagcaggctgtcgggattatccctacggcaaaacatttccccggccacggcgatacgcatcttgattcccacggcgtgcttccccgtattaatgtcacgtttgaaacgctttgggagagggaacttgtgccgtatcgaatgttggtaaaagaagggatacccgcagtgatgagcggacatctcgcctttccaagaatcgaagcaagcggcgttccggcatcgctctcctcatggttcttaaaagacgtgctccgggggaagataggttacagggggcttgtaatcaccgatgatttgatgatgaacggggctacgctgtgggcgggcagcgtttccagagcggcaaaacaggccctgctcgccggaaatgatataatccttctttcaaaaacacccgacctttttgatcctgtatggaatttattgtcaagctccatgaaagatgataatgaattccgcctttgtgtccgggatgccgccaggcggattctggagacaaaacttcgttaccttagggacagccaggctgttccgttcgtccctgatataaagaaggtggaaaacggcctgcctgatcctcaaggcagcgctttctttgtggaccttgcggcgcgcagcgttaccattgtgaaaccatcaaaggaggcggcgtttggggcgcgggaaaagcagggtatttttcccttaaaacctgaaatcgccggaaagtcctgctga

SEQ ID NO: 60426 - protein, 251 aa, Unknown
  Obtained from environmental sample
  DOMAIN (1)...(141): Glycosyl hydrolase family 3 N terminal domain
  misc_feature (1)..(251): Xaa is any amino acid
MKVGIFGAAYMRGQQAVGIIPTAKHFPGHGDTHLDSHGVLPRINVTFETLWERELVPYRMLVKEGIPAVMSGHLAFPRIEASGVPASLSSWFLKDVLRGKIGYRGLVITDDLMMNGATLWAGSVSRAAKQALLAGNDIILLSKTPDLFDPVWNLLSSSMKDDNEFRLCVRDAARRILETKLRYLRDSQAVPFVPDIKKVENGLPDPQGSAFFVDLAARSVTIVKPSKEAAFGAREKQGIFPLKPEIAGKSC

SEQ ID NO: 60427 - DNA, 906 bp, Unknown
  Obtained from environmental sample
  misc_feature (1)..(906): n is a, c, g, or t
ttgaatcgcttgcggcgggcttttcggctatcgttggaagaattcccgccgagggaagacttccttatgaatgagccgctttttaagcgctggcgtaaaataaaaaaaatcgcgggcgctgaagaactgctgcgggccaatgaacgctggtgcatgagcgcctgcggcaaatttttaaaaggcggctccgccgtatgggtcctgggtggcaataaaggagttccctcggcgcttgttatacaggccaaacagaccttgctgccggtgttatgcgatcaaaaaactgttcccccgccgcgttttctccgcggcatattcggcggcagggctttcctccattcattgcagggacgcaaggatgatgtgttggttatggagaaagccctggaagaaatggggctgtatccctcagaaaaaaaagattacgacattatgtgtcttgaccacgttccttcatcatgtcgttcaaccgctcccgttaatctggttatacgcaagcccgcgccgcaagacatgaacgcgcttggccgctctgcacgccggttaccaacaggaagaggttttgccggcccccgtcggaatttcgcccggccgccagcgcctgacattgagcgtatatttgcggaggaacagatgctcgtagccgagcttggcggttgtttgataggaaaaatcaataccaatgccgttggtttcacgcgttatcagattggcggcgtgtatgttcatcccgattaccggggcatgggaatagcgggcagaatgacgtctgaatttgtggtaagtcttgccgccctgggcaggggcgtatccctttttgtcaagaaaacaaatattgccgcccgaagggtttatcagcgcgtaggttttgaattagcgggcgattaccggatcgattatttttaa

SEQ ID NO: 60428 - protein, 301 aa, Unknown
  Obtained from environmental sample
  DOMAIN (216)...(298): FR47-like protein
  misc_feature (1)..(301): Xaa is any amino acid
MNRLRRAFRLSLEEFPPREDFLMNEPLFKRWRKIKKIAGAEELLRANERWCMSACGKFLKGGSAVWVLGGNKGVPSALVIQAKQTLLPVLCDQKTVPPPRFLRGIFGGRAFLHSLQGRKDDVLVMEKALEEMGLYPSEKKDYDIMCLDHVPSSCRSTAPVNLVIRKPAPQDMNALGRSARRLPTGRGFAGPRRNFARPPAPDIERIFAEEQMLVAELGGCLIGKINTNAVGFTRYQIGGVYVHPDYRGMGIAGRMTSEFVVSLAALGRGVSLFVKKTNIAARRVYQRVGFELAGDYRIDYF

SEQ ID NO: 60429 - DNA, 1176 bp, Unknown
  Obtained from environmental sample
  misc_feature (1)..(1176): n is a, c, g, or t
atgcgtctcacccctgtttttacaatttttttgttattgctgttttttgcctgctcgggggaaaaaaatacagctcctgagccaacagaagaggaaaccgcggaaataattacgcctaacgtagacagcgttaagcgggaacgcgccgcccgtatcgcgtcggccctggatgacagtcagcttgccgcgcaggtaattattaccggtattgacggcaaagggagtttgacgcgggatatgaagattttgctctcggaatgtcccgccggaggcataatgctgttcaggtacaaccttgacaccgataaaagcgcgatacaaaaactgattgccgaaagcgtcgcgctcattacaaatgggagtacagttgaaggcattggcattcccccctttgtcgtagtggatcatgagggagggattgtaaaccgcttccttccgggggacgcggatctgcccgccgcttattcctattgggtaacagcccaaagcgaaggcaagggcgttgcgattgcccaaatactgacagacagttttaacacggggaaaaagcttcacgatcttggtataaattttaatctggcgccggtcgcggaatccttgaatgatgacaactcaaaatttcttgcggggcgttcatacggcccggatccggaatttaccgttgatgctgtcagggcctttatcgtgggcatggaatttgccggcgttacctgcgccgtaaagcattttcccggaagcgcgggcgcggacccccactattttccgggccaactaaacggtaacaaagaggccatggcggaacttgtttcttcctttgccgccctcattcggaataatcagacaaaggctgtcatggtttcccactcggctgttcccgcctgggacgcggaacatatcgccagtctttcgccggtaataatgggcgaatggctgcggcgggaactgggctttaagggactaatcatcagcgatgacttttccatgggcgccgcgacagccgatggccgcacaaggccggaggacgcggcagtacaatccctgattgccggcgcggatattgtgctggtatggcctcctgatctgcggcgcacccaccgggctatccaggcggcccttgccaaaggcaggctttcccgtcaacgcctggaggacgcggcgggcgctcggccgatctga

SEQ ID NO: 60430 - protein, 391 aa, Unknown
  Obtained from environmental sample
  SIGNAL (1)...(24)
  DOMAIN (120)...(356): Glycosyl hydrolase family 3 N terminal domain
  misc_feature (1)..(391): Xaa is any amino acid
MRLTPVFTIFLLLLFFACSGEKNTAPEPTEEETAEIITPNVDSVKRERAARIASALDDSQLAAQVIITGIDGKGSLTRDMKILLSECPAGGIMLFRYNLDTDKSAIQKLIAESVALITNGSTVEGIGIPPFVVVDHEGGIVNRFLPGDADLPAAYSYWVTAQSEGKGVAIAQILTDSFNTGKKLHDLGINFNLAPVAESLNDDNSKFLAGRSYGPDPEFTVDAVRAFIVGMEFAGVTCAVKHFPGSAGADPHYFPGQLNGNKEAMAELVSSFAALIRNNQTKAVMVSHSAVPAWDAEHIASLSPVIMGEWLRRELGFKGLIISDDFSMGAATADGRTRPEDAAVQSLIAGADIVLVWPPDLRRTHRAIQAALAKGRLSRQRLEDAAGARPI

SEQ ID NO: 60431 - DNA, 2385 bp, Unknown
  Obtained from environmental sample
  misc_feature (1)..(2385): n is a, c, g, or t
ttgtttgagcggctgatgcgggagattctggagaaccgttcgcgcctgcgtgccaaaaccggaaatgatattcgggacgccctggggaacgcccaatcgctcgcgaacctgtccgccatgctgttaaaaaaaatactgcttccgctggcgattatatcattgataataatttttataataattcgctgcggttactggtttttatatattacgcgtcatagcaaacgcggcagagctgtttgcctctggaaacacgcgcggcggcggctgacgctcgcggggtttggctctcccggattaaagagccggctttcggaatccgaatgggctgcccgcgcagacgcggtagttgagggcgcgtattccatgtacctgtgcgccgccgccgcccgtttcgcgcctgaataccctaataacgaatttgattccatgctggacgcttaccggcttttttccagcgggtacaaaaaaaatattcccctgcggcgcaggctgctcgcgtggttcttcccgccgctcgcgcttttgcttaaaaacaccaattccgtgaaaccgggaaaatcgttattaacagttttgcttttggttttcctcattgtaagcgtaagcacggacggaagggcgcaggcggacacggcggacagcgggctgcccggggacagtaaactgtccggggacagcgggatgtccgcggacgaattattcaacaaagccatcgagtcggaatactccgaattatgggaaaaggccatagatctgtacagggaaggcaggaataaataccctgatgacgtgcgtttccccctggcccttggcaacctttttttcaaccgttcgctttacagccttgcctgggacgaattcagggcggccgaacagttgatgccctatgagccgtatatactgcaaagactggctcatactgccggctacctgaacctcgacgaaatatcggtgacatacctggagaaactgctctcaattgatcctgataatatggaagcgatcagctacctgggatggatgtattacaaggtacaccgccttgacgacggcgagaggctgataagggggacgcttgagcgttttggcgatgacgcggatctggccatgacgcttgggacaatctattcggatatgtaccggtatgacgaaggaaaatactggtataaaaaagcaatagagcttggcgtgggtgcccgcagtttcaccgctgtggcgcattacaatctttcgattctggaatcgcgtttttaccgttacgatctttctatggacgaggccaacgcgtctatcgacgcgcagaaccgcgcgtcgggccttcttgcgaggggggaactccgcatgcgccggcttgacctgaaagaagcccactcggatttccaggcagcccgcgagattgatcagtcgccgctcgcaaaggtcaaccttgcgcaggcttaccaaatttcgggccggctggaagaagcccgcctgtacgcccttgactgcctgaaagccggcgaccagtcatggatggcgtattacggtatagaccccgtccgttacaagcgtgatcttcacgagattctctacaagacatattccggcctcgcgaaggcggagaggtttcagccatggagaaccattggaggcgttatacgatcagccgtaaaattgttatcataccggttttattacgccgtccatcacaagctttaccaaaaatacagccttgcctcgggtgacgcctacgacatccgcgaagctaacggccacccgcctctggatcagtatatacaatattataacgcctttgaaacatatccccggcgctcccttgtttatctgcgtaaagcccgtgattttgaaactgtcgttattccggcatcatggggatcgtattatcttgaagagagcgttctgcttaaagatacaggtttggcggcgcaggcattggacgcgcttgatccggtttgggaacgtgatttaatttcttattgttaccgtgaatttgcccttcgtggatcaacacgcagcgcgcgtcagaccgccgctgtggaactgtttgccctgaaccacggggcattgcttcaaacgggaatcaacctgcctttggaaattaacgtgcttaacgcgggcagccgggaaaaaactttgcgccgcgcgcttgcgaaagcgggctttacgcacatcgccgccaaagacggcgaaacccgtttcaggctcaatattgccgtcagcaaatcgactacagggacttacaccgcttcctgcgagttaattgacacggcaggcgaagaaaagccgctgcgccgtattattccgttgcgttccctgtccagggcggacatttacgattttgccggcgcgttaagtaatgccgcttttggtgtaactcaataa

SEQ ID NO: 60432 - protein, 794 aa, Unknown
  Obtained from environmental sample
  misc_feature (1)..(794): Xaa is any amino acid
MFERLMREILENRSRLRAKTGNDIRDALGNAQSLANLSAMLLKKILLPLAIISLIIIFIIIRCGYWFLYITRHSKRGRAVCLWKHARRRLTLAGFGSPGLKSRLSESEWAARADAVVEGAYSMYLCAAAARFAPEYPNNEFDSMLDAYRLFSSGYKKNIPLRRRLLAWFFPPLALLLKNTNSVKPGKSLLTVLLLVFLIVSVSTDGRAQADTADSGLPGDSKLSGDSGMSADELFNKAIESEYSELWEKAIDLYREGRNKYPDDVRFPLALGNLFFNRSLYSLAWDEFRAAEQLMPYEPYILQRLAHTAGYLNLDEISVTYLEKLLSIDPDNMEAISYLGWMYYKVHRLDDGERLIRGTLERFGDDADLAMTLGTIYSDMYRYDEGKYWYKKAIELGVGARSFTAVAHYNLSILESRFYRYDLSMDEANASIDAQNRASGLLARGELRMRRLDLKEAHSDFQAAREIDQSPLAKVNLAQAYQISGRLEEARLYALDCLKAGDQSWMAYYGIDPVRYKRDLHEILYKTYSGLAKAERFQPWRTIGGVIRSAVKLLSYRFYYAVHHKLYQKYSLASGDAYDIREANGHPPLDQYIQYYNAFETYPRRSLVYLRKARDFETVVIPASWGSYYLEESVLLKDTGLAAQALDALDPVWERDLISYCYREFALRGSTRSARQTAAVELFALNHGALLQTGINLPLEINVLNAGSREKTLRRALAKAGFTHIAAKDGETRFRLNIAVSKSTTGTYTASCELIDTAGEEKPLRRIIPLRSLSRADIYDFAGALSNAAFGVTQ

SEQ ID NO: 60433 - DNA, 579 bp, Unknown
  Obtained from environmental sample
  misc_feature (1)..(579): n is a, c, g, or t
ttggaaacttcagtttctgaacaacttccttataaaacagcagttttgtcggactttagtccgcggctagaagccgaaaaactgcaagacttatgtcggactttagtccgcaggaaccaacaaggttcccgaataagtcaattgttccgtcatggatggacgggaatttattttttgagcctttcacacacatggaggtgtagtatgggtatccaaatcgcgtctctatatgccgggggcagtatcccaacgcccatccagcaggaattgcaaaaagaaaaacagcctcctctaccaattaaacaaaacgttattacggaagaagccttggctacccttcccggcaacaggcacagctccccgtctctggaaaaaactacagcggatattcaacacataagccttgtatttaactcaaggctgaaattcgtggtggatcatcagtcaaatgaggttattgtcaaggtaattgacaaaaataccgataaggtgattaaggtgctcccgcccgaggaattgcagcggctgcacagaaaacttaaagaaaccattggcttgttgtttgacaggatggtttag

SEQ ID NO: 60434 - protein, 192 aa, Unknown
  Obtained from environmental sample
  DOMAIN (87)...(191): FlaG protein
  misc_feature (1)..(192): Xaa is any amino acid
METSVSEQLPYKTAVLSDFSPRLEAEKLQDLCRTLVRRNQQGSRISQLFRHGWTGIYFLSLSHTWRCSMGIQIASLYAGGSIPTPIQQELQKEKQPPLPIKQNVITEEALATLPGNRHSSPSLEKTTADIQHISLVFNSRLKFVVDHQSNEVIVKVIDKNTDKVIKVLPPEELQRLHRKLKETIGLLFDRMV

SEQ ID NO: 60435 - DNA, 726 bp, Unknown
  Obtained from environmental sample
  misc_feature (1)..(726): n is a, c, g, or t
ttggaaaataattttaaggccgcgtttaaggaaaaatttctaaataccctgtttctgcgccgggtgttgttgtgtcttttgggaaattttgtgcttgctttcggcgtggcaatggcggtgaaagccgatttgggaatcactcccgttaattcaatcgcctttgtcttaagcagggttcttccaaaggacttgggtatattgacggatcacggttttttgaccggcgttatctacgcaagttatgtactgcttcaacttatcctgcttagaagtgaattcggcatcaataatcttttacaagccggggccgccgtaatgttcggctggttcgtcttcctctgtaaccatttgcttgcgtttcaagttcctgatttctacccggtacggctcttattcctgctgtccggcgtaatcataatcggtcttggaataatgctttaccttagagccgctatcctgccccagcccgcggaaggtctcatactggcgattcaaaaaaaaacaggatggaaactgcacaacatcaaagtagctttcgattcttcggttgtcattatagcggcgataatttcatttgttaccgtaaaaaaaattataggcataagagaagggactctcatttcgatgatcggcataggcaagtgtctaggctttttcaccaagcatcttggtgaaaaaatcgacaaactttttggactttctgaagaaacacctggtagtctgtaa

SEQ ID NO: 60436 - protein, 241 aa, Unknown
  Obtained from environmental sample
  misc_feature (1)..(241): Xaa is any amino acid
MENNFKAAFKEKFLNTLFLRRVLLCLLGNFVLAFGVAMAVKADLGITPVNSIAFVLSRVLPKDLGILTDHGFLTGVIYASYVLLQLILLRSEFGINNLLQAGAAVMFGWFVFLCNHLLAFQVPDFYPVRLLFLLSGVIIIGLGIMLYLRAAILPQPAEGLILAIQKKTGWKLHNIKVAFDSSVVIIAAIISFVTVKKIIGIREGTLISMIGIGKCLGFFTKHLGEKIDKLFGLSEETPGSL

SEQ ID NO: 60437 - DNA, 801 bp, Unknown
  Obtained from environmental sample
  misc_feature (1)..(801): n is a, c, g, or t
atgatcagatcggccgagagttttattttcaatgaggacgctcttgtaagaattgacatgtccgactatatggaaaagcacaacgcctcgcgtcttgtgggcgccccccccggttacatcggatatgaagagggaggaatgttaactgaaaaaataaggcgcaacccctaccgcgtggttttgtttgacgaaatagaaaaagcgcattacgacgtatttaatattttgttacaggtactggaagagggcgaacttagggacagtcttgggcatacggtcagtttccgcaatacaatcattattatgacgagtaacgccggggcgcgtgaaatttccaaagacagccgccttggtttttccagcgggccgtccaatctttccgccgccgagattgaaacgcaggcaatgtccgaaatgaagcgcattttcagcccggaatttatcaacagggtggacgagattgtagtatttaacccgttggagcaaaaacaaattaacgcgattttcgacatagagatagaagagctttcccgccgcattgaagagcaaaactattcgttaaaagtgtccggggcggcgaagcgcgttcttgttgaaatgggctgggatcaaaagttcggcggcaggcatttgcgccgcactattcaaaaagaactggaatcccctctgtccgaccttattcttgaagactgctgggaagagggcgctgtctttaccgtagacgcgaaaaaagggaagattaggattaaagggaaaaatcctgacgcggttgacagtttaagtcctgttgagacggtttga

SEQ ID NO: 60438 - protein, 266 aa, Unknown
  Obtained from environmental sample
  DOMAIN (3)...(154): ATPase family associated with various cellular activities (AAA)
  misc_feature (1)..(266): Xaa is any amino acid
MIRSAESFIFNEDALVRIDMSDYMEKHNASRLVGAPPGYIGYEEGGMLTEKIRRNPYRVVLFDEIEKAHYDVFNILLQVLEEGELRDSLGHTVSFRNTIIIMTSNAGAREISKDSRLGFSSGPSNLSAAEIETQAMSEMKRIFSPEFINRVDEIVVFNPLEQKQINAIFDIEIEELSRRIEEQNYSLKVSGAAKRVLVEMGWDQKFGGRHLRRTIQKELESPLSDLILEDCWEEGAVFTVDAKKGKIRIKGKNPDAVDSLSPVETV

SEQ ID NO: 60439 - DNA, 1395 bp, Unknown
  Obtained from environmental sample
  misc_feature (1)..(1395): n is a, c, g, or t
gtggatacatcgggatacggctccgaggattctgtattcgctcaagttgaatttgacggaggacttcacccacaggaaacggatcggcttctttccgtttacagtaaacaattaataaaaaaagtaggtattaaaaatgttgaaacaagcgcgaggacgggctcaggttcgcttcttatttctttcgacccaaaactaacgcaggcaaattttgtcagagaatcggcgaaagaaatagatattccgggcggctttatattttttaatgaaaactcggcaaatgatcgatactgggaaatttttatttacggcgatgaagataaaaaatgcagggaatttgccgaaacgctggcgcaaatttgcgcaggacatccgttagttcgagaaagagttcttaattttaaacaaggcagtaataaattgattttactgccggacagagaaattttcgcttccgcgaatattaatttttactcggcggcggaaatcgctcggcttggggtatatggtcctgtagcgtacaaaagaatcgataaaaacggagagacagacgtaagaatcagcactaacggaaacggaatttatcaatcaagagaaggggcgttgaatctgcttgtttcggcaaagaatgaagaaagtatttcatatttaaagattgattccctcatgaagaaaaaagaagaaatagagccgtcaagcattagaagagacagccgccgcagattcgcttctataacaattattaccaaacctatagatccgcgcaaagtaaaaaaagaattgtccggagtattcaaaaaattggaactcgatcccggctattccgtagaatttgatcctgaagccataaaacaaagtgaaaatttatctgcttctattttttcgcttgttttagcgatcattttctgttacatgatcatcgcgtcaattaatgaatcgtttaccgttccgttgcttgttctttcggcaattcctccgtctttagcggttcccgctctattactcgttctaaccggaaacgcgtataattccgccgtcgcctgcgcctttattgtcgtaagcggcatgacagttaacgcggcgattttatgcgtagacggtcttcgctcaaaaattaaatcaggaaaagaaaaaaaatcattcagcatttattacgctctccgtttaaaaatgcccgccctgctctccaccaccggtacaaccgttgccggcgcagttccgtttcttttcttgacagaaggcgcaaatacattgatacgaacattgtctcttgtaagcgcgctcggagtaacttgctcgtttttttgttcaataaccgtaattccatctattttatctattacacacaaaaatattccgcttgtgcgggataaaaatcaaaatttgggagaatag

SEQ ID NO: 60440 - protein, 464 aa, Unknown
  Obtained from environmental sample
  misc_feature (1)..(464): Xaa is any amino acid
MDTSGYGSEDSVFAQVEFDGGLHPQETDRLLSVYSKQLIKKVGIKNVETSARTGSGSLLISFDPKLTQANFVRESAKEIDIPGGFIFFNENSANDRYWEIFIYGDEDKKCREFAETLAQICAGHPLVRERVLNFKQGSNKLILLPDREIFASANINFYSAAEIARLGVYGPVAYKRIDKNGETDVRISTNGNGIYQSREGALNLLVSAKNEESISYLKIDSLMKKKEEIEPSSIRRDSRRRFASITIITKPIDPRKVKKELSGVFKKLELDPGYSVEFDPEAIKQSENLSASIFSLVLAIIFCYMIIASINESFTVPLLVLSAIPPSLAVPALLLVLTGNAYNSAVACAFIVVSGMTVNAAILCVDGLRSKIKSGKEKKSFSIYYALRLKMPALLSTTGTTVAGAVPFLFLTEGANTLIRTLSLVSALGVTCSFFCSITVIPSILSITHKNIPLVRDKNQNLGE

SEQ ID NO: 60441 - DNA, 531 bp, Unknown
  Obtained from environmental sample
  misc_feature (1)..(531): n is a, c, g, or t
atgatgggcggcagtatttgggtacaatcagaagcaggaaaaggttccacatttacatttacgattcaagtggagcgtggtaaggaagaaagtcccggcgttgacaagcatgaagaaacgctggaggttgatattaacggtatgttcgccgggcggcgaatactgctggctgaagatgtggagattaaccgcgaaattgtacaggctttgcttgaacctacacagttggagatagacttcgctgaaaacggcgtgaaagcggtcagtatgtttaccgaaaatccgcgtaaatacgacatgattttcatggatatacagatgcctgagatggacggttacgaagcgacacggcgcatccgggcaattgaagcggaattggaacgatcagagggagtcccaataatagcaatgacagctaacgtattcaaggaagatattgaaagatgcctcgcctccggtatgaacgaccatgtaggtaaaccactggatattgaggaacttatgaaccgtctgcgtttatatttaggttag

SEQ ID NO: 60442 - protein, 176 aa, Unknown
  Obtained from environmental sample
  DOMAIN (52)...(172): Response regulator receiver domain
  misc_feature (1)..(176): Xaa is any amino acid
MMGGSIWVQSEAGKGSTFTFTIQVERGKEESPGVDKHEETLEVDINGMFAGRRILLAEDVEINREIVQALLEPTQLEIDFAENGVKAVSMFTENPRKYDMIFMDIQMPEMDGYEATRRIRAIEAELERSEGVPIIAMTANVFKEDIERCLASGMNDHVGKPLDIEELMNRLRLYLG

SEQ ID NO: 60443 - DNA, 1569 bp, Unknown
  Obtained from environmental sample
  misc_feature (1)..(1569): n is a, c, g, or t
gtgatacagccccgtatagaggccactatcaaagatttcgccgaagttgacgcgatatccgtttactccagcaacgggtttattatggcaagttacagagatgagcgtataggaaaaatgctgactgaagcggaagtgcaatacggcaacagaataaacgatgccttcgaggctgttaaagccggaaaagaatttagttgcttcagttacgcgcctacgatgcaaacaaatctgcaaatctccgttgtccctattcctctggggcaagctgaaacgacctggtcgataatgctcggtacaaaagaagcgtacataatgcatgatgtttatacgatgatcacatttgccgtgattatcgcggtgatagcggtaatagtgtcggcggcaactttattcattattctggacaaaacaaccaagccaatcactacggtagccgacaccttaaaaattgtagccgaaggcgatctgactaagcaggtagacgtccatacgaatgacgaaataggcgggcttgccaaagactttaactttacgatgagtaaaataaaaggccttatgattctcattaagaaacaggcgggcatattgaaagatataggcaacgacctttccagcaatatgaccgaaaccgccgcggcgataaaccagattaccgccaacattcagagcgtcaaaggcagggtcataaaccaaagcgccagcgtaacccaaacaaacgcgactatggaacaggttatcgccaacatcaacaaactcaacggccatgttgaaaaccagagccgcaacgtatcgcaggcgtcatccgccattgaagaaatggtagccaacgtcagttctgtcaccaacacgctggtcaacaacgccgccaacgtacaaacattgcaggaagcttccgaagtaggaaagaccggcttgcaggaagtcgcggcggacattcaggaaatagcccgcgaatccgaaggcctgttggagatcaacgcggtaatggaaaacatcgccagccagaccaaccttctttcgatgaacgccgcgattgaggccgcgcacgccggagaagccggaaagggcttcgcggtagtagccgatgaaatccgcaaactggcggaaagctccggcgagcagtcaaaaacaatcagcacggtactgaaaaagatagcggaatcgatcaagaaaataacaggctccaccgaaaacgtactgaacaaattcgaatcaatagactccggcgtaaagacagtatcaatgcaggaagaaaacatccgcaacgcgatggaagaacagggcgagggaagcaagcaagtcctgcaaagcgcaagcagtttgagcggactaacccagcaggtaaagagcggttcggaagaaatgctcagcggcagccaggaagtaattaaggaaagccgcaaccttgaaaaggtaacgcanganataaccggcggcatgaacgagatggcgagcggagcggatcagataaatgtagcggtacacaatgtcaacgagataactcaaaagaaccgtgacgcgattgatattttgataaaggaagtttcccgtttcaaggttgagtaa

SEQ ID NO: 60444 - protein, 522 aa, Unknown
  Obtained from environmental sample
  DOMAIN (116)...(185): HAMP domain
  misc_feature (1)..(522): Xaa is any amino acid
MIQPRIEATIKDFAEVDAISVYSSNGFIMASYRDERIGKMLTEAEVQYGNRINDAFEAVKAGKEFSCFSYAPTMQTNLQISVVPIPLGQAETTWSIMLGTKEAYIMHDVYTMITFAVIIAVIAVIVSAATLFIILDKTTKPITTVADTLKIVAEGDLTKQVDVHTNDEIGGLAKDFNFTMSKIKGLMILIKKQAGILKDIGNDLSSNMTETAAAINQITANIQSVKGRVINQSASVTQTNATMEQVIANINKLNGHVENQSRNVSQASSAIEEMVANVSSVTNTLVNNAANVQTLQEASEVGKTGLQEVAADIQEIARESEGLLEINAVMENIASQTNLLSMNAAIEAAHAGEAGKGFAVVADEIRKLAESSGEQSKTISTVLKKIAESIKKITGSTENVLNKFESIDSGVKTVSMQEENIRNAMEEQGEGSKQVLQSASSLSGLTQQVKSGSEEMLSGSQEVIKESRNLEKVTXXITGGMNEMASGADQINVAVHNVNEITQKNRDAIDILIKEVSRFKVE

SEQ ID NO: 60445 - DNA, 504 bp, Unknown
  Obtained from environmental sample
  misc_feature (1)..(504): n is a, c, g, or t
atgccgccggttatntcntgcgttaccttttcaaggttgcggctttccttaattacttcctggctgccgctgagcatttcttccgaaccgctctttacctgctgggttagtccgctcaaactgcttgcgctttgcaggacttgcttgcttccctcgccctgttcttccatcgcgttgcggatgttttcttcctgcattgatactgtctttacgccggagtctattgattcgaatttgttcagtacgttttcggtggagcctgttattttcttgatcgattccgctatctttttcagtaccgtgctgattgtttttgactgctcgccggagctttccgccagtttgcggatttcatcggctactaccgcgaagccctttccggcttctccggcgtgcgcggcctcaatcgcggcgttcatcgaaagaaggttggtctggctggcgatgttttccattaccgcgttgatctccaacaggccttcggattcgcgggctatttcctga

SEQ ID NO: 60446 - protein, 167 aa, Unknown
  Obtained from environmental sample
  misc_feature (1)..(167): Xaa is any amino acid
MPPVXSCVTFSRLRLSLITSWLPLSISSEPLFTCWVSPLKLLALCRTCLLPSPCSSIALRMFSSCIDTVFTPESIDSNLFSTFSVEPVIFLIDSAIFFSTVLIVFDCSPELSASLRISSATTAKPFPASPACAASIAAFIERRLVWLAMFSITALISNRPSDSRAIS

SEQ ID NO: 60447 - DNA, 1146 bp, Unknown
  Obtained from environmental sample
  misc_feature (1)..(1146): n is a, c, g, or t
atgatgagcgatggcgccctttctcaggatgaaatagacgcattattatcaggtgcaggcgtagagtcgtcgcctttaggcggcggcggtcattctccccacccggcggctacaatggcgcctccgcctgcggcttccgcttccgaagattacgatatcggcgctcttaaaggttttttctcctctgtaaccgacgcgctttcttccaacctttccgcgcttacgggcgctaccgtgaccctttcccctccgcaggcgtcttctacggacagggacggattcttaggccaactgccggacatggtaaccgtaatttccgcaaattatacctccggatttcccggcgagcatatttttattcttcccgaagaatcggccaaggcaatcgcgagcctgatgaccaaggaagacgacatcaagcttgatgatatggcaatgtcggtaatcggagaagtagtttcccaaatggtgggaacccagattacctctttaacagataagacaaaaaataaatccatagcggccgcgtctccggcggcggcgaatgtgcccaaagcggcggcggccattccggccggtaattttgccgttatggattacaatcttaatttgggagacggcaaaccgcataaaatgtgggaaattttaggagcaacacccgcgactgatatttcagccggattaaacggtatacagggtggcggcatgcaaatgcccggcatgcaaatgggtggaatgcaaatgggcatgggaggcggaatgccaggaatgggaatgggtatgggtatgggaatgggtatgcagtctaaccttggacctacgaatgtacaggctgttcaattccccaatttgatgcagcctaaattcggtccgcacgaagcgggtaatatcggtttgattatggacgtctccatggagatgaccgtagaacttggccgcacccgcaagcttattaaagaaatactgggtatgggcgaagggaccattattgagctggacaaacttgccggcgagcctgtagatattcttgtaaaccacaaacttatcgccaagggcgaagttgtggttattgatgaaaacttcggcgtgcgcgtaacggagattgtgtcgcctatggaacgcattaacgatatgggctacaattaa

SEQ ID NO: 60448 - protein, 381 aa, Unknown
  Obtained from environmental sample
  DOMAIN (296)...(372): Surface presentation of antigens (SPOA) protein
  misc_feature (1)..(381): Xaa is any amino acid
MMSDGALSQDEIDALLSGAGVESSPLGGGGHSPHPAATMAPPPAASASEDYDIGALKGFFSSVTDALSSNLSALTGATVTLSPPQASSTDRDGFLGQLPDMVTVISANYTSGFPGEHIFILPEESAKAIASLMTKEDDIKLDDMAMSVIGEVVSQMVGTQITSLTDKTKNKSIAAASPAAANVPKAAAAIPAGNFAVMDYNLNLGDGKPHKMWEILGATPATDISAGLNGIQGGGMQMPGMQMGGMQMGMGGGMPGMGMGMGMGMGMQSNLGPTNVQAVQFPNLMQPKFGPHEAGNIGLIMDVSMEMTVELGRTRKLIKEILGMGEGTIIELDKLAGEPVDILVNHKLIAKGEVVVIDENFGVRVTEIVSPMERINDMGYN

SEQ ID NO: 60449 - DNA, 2376 bp, Unknown
  Obtained from environmental sample
  misc_feature (1)..(2376): n is a, c, g, or t
ttgactcggcggcgatccgcaggaaattccgcagttacatgggaaggcttaaaggattttcaccttaagcgctattcacccgcgaattgtaaagtgtttctagcgggaaacatccctgcggaaaaacaactttcattcttaaacgaacaatttttttcaaagatagacggaggaaaagaatgcgcgcccgttaacaagactgaacgctggaaagaaccgaaaaaatttacagttccctgcccggcggagggcgaggcaaaatcaacaatatttttatcgtggctttgctccgatgtcaccgaaattgatgaatgtttcgcgttaggcgttcttacggaaattttattggggcatgacggctccccgttaacgcggaagttaattgaatccggttatggagaagacattacgcctgtctccgggcttgaaagcgaaataagagaagcgttatttgtcgccggcttaaagggcgtaagcggagacatacagcagatggggcagaaggttgaaaaacttatcatggatgagttgaacaggcttgttaccgaaggcatcccgccggaagaaatagaagcggctgttttatccgttgaattcgcgcataaggaaatacgcagatcaagcgggccgttttcccttgtttggatgcgccgctccctgcatacatggctgcatggccgcaagccctgggaaagcctgcttattctgcctttgctggcaaagttaaaagaaaatatttcctctgacaaacgtttttttgaaaaacttataaaaaaatattatttggataacccccaccgcgcccttgttgttcttgagccaaaggaagatttcctgcagaagcaggacgaagaacttttgaacaagcttgccggtatcgagaaaaacatgagcaaggaagagcgtaataaaattatcgaaaaatcaaaacagcttgagaagacacaaagcgaagccgacagtccccaggcgcttgccacaattccgcacctttcacgaagcgatcttgcggttgaaaacgacatcgttcaccgccgccacgaggatctgggcggagtaccggccttatgccacgagctttacacaaacggcattacatacgcggacctggcgttccctgtagaccttttatcagatgaagattatctgtggcttccgtttttttccagggcgattgtttccgtgggacttcccggaatggattacggcgaagtgtcaagcttgctggcgcgcacggcaggcggctttaacgcggtattgcacacgggttccgccgccgcgggtacggaaaagtttttgaaaaccgcgtcgggtcttcttgacctgtcggggcgcgactggcttatctaccgcttaaagtgcctcgatgaaaaaatcgcgccgtctttggatcttgtcctgcgcctgatctgcgaagcggacttgtccgatcacgaccgtattaccgatcttgttctggaaatgaagaacgagatttcttccagccttgctccgatgggtcaccagtatgcgtccaccaaggcggggcggggtaactccaaatgcagaacgacagaagaaatatggaacgggctttcccagattgagtttgtccaccgtcttgccgggtatgacgcggcggcagtcgcctctaaattaaaatatttactggaaaaaattcaaagcgcggggttaatcgctaacatcacaggccttgcccttaacgcgggtgaagaaatttcgcaaaggttcgcaaggttcggcgctcctaaaccgcgtcccgccttgtcccgcgctccggcgcttttggataaagccgaagtttacgcgtccggctccttgcaaattggttntgcggcgcgggcaatgaattcggcggtttttgacactaaagaacaaattgcggaaatggtattggcccacagtctttcgacaggggcgctttgggaggatattcgcatgaagggcggagcttacggcgcgtttgcgcaaagcgatacccttgataactgtgtttctttagcgacataccgcgaccccaaccctctgcgctctcttgaaactttttccgcgatactgaataacagcgcgtacggggaatgtgatgaagacgaacttgtaaaaaacatcatcgggtgttactcgaaagagacatacccaaaaacaaacagcgaaaaagggcagatggattttgcccgctttctggcaggtatggatgaaagttaccggaaaagaaggatagagcgccttgtttcaatctccgccggtgatatcaaagcggctttttcttcgctgggaaaaagagcagtgacgggctcggtaattatcgcggggacaaaggccgcggaacaggcggcaaaagcgcttggaacaaacgtgcaaatactgccggtgtaa

SEQ ID NO: 60450 - protein, 791 aa, Unknown
  Obtained from environmental sample
  DOMAIN (11)...(197): Peptidase M16 inactive domain
  misc_feature (1)..(791): Xaa is any amino acid
MTRRRSAGNSAVTWEGLKDFHLKRYSPANCKVFLAGNIPAEKQLSFLNEQFFSKIDGGKECAPVNKTERWKEPKKFTVPCPAEGEAKSTIFLSWLCSDVTEIDECFALGVLTEILLGHDGSPLTRKLIESGYGEDITPVSGLESEIREALFVAGLKGVSGDIQQMGQKVEKLIMDELNRLVTEGIPPEEIEAAVLSVEFAHKEIRRSSGPFSLVWMRRSLHTWLHGRKPWESLLILPLLAKLKENISSDKRFFEKLIKKYYLDNPHRALVVLEPKEDFLQKQDEELLNKLAGIEKNMSKEERNKIIEKSKQLEKTQSEADSPQALATIPHLSRSDLAVENDIVHRRHEDLGGVPALCHELYTNGITYADLAFPVDLLSDEDYLWLPFFSRAIVSVGLPGMDYGEVSSLLARTAGGFNAVLHTGSAAAGTEKFLKTASGLLDLSGRDWLIYRLKCLDEKIAPSLDLVLRLICEADLSDHDRITDLVLEMKNEISSSLAPMGHQYASTKAGRGNSKCRTTEEIWNGLSQIEFVHRLAGYDAAAVASKLKYLLEKIQSAGLIANITGLALNAGEEISQRFARFGAPKPRPALSRAPALLDKAEVYASGSLQIGXAARAMNSAVFDTKEQIAEMVLAHSLSTGALWEDIRMKGGAYGAFAQSDTLDNCVSLATYRDPNPLRSLETFSAILNNSAYGECDEDELVKNIIGCYSKETYPKTNSEKGQMDFARFLAGMDESYRKRRIERLVSISAGDIKAAFSSLGKRAVTGSVIIAGTKAAEQAAKALGTNVQILPV

SEQ ID NO: 60451 - DNA, 1134 bp, Unknown
  Obtained from environmental sample
  misc_feature (1)..(1134): n is a, c, g, or t
atggaaactgccaaagtttattttacggacatgcggacaaagataggtgaaagccttttaataaagatggacaggctaattcaaaaagccgggattaaggacattgattttaacaaaaaatatgtggcgataaaaatacattttggggagccgggaaacctttcttttttaaggccgaactttgcaaaaaccctggcggatcgaatcaagaaactgggcggaatgccctttcttacggacagcaataccctttacgttggacgccgcagcaacgcccttgatcaccttggagcggcggctgaaaacggctttaccgctttgtccaccggctgcccgaacataatcgcggacgggctgcgcggtaccgacgacatcgatgtaaaggtaaaaggcggggtacatcgcaaaatagctcatatcggcagagcgattatggacgccgatattgttatctcgctgaaccatttcaaaggccatgagggcgtcggttttggcggtgctctaaaaaatatcggcatggggtcaggcagccgcgcgggtaaaatggccatgcacaaagaaggcaagccaatagtaacaagcgatgcgtgtgttggctgtaaaatatgcgctcgcttatgcgcccaggacgcgattaaattttcggaaagcaaagcttccggaaaagcctccattgaccagaataaatgcgtaggatgcggacgctgtatcggcgcttgcagtaaaaacgcaatttacagcaaatgggattcaagtaactccgcgttaagctataaaatctcggaatatgccaaagcggtactggacgggcgacccaatttccacatgaacgttgtaaaccaggtttccccttactgcgactgccacgatgaaaacgacgcagctattgtgccagacataggcatcttcgcaagttttgaccccgttgccctggatcaggcatgcatggacgcggtaaacgccgctcccgcaatagccggaagtgttgtttccgacaggcagaaaaagtccagtaccgcaaacagcgatcatttcacagttattcattctgacacagactggcgcgaacagcttagccacgcagaaaaaatcggtttgggttccatacagtacgagttgataactgtaaaatag

SEQ ID NO: 60452 - protein, 377 aa, Unknown
  Obtained from environmental sample
  DOMAIN (190)...(213): 4Fe-4S binding domain
  misc_feature (1)..(377): Xaa is any amino acid
METAKVYFTDMRTKIGESLLIKMDRLIQKAGIKDIDFNKKYVAIKIHFGEPGNLSFLRPNFAKTLADRIKKLGGMPFLTDSNTLYVGRRSNALDHLGAAAENGFTALSTGCPNIIADGLRGTDDIDVKVKGGVHRKIAHIGRAIMDADIVISLNHFKGHEGVGFGGALKNIGMGSGSRAGKMAMHKEGKPIVTSDACVGCKICARLCAQDAIKFSESKASGKASIDQNKCVGCGRCIGACSKNAIYSKWDSSNSALSYKISEYAKAVLDGRPNFHMNVVNQVSPYCDCHDENDAAIVPDIGIFASFDPVALDQACMDAVNAAPAIAGSVVSDRQKKSSTANSDHFTVIHSDTDWREQLSHAEKIGLGSIQYELITVK

SEQ ID NO: 60453 - DNA, 1191 bp, Unknown
  Obtained from environmental sample
  misc_feature (1)..(1191): n is a, c, g, or t
atgaaaaactttaccaatttcagtttttacccatacaccgaaattctctttggcaaaaatacggaaacagaagccggtaagatgatccgcaaacacggtggaaagcggataatgcttgtatacggcggaggatcggttaaaaaaagcggcctctttgacgtgattgaaaaagcccttaaaagcgaagggctttactacaccgaatttggcggggtacagcccaatccccggcgttctttggttgagaagggtatcaagctcgcccagaatgagaagatcgactttttactggccattggcggaggcagcgtcatcaacacggcgaaggcaatcgctctggccctggcaaatgacggcgaatactggaaatttttcagcgggcctccaccagaaaaaatggcgcctgtcgggacaattcacacaatagccggttccggaagcgaaaccagccgttcggtggttatcgtacacgacttggacacgggccataaactaagcgtcaacgctgactgttgccggcctgtttttgccataatgaatccggaattgacctattcggtttccgcttatcacacaggggtcgaagcggcggatactattgcccacacggttagcaagtacttcacaaaagacaaccccgcatgcagcctgggagacgaatttgccgaggggttaatgaggaccgttataaggttcgcccccatagccattgccagcccaaacgattacgaggccagatcggagctaatgatggcggcttctttcagtcacaacgagcttaccagtataggacgcagcggcaagcgcgggggagagcatgcgctagaacaccagttatccggccactacgatacagcccacggcgcggggctcgcggttatcatgccggcctggcttcagtatatagcggacaatggtgcggaagagcaagttgagagagtcgcccaattcggcgctaaagtctttaacgccaaagcggacactgccaaagccacggcaaacgcgggactcgacgccttccgcgcctggctgcgttcaatcggaatgcccctgacacttgccgaactgggaatcccaaaagcggatcttgacgccgtaataaaacgcgcagttgacgccaacaaaggaaagatcagcggttatatcgatctggatgaaaaagcgataagggctatttattcttcggtgtaa

SEQ ID NO: 60454 - protein, 396 aa, Unknown
  Obtained from environmental sample
  DOMAIN (13)...(389): Iron-containing alcohol dehydrogenase
  misc_feature (1)..(396): Xaa is any amino acid
MKNFTNFSFYPYTEILFGKNTETEAGKMIRKHGGKRIMLVYGGGSVKKSGLFDVIEKALKSEGLYYTEFGGVQPNPRRSLVEKGIKLAQNEKIDFLLAIGGGSVINTAKAIALALANDGEYWKFFSGPPPEKMAPVGTIHTIAGSGSETSRSVVIVHDLDTGHKLSVNADCCRPVFAIMNPELTYSVSAYHTGVEAADTIAHTVSKYFTKDNPACSLGDEFAEGLMRTVIRFAPIAIASPNDYEARSELMMAASFSHNELTSIGRSGKRGGEHALEHQLSGHYDTAHGAGLAVIMPAWLQYIADNGAEEQVERVAQFGAKVFNAKADTAKATANAGLDAFRAWLRSIGMPLTLAELGIPKADLDAVIKRAVDANKGKISGYIDLDEKAIRAIYSSV

SEQ ID NO: 60455 - DNA, 1404 bp, Unknown
  Obtained from environmental sample
  misc_feature (1)..(1404): n is a, c, g, or t
ttgccggcaggcattgctcaggcggggaaggttgtccttgccactgtcaggggcgatgtccacgatataggcaaaaatatcgtctctgtgatccttggctgtaacggctatgaagttattgacctgggagtaatggtcgattcggaaaagatacttgaggccgcgcgtaatagcggcgcggactgcgtcggtctttccggccttatcagttcttcgctggatgaaatggttttagttgccgaagaaatggaaaaagccggttttacaattccgctattaatcggcggagcggcagccagtgccgcccacacagcgctccgtatcgctgccgcgtattcaggcccggtggtatatctgccggacgcgggccggactccccaagcgctcgcttcccttctttcgccaactcaaaaaagcgatttcttgcggaagcttaacgcggcgcaggaagaagcccgcagaagccatgaaatgataactgaaaaacgccgcatactgccgctggaagaagccagggcaaaccggctggttgttgactgggacgccagggagctccccgttccgaaaataaaaaggctgctgcaatttgatcactatccacgggaaaaaataatagggcgcctggactgggatgccttttgccgttcctgggagctgcgggaaaaagacggaagcgggcaggaaccgtatgatcaggcaaaaaaagaactcattgataacgcaaggtctttgctggaaaaaattaaagaacacctttcttttcgcgctgttttgggatttttcccggcacattcggaaaacgaggacgttattctctataaacaggattccgatcctgacaggccggaagaaatggcgcggttttgttttttgcggaaccaggttaagaaaaccgcgaacgcggcgaacctttgcctttctgactatattctgcctgtagattgcgcgagagacagtaagggcaggttacggtatgactggctgggcctttttgccctaacggcggaattcataaacgaaaagccccttaatgaagagaaagccctgcttgtcgcaacgctggcaaattcgctggcggaagctttctctgtggagctctccggcaaagtaaaagaagagttctggccagtgagccttgctccggccttcggataccccgcctgtcctgatcattatgacaaaaaaacagccattgccctccttgaagcggagcggaggattggtctcagcctcagtgagtccgcaatgataatccccgcttcctctgtctgcggaatgtactttgcgtttcctgatgccaaatattttgccgccggagaaataggggcggatcagcttgcgctctgggcaaagaaaaagggaattacggaagaacaggcacggaaacgtacaggctggatttag

SEQ ID NO: 60456 - protein, 467 aa, Unknown
  Obtained from environmental sample
  DOMAIN (325)...(438): Vitamin B12 dependent methionine synthase, activation domain
  misc_feature (1)..(467): Xaa is any amino acid
MPAGIAQAGKVVLATVRGDVHDIGKNIVSVILGCNGYEVIDLGVMVDSEKILEAARNSGADCVGLSGLISSSLDEMVLVAEEMEKAGFTIPLLIGGAAASAAHTALRIAAAYSGPVVYLPDAGRTPQALASLLSPTQKSDFLRKLNAAQEEARRSHEMITEKRRILPLEEARANRLVVDWDARELPVPKIKRLLQFDHYPREKIIGRLDWDAFCRSWELREKDGSGQEPYDQAKKELIDNARSLLEKIKEHLSFRAVLGFFPAHSENEDVILYKQDSDPDRPEEMARFCFLRNQVKKTANAANLCLSDYILPVDCARDSKGRLRYDWLGLFALTAEFINEKPLNEEKALLVATLANSLAEAFSVELSGKVKEEFWPVSLAPAFGYPACPDHYDKKTAIALLEAERRIGLSLSESAMIIPASSVCGMYFAFPDAKYFAAGEIGADQLALWAKKKGITEEQARKRTGWI

SEQ ID NO: 60457 - DNA, 1311 bp, Unknown
  Obtained from environmental sample
  misc_feature (1)..(1311): n is a, c, g, or t
atgtatttcagatctacaaaatccatagaaccggaggtctcttttaaggatgcggtactgcgttgcctgccgaacgatggcgggctttacgtcccatcgaaagtgattgatctgcgccagtttttcctttatatggacgagggaaccagctatcntgagctggtggctactgtggcgcctgtgctgcttcagggagaactaaacccgttttccgcagcgagggtagcggagagctcttttgattttgagcctgaactaacccaactggatgaaaatttttcaattcttaacctgtataacggcccgaccggaactttcaaggattttggcgcttcttttcacgcggcggttctggaagaactattaaaaaattactctggcgccatcatactttcggcagtcaggggagacagcggcgcctgtttaggcagggcgttttacagacgcaaggggcttactacggttatgctcttcccgtccgagcaacccattaggggaatagaccctgccttttttatccataatggtggaaatataatcccgatacagatacgcggaagccttgacgattgccagcgccttgtgaaagaaaccatcaacgacagaccttttgctgaaaggcattgtataaccagtgccaatgccataaacccgggcaggctattgccccaggctttttactacctctatgcgtttattaagataaaaaaacggcttcccggaggtcattttttcagcgttccgtcaggaaatttcggcaaccttatttccgggctttacgcctggaaattcggcctgccggttaacggttttatcgccgccatgaacgtcaacaacccatttggcgattttatccggggcagggaatttaagccccgcccggtggtcgcgaccaactcgccggcccttgatgtaagtgttccttcaaattttgcccgcttcagctctttctacgatgaagccccagccgttatgcgtaacattgttttccccgcttccatgggcgacacagctacgcttaaggcgatggaacttgcctggacaaaatacggcatactgctggatcctcacggcgctgttgctctggctgcggcaaaggattatttcgataaggataaaaatgcatttgatcatataattgttcttgcaacaggccatccagccagagaagcggccttggttagagaggctacggggcagaaagtcatgctgcctgagaaatttgccttgctgaacaaagaagcggagcctatcgcggtagtcgatccgcatctggatactttagaggggcttttggcaagctgcctgtaa

SEQ ID NO: 60458 - protein, 436 aa, Unknown
  Obtained from environmental sample
  DOMAIN (79)...(386): Pyridoxal-phosphate dependent enzyme
  misc_feature (1)..(436): Xaa is any amino acid
MYFRSTKSIEPEVSFKDAVLRCLPNDGGLYVPSKVIDLRQFFLYMDEGTSYXELVATVAPVLLQGELNPFSAARVAESSFDFEPELTQLDENFSILNLYNGPTGTFKDFGASFHAAVLEELLKNYSGAIILSAVRGDSGACLGRAFYRRKGLTTVMLFPSEQPIRGIDPAFFIHNGGNIIPIQIRGSLDDCQRLVKETINDRPFAERHCITSANAINPGRLLPQAFYYLYAFIKIKKRLPGGHFFSVPSGNFGNLISGLYAWKFGLPVNGFIAAMNVNNPFGDFIRGREFKPRPVVATNSPALDVSVPSNFARFSSFYDEAPAVMRNIVFPASMGDTATLKAMELAWTKYGILLDPHGAVALAAAKDYFDKDKNAFDHIIVLATGHPAREAALVREATGQKVMLPEKFALLNKEAEPIAVVDPHLDTLEGLLASCL

SEQ ID NO: 60459 - DNA, 333 bp, Unknown
  Obtained from environmental sample
  misc_feature (1)..(333): n is a, c, g, or t
atgaaggtttggcttaagcttctaatcggctcaattttgggcgtaataatcgggtatcttttgcccgctgataatcaagccataggaagaagtatcgcgtggtttggggatctggctatccgtatgggccgctattgcctggtgccgatgcttgttttttccctgaccattgccgtttacgagctaaggcaggacggtcaattttggactctgttactaaaaactctcattgttattatcttcagctccgcattcattatcggcgcgggtattcttgcaactttgatttttcccccttcgcgtattcccattcttgttgaggaaccaggctga

SEQ ID NO: 60460 - protein, 110 aa, Unknown
  Obtained from environmental sample
  SIGNAL (1)...(25)
  misc_feature (1)..(110): Xaa is any amino acid
MKVWLKLLIGSILGVIIGYLLPADNQAIGRSIAWFGDLAIRMGRYCLVPMLVFSLTIAVYELRQDGQFWTLLLKTLIVIIFSSAFIIGAGILATLIFPPSRIPILVEEPG

SEQ ID NO: 60461 - DNA, 1686 bp, Unknown
  Obtained from environmental sample
  misc_feature (1)..(1686): n is a, c, g, or t
atgatcgccgagccgcttgcgattttattggtttcacttacccacaaaaaaggaggctttgccgtgttggacaatgtacaggtaggcaccaaactaatcgcgggcttcttgaccgtagccgcgatagccgcgtttatcgggattatggggataaacagcgcaagcaagatggacaacctcaacgacgagatgtacacggtcagggtcgcttccatcaaagccgtagacgaggtgaacgcggaattagccaagatgcgcgtcgccctccgcgctatgacaatggccggcggcgacgacgtttggaaagcggaagccgcctcgttcagcgaagcccagaaattgatcgacagcgacatagagaccctgggccgtcttctgcgaaccgaaaaggggaaaaagctgctggacgacataaagaaaaattacgcggagtttttgagggcgtcaaagggcgtaatggacgtatcggcgaaaaagagggtggctcccgacgcggacatatccgccgctttgacccacgccagagagccgagtttgaacgtagcgaaggacgcggacgagttgcagatgcttataagcgagttcgcgaaggccggatgggagaacagcaaccaaacgcataggagcgtcttaaccacgcttatcacaatgctgatactcggcgtggtgatcagcgtcgctctcgggtttttcctttcgcgcaacataagcctgccgcttttgaagaccgtcagcatgctcgaagagctgaagatggggcatttgagcatgaggcttagaatggaccgcanagacgaggtcggccaaatggcgaagtcgatggacgcgtttgccgacgatatgcaaaatgtcgttatagacaccatgaaaaagatctccgcgggcgatctgagcgttaaaatagagccaaaggacgacaaagacgaaatctcctacgccctcaaaaaaaccgtggaatctctaagcgtggtcgtcggcaccatgaagaagatctccgtgggcgacctgagcgttcaaatagtgcccaagaacgacaaggacgaaatctctaacgccctaaagaggacggtcgagtctctgcatggcctcataatcgacgacggcggcagggtatttaacgccgcggccaataaggacttgtcgcaaaggcttacgtgcgagtaccaaggcgagttcgccagaatgaaggataacataaacacggtaatgcaaaatcttaacgatgcgttaaaccaagtgacggtgaccgtatcgcaggtgtcgagcgcgagcaatgagctttcccacagcgcccaaaatttcgccgagtgctcaagcgaacaagcaagctccctagaagaggtgtcgtcaacccttgagtcaatgtcctccatgacaaagcaaaacgccgataattccaatcaggctatggttttggcttccgaagccgtgtggccgcaacgacggggacatcgatatgaagcgtatggcggaggctataaatcagataaaacagtcggcggacaataccgcctagatcattcagacgatcgacgacntagcgtttcagatcagctgctcgctctcacgcggcggttgaggcggcccgcgccggagaggccggcaaggggtttgcggttgtggccgaggaggtgcgcaatctcgctatgctcagcgccgaggcggccaagaataccgcggacatga

SEQ ID NO: 60462 - protein, 561 aa, Unknown
  Obtained from environmental sample
  DOMAIN (214)...(283): HAMP domain
  misc_feature (1)..(561): Xaa is any amino acid
MIAEPLAILLVSLTHKKGGFAVLDNVQVGTKLIAGFLTVAAIAAFIGIMGINSASKMDNLNDEMYTVRVASIKAVDEVNAELAKMRVALRAMTMAGGDDVWKAEAASFSEAQKLIDSDIETLGRLLRTEKGKKLLDDIKKNYAEFLRASKGVMDVSAKKRVAPDADISAALTHAREPSLNVAKDADELQMLISEFAKAGWENSNQTHRSVLTTLITMLILGVVISVALGFFLSRNISLPLLKTVSMLEELKMGHLSMRLRMDRXDEVGQMAKSMDAFADDMQNVVIDTMKKISAGDLSVKIEPKDDKDEISYALKKTVESLSVVVGTMKKISVGDLSVQIVPKNDKDEISNALKRTVESLHGLIIDDGGRVFNAAANKDLSQRLTCEYQGEFARMKDNINTVMQNLNDALNQVTVTVSQVSSASNELSHSAQNFAECSSEQASSLEEVSSTLESMSSMTKQNADNSNQAMVLASEAVWPQRRGHRYEAYGGGYKSDKTVGGQYRLDHSDDRRXSVSDQLLALTRRLRRPAPERPARGLRLWPRRCAISLCSAPRRPRIPRT

SEQ ID NO: 60463 - DNA, 546 bp, Unknown
  Obtained from environmental sample
  misc_feature (1)..(546): n is a, c, g, or t
atggatttggtttccggggctttttccggagccttggacaccatcattcttttgtcgttcataaacgcgaactgcctattttgcggctgctgcttaggcggcggcgcggagcgtttggcggggctgttttcgctcaatttgaattcgcgcaccatactcgcgaggtcggcggcttggcttgatagctcctccgaagcgctggcggactcttcggagttggccgcgttttgctgggtaacttggctcatattagccacggcgatgttcacttgttctatgccttcggcttgttcgttgcaaaccgccgctatttcggcgataaggtcgccgactttgccggtacggtcaacgatccgtccgagagacttagccacttccacggttattttgacgccgccgtcggcgtttttgaccgattcctcaatcatgtccgcggtattcttggccgcctcggcgctgagcatagcgagattgcgcacctcctcggccacaaccgcaaaccccttgccggcctctccggcgcgggccgcctcaaccgccgcgtga

SEQ ID NO: 60464 - protein, 181 aa, Unknown
  Obtained from environmental sample
  misc_feature (1)..(181): Xaa is any amino acid
MDLVSGAFSGALDTIILLSFINANCLFCGCCLGGGAERLAGLFSLNLNSRTILARSAAWLDSSSEALADSSELAAFCWVTWLILATAMFTCSMPSACSLQTAAISAIRSPTLPVRSTIRPRDLATSTVILTPPSAFLTDSSIMSAVFLAASALSIARLRTSSATTANPLPASPARAASTAA

SEQ ID NO: 60465 - DNA, 552 bp, Unknown
  Obtained from environmental sample
  misc_feature (1)..(552): n is a, c, g, or t
gtggccgaggaggtgcgcaatctcgctatgctcagcgccgaggcggccaagaataccgcggacatgattgaggaatcggtcaaaaacgccgacggcggcgtcaaaataaccgtggaagtggctaagtctctcggacggatcgttgaccgtaccggcaaagtcggcgaccttatcgccgaaatagcggcggtttgcaacgaacaagccgaaggcatagaacaagtgaacatcgccgtggctaatatgagccaagttacccagcaaaacgcggccaactccgaagagtccgccagcgcttcggaggagctatcaagccaagccgccgacctcgcgagtatggtgcgcgaattcaaattgagcgaaaacagccccgccaaacgctccgcgccgccgcctaagcagcagccgcaaaataggcagttcgcgtttatgaacgacaaaagaatgatggtgtccaaggctccggaaaaagccccggaaaccaaatccataaaagcggtgggcgccggtgagataattttgctggacgacagagaattgcacgagttttaa

SEQ ID NO: 60466 - protein, 183 aa, Unknown
  Obtained from environmental sample
  DOMAIN (1)...(120): Methyl-accepting chemotaxis protein (MCP) signaling domain
  misc_feature (1)..(183): Xaa is any amino acid
MAEEVRNLAMLSAEAAKNTADMIEESVKNADGGVKITVEVAKSLGRIVDRTGKVGDLIAEIAAVCNEQAEGIEQVNIAVANMSQVTQQNAANSEESASASEELSSQAADLASMVREFKLSENSPAKRSAPPPKQQPQNRQFAFMNDKRMMVSKAPEKAPETKSIKAVGAGEIILLDDRELHEF

SEQ ID NO: 60467 - DNA, 996 bp, Unknown
  Obtained from environmental sample
  misc_feature (1)..(996): n is a, c, g, or t
ttggcgatctccggcttccacgcggcgctgctctactcagccgtattcgcgctgctcagactgctccgcgtaccgggacgcgccaaaacgcttacggcgctcgcgacgctctggggctacctattcctgataggccttataccctcgctcttccgcgccacggcaatggccaccctgctatgcgcgtcggttatgctccaacgcaagaaccacattgtacacacactgggcatcgccggattcttctggctctgtttctcgccgcacagcctcttttcgcccggcttccagctctctttcgccgcgaccgccgggatcgcgatgctgctgccggtacttagcggaataacccgcgccgtcaattcaagtatccgcaacaaaccggcatcgttccttgccgaaaagctcctctccccgctttgggtctcggtcgccacgttcgcggccaccgctccgccgctgctgtatcacttcgggacgctgtcgctctacgggatactctttaatctgatagccataccgttaatgtccgtagcgatgtggcttttcttcgcggcggtcgccctctcccccgtcgcggccgtctccggcgtgtttatactctgcgcggaaaaggttttgagttttatgatatttttatgcggattttgcgaacgtatatcaatcagtgaaattactttccctaacgtatcgcctataccgctcgcgaccttggtcgtattcatggcgggtttatgcggagtcagggcgaaatcacgcggcgcatacgtactgagggccggggctgcggctatgtccgtgttcgcaatttccgcgctgtatgcgtccgtaaacgtcaaaacggaaaacatcgtgttgcggagcgacggcgcgacggtcaacgtggtaatacaccgagacaaggcggcgtggggtcgttgcccaagggcgaaaaaacgaaatcaggaatctgcgcgtcagggaggtcgagccgctcttggttcggaaaagaaataa

SEQ ID NO: 60468 - protein, 331 aa, Unknown
  Obtained from environmental sample
  DOMAIN (1)...(250): Competence protein
  misc_feature (1)..(331): Xaa is any amino acid
MAISGFHAALLYSAVFALLRLLRVPGRAKTLTALATLWGYLFLIGLIPSLFRATAMATLLCASVMLQRKNHIVHTLGIAGFFWLCFSPHSLFSPGFQLSFAATAGIAMLLPVLSGITRAVNSSIRNKPASFLAEKLLSPLWVSVATFAATAPPLLYHFGTLSLYGILFNLIAIPLMSVAMWLFFAAVALSPVAAVSGVFILCAEKVLSFMIFLCGFCERISISEITFPNVSPIPLATLVVFMAGLCGVRAKSRGAYVLRAGAAAMSVFAISALYASVNVKTENIVLRSDGATVNVVIHRDKAAWGRCPRAKKRNQESARQGGRAALGSEKK

SEQ ID NO: 60469 - DNA, 693 bp, Unknown
  Obtained from environmental sample
  misc_feature (1)..(693): n is a, c, g, or t
atggaaaagatgtatgaagcggcaaaggaagaagggacaaaaacacggaaaaaactggacgaataccagcataatttcaccgacaaggacagccggataatgaaagttggaaacggggagcattatgagcagagctacaacgcgcaggcggtagttgacacggaagggagcatgctgatactgggagggtatgtaacgcaaaacgtgaatgacaagaaggaaatggagcctgcggtagcgagtgtcgataaagaagtgcgggaaataaacacgatatgtctggatactggattttacagcgaagaggcggtagccgcggtagaaaatataaatgaagaaggaaagcgggaagggcctgaagtattttgcgcggtagagaaagggcatcacgggaagacggtggaagatttgaaagacaaggggcccaaggggcggcctcctgcaaacatgggcgcgaaagaaaagatggcgcggaaacttaaaaccaagaaagggaaagaggcatacaagaaacggaaagagacggtagagccggtgttcgggataataaaaagtgtaatgggatttcggcaatttatgctgcgtgggatagagaaagttaataccgaatgggcattagtgaggctcgcttacaatttcaaaaggctgcatcgtttattaggcggtaagagcctaaccgaatgtctggcatag

SEQ ID NO: 60470 - protein, 230 aa, Unknown
  Obtained from environmental sample
  DOMAIN (26)...(213): Transposase DDE domain
  misc_feature (1)..(230): Xaa is any amino acid
MEKMYEAAKEEGTKTRKKLDEYQHNFTDKDSRIMKVGNGEHYEQSYNAQAVVDTEGSMLILGGYVTQNVNDKKEMEPAVASVDKEVREINTICLDTGFYSEEAVAAVENINEEGKREGPEVFCAVEKGHHGKTVEDLKDKGPKGRPPANMGAKEKMARKLKTKKGKEAYKKRKETVEPVFGIIKSVMGFRQFMLRGIEKVNTEWALVRLAYNFKRLHRLLGGKSLTECLA

SEQ ID NO: 60471 - DNA, 540 bp, Unknown
  Obtained from environmental sample
  misc_feature (1)..(540): n is a, c, g, or t
atggaagcgttttttaaggggttactggagaacggccttgccgtagtaaaaaagttcaatgattttaagggacggacaagccgaaaagagttttggaggtttgtgcttgccgcttttcttgcaggcatcgctttaggcatactgtcggcaatcccattcctgggaaaactttttgctatcgtagcaacctttttccagcttgccgttattgccctcagtctttcggtagggatcaggcgtctgcatgacgtgaataaatccggctggcttatggctccttatcttgtgngcttcatccccctgataatcatncattttattacgggntttgttgtaagcccgcgtcccactactgtaaacccgtccacccatctagctgacatggatgcctacatggccagcgcgcataggctttctgtccttaataacctttccggcttnttcagcgtcgtcggcatcgtaggtttcattatccttgcgttgttttggttccgtgaaggggatcccggggaaaacaaatacggcccgaaacctgaataa

SEQ ID NO: 60472 - protein, 179 aa, Unknown
  Obtained from environmental sample
  DOMAIN (18)...(125): Protein of unknown function (DUF805)
  misc_feature (1)..(179): Xaa is any amino acid
MEAFFKGLLENGLAVVKKFNDFKGRTSRKEFWRFVLAAFLAGIALGILSAIPFLGKLFAIVATFFQLAVIALSLSVGIRRLHDVNKSGWLMAPYLVXFIPLIIXHFITGFVVSPRPTTVNPSTHLADMDAYMASAHRLSVLNNLSGXFSVVGIVGFIILALFWFREGDPGENKYGPKPE

SEQ ID NO: 60473 - DNA, 459 bp, Unknown
  Obtained from environmental sample
  misc_feature (1)..(459): n is a, c, g, or t
ttgcggacaaaggaaggctggctttatttgactgtggtagtcgatctttacgacaggaaggtcgtcggctggtcgatgtctgacggccttacggccgggcaaacgtgcctcgcgttggaaatggcggtggggaaccgcaccccgcgagaagggctcatatttcattccgaccgtggcgtacaatactgcagcgatgaatttcgttctgcactgaaacggctttgtcctacggctgtacaaagcatgagccgcaaagggaattgctgggacaatgcgtgtgcggagagttttttcaaaacattaaaagctgaacttgacattctggaaaaaggaggcagcgcaaaacaaattaaaacggcggtatttgaatatatcgaggcttattataacaggtgtcgtagacattctgctcttggatatgctataccaatagcattagcacctaacgatgcggcttaa

SEQ ID NO: 60474 - protein, 152 aa, Unknown
  Obtained from environmental sample
  DOMAIN (1)...(148): Integrase core domain
  misc_feature (1)..(152): Xaa is any amino acid
MRTKEGWLYLTVVVDLYDRKVVGWSMSDGLTAGQTCLALEMAVGNRTPREGLIFHSDRGVQYCSDEFRSALKRLCPTAVQSMSRKGNCWDNACAESFFKTLKAELDILEKGGSAKQIKTAVFEYIEAYYNRCRRHSALGYAIPIALAPNDAA

SEQ ID NO: 60475 - DNA, 750 bp, Unknown
  Obtained from environmental sample
  misc_feature (1)..(750): n is a, c, g, or t
gtggcgtggagcggcagttatctcgtggcggcgtgggtgggcaacgccgacaaccgctcgatgaagcgtctgacgggctacgagggcgcggcgccgcttgtgaagaagataatgcaggatctccatccggatcggcgcgacggcctctacgagggcggctttccggtccccgaggggtggagcccattttccatctgccgcctgaccggaatgcttgccgacgaaaatacgccctacgtgacgagcgactactttgctcccggcacggagcccgcggaggttagcgccgtgttgcgcgttctgccggtggacaagcgcaacggtctgctgggcgataagcgttgccccaagcagtatttggaatacaggaggtttttgtcgctgccgccggagtacgagccgtgggggcgcgcctacgggctgcccatcgccccgcgcctgcgcagcccgctgtgccccggcggcgaggatctgccgacggactacgcgctggagatcacctggccgcggtcgggcgcccgcttcttcgttgaccccgagacgccgccggatcaggcgtttctgccggtcaactgcgtgtcggagccggaggcgcgcagcctcttgtggtttgtcaacggggaggagcataccgtgaccaacccgccgcatacgctgcgtttgccgttcaagagcgggaagtacgccgtccaagcggaggtgtcggggacgccggttcgcagcaaggtcgttcggtttgaggtctactag

SEQ ID NO: 60476 - protein, 249 aa, Unknown
  Obtained from environmental sample
  misc_feature (1)..(249): Xaa is any amino acid
MAWSGSYLVAAWVGNADNRSMKRLTGYEGAAPLVKKIMQDLHPDRRDGLYEGGFPVPEGWSPFSICRLTGMLADENTPYVTSDYFAPGTEPAEVSAVLRVLPVDKRNGLLGDKRCPKQYLEYRRFLSLPPEYEPWGRAYGLPIAPRLRSPLCPGGEDLPTDYALEITWPRSGARFFVDPETPPDQAFLPVNCVSEPEARSLLWFVNGEEHTVTNPPHTLRLPFKSGKYAVQAEVSGTPVRSKVVRFEVY

SEQ ID NO: 60477 - DNA, 1575 bp, Unknown
  Obtained from environmental sample
  misc_feature (1)..(1575): n is a, c, g, or t
gtgagcgggtgcttagggcagtacgtatcgatatcaccctacggaaacagaatcgcgggcgcgccgtgcgcctcgcggcggtattttagaaaacccgtgcaggatttaagtctggcggagagcgcgctcctcgtgtctataccgagagcgcccggacggatgaacctgtttactccgagcggttcgcccgccgctagatcacgcgcgctgtttatactcggacggtgcgccgactacgggtggatagacagtacggaacatcggcaatcgtcggcggagttgaaagagttcatcatcccgccgaaagatattagggacgaggcgtctatacacgttgcgcttaagtatacgaaaatgctgcatagcgcggttagaaacggcggcataaacggtaaaagaagtattagcaataacggcatcggcagcgtaaatatcaacggtataaataacatcaacaatatagacgaaacggatataggcgacagcattgtcagccacgggcttgtcgtttcatcgatagacatcgatctccagcggtacgcgcaacgcgaactcgccaaccacctagatcatctcaaaacccgcgatgtggagaacggcgcggtggtagtgctagacaaaaacaatcgccaagtattggcgtacgtaggctcaggcgggtattttagttttgacaacggtatgcttgactacgcggcgataaggaggtctacgggcagtctgatgaagcccttcatcttcgcgctcggcatggaggatttggggtacacggcggcgacggttctcaaagacatcaactacgatttcggcgagggggcgcgttcgttcattccggtcaacagcgacaggcagtaccaaggccctatactatataaatacgccttggccaacagcagaaacattccggcggtgcagttgatgaaggagctcggcatccacaaagtctacggtcgtctaggcgctcttgaattagcggaggacgacgggcgcagcgactactacggccttgggctgtctataggcggattgtactgcggcctcacgtcgatcgcgagggcgtacacggccttggggaacgacggacaattcggcgaactcgtttggcttagagatcaatcgggcgggcaacgcanacaggtgttcactccgcaatcggcgaggatgatccagcgttttttgtccgacccgcaagcgcggcttccgacctntccgcgcgaggggaatttcgagtacccctttgccgcggccgtaaagaccgggactttccgaggggttcagggacgcgtggtgcgtggcgtggagcggcagttatctcgtggcggcgtgggtgggcaacgccgacaaccgctcgatgaagcgtctgacgggctacgagggcgcggcgccgcttgtgaagaagataatgcaggatctccatccggatcggcgcgacggcctctacgagggcggctttccggtccccgaggggtggagcccattttccatctgccgcctgaccggaatgcttgccgacgaaaatacgccctacgtgacgagcgactactttgctcccggcacggagcccgcggaggttag

SEQ ID NO: 60478 - protein, 524 aa, Unknown
  Obtained from environmental sample
  DOMAIN (200)...(456): Penicillin binding protein transpeptidase domain
  misc_feature (1)..(524): Xaa is any amino acid
MSGCLGQYVSISPYGNRIAGAPCASRRYFRKPVQDLSLAESALLVSIPRAPGRMNLFTPSGSPAARSRALFILGRCADYGWIDSTEHRQSSAELKEFIIPPKDIRDEASIHVALKYTKMLHSAVRNGGINGKRSISNNGIGSVNINGINNINNIDETDIGDSIVSHGLVVSSIDIDLQRYAQRELANHLDHLKTRDVENGAVVVLDKNNRQVLAYVGSGGYFSFDNGMLDYAAIRRSTGSLMKPFIFALGMEDLGYTAATVLKDINYDFGEGARSFIPVNSDRQYQGPILYKYALANSRNIPAVQLMKELGIHKVYGRLGALELAEDDGRSDYYGLGLSIGGLYCGLTSIARAYTALGNDGQFGELVWLRDQSGGQRXQVFTPQSARMIQRFLSDPQARLPTXPREGNFEYPFAAAVKTGTFRGVQGRVVRGVERQLSRGGVGGQRRQPLDEASDGLRGRGAACEEDNAGSPSGSARRPLRGRLSGPRGVEPIFHLPPDRNACRRKYALRDERLLCSRHGARGG

SEQ ID NO: 60479 - DNA, 588 bp, Unknown
  Obtained from environmental sample
  misc_feature (1)..(588): n is a, c, g, or t
atgaccggaatacgctatatattacgccgaatattttatggcaaagacggtcggatatcgatccccaaaaccgtaagtttcgtgttagccgccccgccgttgttattcgtattggctgccttcgcgttcagtttgaccgacattcgcataaacgagcgcagcccgtcgtggataatccttgatcgcaactaccgcttcattgccgaaatcgagtcgccgcagggcgagatcggttactggcctatgccggaggtattgccgcaaacgcttgttacggcggttttggccgccgaggaccgcaggttccgtaaacacatcggcgtagacctaaagtcggtgggacgcgcgttcgtcaacaattacataaagagaagaggtttttccggcgcgtcgactattgctatgcagacggcgcggttgcaaaggggcgggcgcggcaatttgttttccaaggttagggattcgtttgcggcggtgtggctgacgctcttttacgggcgtgagcgggtgcttagggcagtacgtatcgatatcaccctacggaaacagaatcgcgggcgcgccgtgcgcctcgcggcggtattttag

SEQ ID NO: 60480 - protein, 195 aa, Unknown
  Obtained from environmental sample
  DOMAIN (57)...(191): Transglycosylase
  misc_feature (1)..(195): Xaa is any amino acid
MTGIRYILRRIFYGKDGRISIPKTVSFVLAAPPLLFVLAAFAFSLTDIRINERSPSWIILDRNYRFIAEIESPQGEIGYWPMPEVLPQTLVTAVLAAEDRRFRKHIGVDLKSVGRAFVNNYIKRRGFSGASTIAMQTARLQRGGRGNLFSKVRDSFAAVWLTLFYGRERVLRAVRIDITLRKQNRGRAVRLAAVF

SEQ ID NO: 60481 - DNA, 600 bp, Unknown
  Obtained from environmental sample
  misc_feature (1)..(600): n is a, c, g, or t
ttgttttgtattataattaatactatgcaagctgctttcaaacgcaaccgcctgaccttcggactcggtacttttggccgggacatggtctattccctagtaagcatgtacctgatcttctatcttaccgacgtgattaaactttccacttccactttgtggtgggttgcgggtattattcttgccgccagaattttcgacgcgcttaatgatccgatcatgggttgtattgtagataatacgcgcacgcgctggggtaagtttaaaccgtggatcgttatcggcgcgccggtgtcggcggttgttactgtccttctgtttactgactttgggcttacaggcggcgcatatatcgccgcttttgccgtgttctacctgatatggggaataagctacaccatacacgatatttcctactggtcaatgcttccaagtttaagcatcgatcaaaaagagcgcgagaaaatcggagccatcgcccgtatctgcgccaatatcggattgttcctcgttgtggcgggcattgttccgctgactactctgctcggcaataatcttggcggactgcaaaaaggctatttgtttctcgtgccgatctga

SEQ ID NO: 60482 - protein, 199 aa, Unknown
  Obtained from environmental sample
  misc_feature (1)..(199): Xaa is any amino acid
MFCIIINTMQAAFKRNRLTFGLGTFGRDMVYSLVSMYLIFYLTDVIKLSTSTLWWVAGIILAARIFDALNDPIMGCIVDNTRTRWGKFKPWIVIGAPVSAVVTVLLFTDFGLTGGAYIAAFAVFYLIWGISYTIHDISYWSMLPSLSIDQKEREKIGAIARICANIGLFLVVAGIVPLTTLLGNNLGGLQKGYLFLVPI

SEQ ID NO: 60483 - DNA, 1596 bp, Unknown
  Obtained from environmental sample
  misc_feature (1)..(1596): n is a, c, g, or t
ttgaagccggtggatgggtcgagtacgcggctgaacattactgataaagaggagacaataatggcggacaaagaaaaacggcgcataaaagtttttgacaccacgctgagggacggggagcaggcccccggatgcagcatgaacctgacggaaaagatcgaggtcgcgagacggctggaaaaactcggagtagatataatggaagcgggctttcccatatcaagcccgggcgatcttgagtccgtgaaggcgatcgcgggcatcattaccaactgctcggtagccggactctgccgcagcagagaagccgacattgatgcggcgaaggaagcgctggcaaaggcggcaagcccgcgggttcacgttttcctggcgacttcccccgtgcacatggagttcaagctcaagatgacgccggagcaggtgctggaacaggcggtatcctcggtaaagtacgcgaaaaaattctgcaacgatgtcgagttttccgcggaagacgctttccgcagcgatcccgattttgtctgcaaagttttcggcgcggtaattgaagccggagccttaactgtaaatttccccgacacggtcggctacgcgatgcccgccgaattcggagagcgcgtccgctatataaaagaacataccccgcgtatggagaaagcggcactgtccgtgcattgccacaacgacctgggactggcggtcgcgaacagtatcgccgccatcgcgaacggggcggatcaggttgagtgtacggttaacggaatcggcgaacgcgccggaaacgcgtctttggaggaactggtcatgggcctgcgggtccgcagcgactttttctccgccgacaccagaatcgacagcagccagatatacgcggcaagccgcctcgtgtcgcaggtaaccggtgttaaggttcagccgaacaaggctatcgtgggcgacaatgcgttcgcgcatgaagcgggaattcaccagcacggagtgttggcgaaaagggaaacatacgagattatgactccgcagtcaatcggcattccgcaaaaccgtatggttctgggcaaacattccggccgccacgcttttgaagagcgtcttaaagatttaggcttgagcgttagcgcggaagcgttagaaaaaatttttgcggacttcaaagaccttgccgacaaaaagaaagtggtcagcgaccgcgacattgaagcgctggtaatggacagggctatctctgttccagaaacatggaaactggatcactgggcggtaaacacaggctcggctttgggcgcggctggtgttatccgcctacagcacaaagacggcaggtttgaaaaactggtgtgtctgggcgacggtcctatagactcaatttttaaagcgattaatcaaattataggcaaagagcctgaacttgaactttatgaaatcggcgctattacaggcggttcttcttcgcagggcgagacaatggtaaaaatcacgatggacggcaggcgctggaacgggcgcggcgtctcaaccgacgtggttgaatcttcgataatggcttacctttcggcgattaacgcgatggagtgggatctggcgcagaaagagtaa

SEQ ID NO: 60484 - protein, 531 aa, Unknown
  Obtained from environmental sample
  DOMAIN (393)...(524): LeuA allosteric (dimerisation) domain
  misc_feature (1)..(531): Xaa is any amino acid
MKPVDGSSTRLNITDKEETIMADKEKRRIKVFDTTLRDGEQAPGCSMNLTEKIEVARRLEKLGVDIMEAGFPISSPGDLESVKAIAGIITNCSVAGLCRSREADIDAAKEALAKAASPRVHVFLATSPVHMEFKLKMTPEQVLEQAVSSVKYAKKFCNDVEFSAEDAFRSDPDFVCKVFGAVIEAGALTVNFPDTVGYAMPAEFGERVRYIKEHTPRMEKAALSVHCHNDLGLAVANSIAAIANGADQVECTVNGIGERAGNASLEELVMGLRVRSDFFSADTRIDSSQIYAASRLVSQVTGVKVQPNKAIVGDNAFAHEAGIHQHGVLAKRETYEIMTPQSIGIPQNRMVLGKHSGRHAFEERLKDLGLSVSAEALEKIFADFKDLADKKKVVSDRDIEALVMDRAISVPETWKLDHWAVNTGSALGAAGVIRLQHKDGRFEKLVCLGDGPIDSIFKAINQIIGKEPELELYEIGAITGGSSSQGETMVKITMDGRRWNGRGVSTDVVESSIMAYLSAINAMEWDLAQKE

SEQ ID NO: 60485 - DNA, 525 bp, Unknown
  Obtained from environmental sample
  misc_feature (1)..(525): n is a, c, g, or t
atgaaaaattttggcggagaagttttattccttgatcgcggcgatattaataccgatgaaattatccctgcaaaatatttaaccgaggatacaagaatggccttaaagccccatcttctggaagacttaaaaataaaaggttttgatcccggtaaagatattacaggaaagggagcggtactggcgagagcgaactttggatgcggctcctcgcgcgaacacgctccgtgggcttttgaagttaatggcattaacatcgttatcgctgaaagttttgcccgtatcttccgtcaaaatatgtacaactgtggaatgatcgcctgtgaagtttccgatgtgactatagaagagttgttcaaggaattcgcaaatgaaaaaacaacattgacagttgatacggacaaaggaatcttgagttttaaagcggtaggaaaagaaaaaacagtttctttcaccctaaaaaattttgaaaaagctttagttgaagccggtggatgggtcgagtacgcggctgaacattactga

SEQ ID NO: 60486 - protein, 174 aa, Unknown
  Obtained from environmental sample
  DOMAIN (1)...(113): Aconitase C-terminal domain
  misc_feature (1)..(174): Xaa is any amino acid
MKNFGGEVLFLDRGDINTDEIIPAKYLTEDTRMALKPHLLEDLKIKGFDPGKDITGKGAVLARANFGCGSSREHAPWAFEVNGINIVIAESFARIFRQNMYNCGMIACEVSDVTIEELFKEFANEKTTLTVDTDKGILSFKAVGKEKTVSFTLKNFEKALVEAGGWVEYAAEHY

SEQ ID NO: 60487 - DNA, 1248 bp, Unknown
  Obtained from environmental sample
  misc_feature (1)..(1248): n is a, c, g, or t
ttgcggctcgacagggtgttctgtcatgaaataactactccgtccgcgataaacgatcttatttccaaaaatctcgacaaggtttttgatccgtctaaaatcaaggcggtgatagatcatgtaactcccgcaaaggattcacaaacggcacagcagggaaaaaccttgcgggactgggcgcggcggcacaatatcaaggacttttttgatattggacgtaacggcgtgtgccacgcgatcttccccgaaaagggatttgtccgccccggttttacaattatcatgggcgacagccacacttgcacccacggcgcgttcggcgcttttgccgccggtgtcggaactaccgatcttgaagttgggatactgaagggtgtctgcgccttcggcaagccggaaactttgcggattgatctgcttggggaactgccgtcaggcgtttctccgaaagacgtaatccttgctgtcatttcagaaataagcgtttccggcgcttcgggaaaagttatggaattccgcgggcctgtaatttccgccatgagcatggaaggaagaatgacgatatgcaacatggcggtcgaggcgggagcgaccagcggcgtgtgtatgcctgatatgactacagtaaattacctttggccttttatcggacccggtgcttgcaccgatgacggcaataaaacatattcaaccagaaaagaagcgcttgatgatttttcaaaatggacaagcgatgacgacgcggagtattccggcgttgtcgatattgactgttcaaaacttgagccgcttgcgactgtcggctacaaaccggacgaagtaaaacctgtgcgggaacttgccggaaccaaaatcgatcaggtgtacatcggctcatgcaccaacggcagaatcgaggatttgcgcgccgcagcggctgtcctgtacgggaaaaaaatcgccgactctgtacgcgcgatcattgcgccagctaccacagacatttacatggaagctctcaaagaggggctgatacagattttccttgacgccggttgttgcgtaacaaacgccacctgcggcgcgtgcttaggaatgtccaacggcgtgcttgccgaaggcgaagtttgcgcttccaccaccaaccgcaatttttacggacgcatgggcaagggcggcatggttcacctaatgagtcccgcttcggcggcggcatcggcaatagccggcgttatcgcttgcgcgaatacatcaggggggcagtcatga

SEQ ID NO: 60488 - protein, 415 aa, Unknown
  Obtained from environmental sample
  DOMAIN (1)...(403): Aconitase family (aconitate hydratase)
  misc_feature (1)..(415): Xaa is any amino acid
MRLDRVFCHEITTPSAINDLISKNLDKVFDPSKIKAVIDHVTPAKDSQTAQQGKTLRDWARRHNIKDFFDIGRNGVCHAIFPEKGFVRPGFTIIMGDSHTCTHGAFGAFAAGVGTTDLEVGILKGVCAFGKPETLRIDLLGELPSGVSPKDVILAVISEISVSGASGKVMEFRGPVISAMSMEGRMTICNMAVEAGATSGVCMPDMTTVNYLWPFIGPGACTDDGNKTYSTRKEALDDFSKWTSDDDAEYSGVVDIDCSKLEPLATVGYKPDEVKPVRELAGTKIDQVYIGSCTNGRIEDLRAAAAVLYGKKIADSVRAIIAPATTDIYMEALKEGLIQIFLDAGCCVTNATCGACLGMSNGVLAEGEVCASTTNRNFYGRMGKGGMVHLMSPASAAASAIAGVIACANTSGGQS

SEQ ID NO: 60489 - DNA, 666 bp, Unknown
  Obtained from environmental sample
  misc_feature (1)..(666): n is a, c, g, or t
ttgttgcgtaacaaacgccacctgcggcgcgtgcttaggaatgtccaacggcgtgcttgccgaaggcgaagtttgcgcttccaccaccaaccgcaatttttacggacgcatgggcaagggcggcatggttcacctaatgagtcccgcttcggcggcggcatcggcaatagccggcgttatcgcttgcgcgaatacatcaggggggcagtcatgaaaatgtttggcggagaagttttatttcttgatcgaagcgatattaacaccgacgaaattatcccggcgaaatatttaaccgaagacacaagaatagcgttaaaaccccatcttctggaagatttgaaaataaaagggtttgatcctgcgaaagacattgctggaaaaggcgctgtgttggcgcgggcaaacttcggctgcggttcctcgcgggaacacgctccgtgggcgtttgaagtgaacggcatcaacatcgttatcgctgaaagttttgcccgcatcttcaggcagaatatgtacaactgcggaatgatcgcctgcgaactttccgcctctgccctaaacgaactgttcaaagattcgccaatgagaaacaacattgacggtggacacggaccaaagcagtttaagtttcaaagcgggcggaaaagaaaaacagtttcttttaactga

SEQ ID NO: 60490 - protein, 221 aa, Unknown
  Obtained from environmental sample
  DOMAIN (68)...(183): Aconitase C-terminal domain
  misc_feature (1)..(221): Xaa is any amino acid
MLRNKRHLRRVLRNVQRRACRRRSLRFHHQPQFLRTHGQGRHGSPNESRFGGGIGNSRRYRLREYIRGAVMKMFGGEVLFLDRSDINTDEIIPAKYLTEDTRIALKPHLLEDLKIKGFDPAKDIAGKGAVLARANFGCGSSREHAPWAFEVNGINIVIAESFARIFRQNMYNCGMIACELSASALNELFKDSPMRNNIDGGHGPKQFKFQSGRKRKTVSFN

SEQ ID NO: 60491 - DNA, 840 bp, Unknown
  Obtained from environmental sample
  misc_feature (1)..(840): n is a, c, g, or t
gtgaaagcggcgggagcagccggattattaactgatgaagcagttgataaagcagtcaaatccattaatgcgtcatctaaagccatagataccgctgcggaagatattactccggagcaggaatactacatcggcagagcggtagcggcaaatattctttctacttacaaactctatactaaggatcgaaagctgactaattacttaaacgatatctgttacgccataacaattaattctactcgtccgaatatttataagggttatcatgttgcgttgctggacagcaatgaaataaacgccttcgcgacttccggcggacatatttttgttacgcgcggacttgttaaaaccgctaaatccgaagacgcgcttgccggagtcatagcgcatgaagtcgctcacattcaattacggcacagcattaacgcgataaaaagcagccgttttgctaatgctgtaatggtaacaggcacggcggcagccagcgtgacgacaggagtggatgaaaaagaattaaccgcttttatgaatgaatcggtaggggacattgtacaaacgctatttaataatggttattcacaagctcaagaatttgatgccgacaataccgcaatgaagcttatggcatgggcgggatataacccgtcaggtttgattgaaatgcttaaatcattgagcgctgtccaaaaacccggtgtgggtcttggcaaaacacacccaactcccgctcaacgtataaacaatgctgaaatgcaggtatcagtattacaattatatagtgatgtcagtgatacaagcgcgagaagaaaagcgcggtttgcttctgcgacaaaataa

SEQ ID NO: 60492 - protein, 279 aa, Unknown
  Obtained from environmental sample
  DOMAIN (72)...(255): Peptidase family M48
  misc_feature (1)..(279): Xaa is any amino acid
MKAAGAAGLLTDEAVDKAVKSINASSKAIDTAAEDITPEQEYYIGRAVAANILSTYKLYTKDRKLTNYLNDICYAITINSTRPNIYKGYHVALLDSNEINAFATSGGHIFVTRGLVKTAKSEDALAGVIAHEVAHIQLRHSINAIKSSRFANAVMVTGTAAASVTTGVDEKELTAFMNESVGDIVQTLFNNGYSQAQEFDADNTAMKLMAWAGYNPSGLIEMLKSLSAVQKPGVGLGKTHPTPAQRINNAEMQVSVLQLYSDVSDTSARRKARFASATK

SEQ ID NO: 60493 - DNA, 1419 bp, Unknown
  Obtained from environmental sample
  misc_feature (1)..(1419): n is a, c, g, or t
atgatcaataaaagaaaaactaaaattgtatgttctttaggtcccgcatcttcctcggattccgttgtacgcgaacttatacttgccggaatgaatgtggcgcgccttaatttttctcatggggatcaaaaatcgcatcttgcttcaatagatcaggtcaggcgtatatccgccgaattgggaacacccgtcgcgcttctgctggacaccaaaggacctgagataagaacgggcatggtggaaaatgacggcactgttacgataaataaaggggacgatgttgttattgttaccgatgattcttttaccacggcggcggaaaacgggaagcccgcgcgtatttcattatcgtggaaagaagccggagaaaaattgcaaaacggacatcgtgttcttattgcggacggacttcttgagcttgaagtgacggatacagcgggagggatcaagtgccgcgcgaataataccgccgtcattgggagcaaaaaaaacgtcaaccttatcggcgtacacgccggacttcccattatgggcgagcaggataagaaggacttggaattcggcgtatcaatggaacttgattatgtcgccgcgagttttttgagctttccacacgagataaccgatataaaaaaattccttgaaagtcattcttcccacattaaaatcatagctaaaattgaaagcggtgaaggactggagaatataaaagaaattgccaggcttgcggacggcgtaatggtagcaaggggagaccttggcgtacagctccctcctgagcagattccgctggcgcaaaaacacattataaatgagtgccgttgggcgggaaaacccgtcattaccgcgacccaaatgctggactcgatgatacataatcctcgtcccacccgcgcggaactgacggatgtggcaaatgcggtactggacggaaccgacgcgatcatgctctcaggcgagaccgctcaagggttatatcctgtggaagcggtaaaaacaatggacacaatagcgtgtactattgaacaatctgaagaattccgcaaacgcatgaaaaaattacatgacgaatgtcattctgaagtacataatccaaaagaaaatctgggtatcatcatgtcgcgggcgggagttgagactgcgacatcggtaaatgcaaaagccattgtaacgccaacccgcagcggcaatactgcgcgaatcctcagcatattcaaaccgaatgaacctattcttgccgtaacgaccgatgaacgttctgaacgtattatgcagttgtactggggcgttattccttgtatcaggactaaagtcgccgactcggacagcatgatactcgatactatgaaggttgtttctgataccggagtggcgggattatctgataaaatagttctcattgcccggcttgccgcttga

SEQ ID NO: 60494 - protein, 472 aa, Unknown
  Obtained from environmental sample
  SIGNAL (1)...(23)
  DOMAIN (373)...(472): Pyruvate kinase, alpha/beta domain
  misc_feature (1)..(472): Xaa is any amino acid
MINKRKTKIVCSLGPASSSDSVVRELILAGMNVARLNFSHGDQKSHLASIDQVRRISAELGTPVALLLDTKGPEIRTGMVENDGTVTINKGDDVVIVTDDSFTTAAENGKPARISLSWKEAGEKLQNGHRVLIADGLLELEVTDTAGGIKCRANNTAVIGSKKNVNLIGVHAGLPIMGEQDKKDLEFGVSMELDYVAASFLSFPHEITDIKKFLESHSSHIKIIAKIESGEGLENIKEIARLADGVMVARGDLGVQLPPEQIPLAQKHIINECRWAGKPVITATQMLDSMIHNPRPTRAELTDVANAVLDGTDAIMLSGETAQGLYPVEAVKTMDTIACTIEQSEEFRKRMKKLHDECHSEVHNPKENLGIIMSRAGVETATSVNAKAIVTPTRSGNTARILSIFKPNEPILAVTTDERSERIMQLYWGVIPCIRTKVADSDSMILDTMKVVSDTGVAGLSDKIVLIARLAA

SEQ ID NO: 60495 - DNA, 300 bp, Unknown
  Obtained from environmental sample
  misc_feature (1)..(300): n is a, c, g, or t
atgatcgcgtcggttccgtccagtaccgcatttgccacatccgtcagttccgcgcgggtgggacgaggattatgtatcatcgagtccagcatttgggtcgcggtaatgacgggttttcccgcccaacggcactcatttataatgtgtttttgcgccagcggaatctgctcaggagggagctgtacgccaaggtctccccttgctaccattacgccgtccgcaagcctggcaatttcttttatattctccagtccttcaccgctttcaattttagctatgattttaatgtgggaagaatga

SEQ ID NO: 60496 - protein, 99 aa, Unknown
  Obtained from environmental sample
  SIGNAL (1)...(18)
  misc_feature (1)..(99): Xaa is any amino acid
MIASVPSSTAFATSVSSARVGRGLCIIESSIWVAVMTGFPAQRHSFIMCFCASGICSGGSCTPRSPLATITPSASLAISFIFSSPSPLSILAMILMWEE

SEQ ID NO: 60497 - DNA, 1644 bp, Unknown
  Obtained from environmental sample
  misc_feature (1)..(1644): n is a, c, g, or t
atgccgggatttgaaccgtactacggaggggacttgcccgatcctgcggggagaagtgaaaattattatgtatttaaaactacattttccgtcagcacggattgtttggacagggatatcacgctgtattttaatccgccgtatacgccgtttacagtcagggtcaataataccgtaatctatcagtcaggcatatacacagacggggcgtacagtaccggaacggctcttgccgcccatgtgccgctttcaggcggtttgatttattactcggaagacagcgccccaatagaaaatgttcttgtaatcgaagcgtttccccaatacgaaagaaatccgctgccggaattttcaattgccgattttacttttaatgaaagaaaagcgtttataaaaaacctcttaacttcacatcttgtgcttacggctcaaatcctttcgcttcttatagcggcttatcatttcttcctcttcttttccaggggccgcaaggatataaagtatttgtatttttcacttctgtgcctttcattcttccttgcctatgttaatgtcgggtttgtctattcttcggcgcattatacgttactcgaaaaactgagcaggatattccagatattctgcttcccattcttttctgtattcatgcttgaatcagtggggttattcggcaataaaaagaaatatattgttatcagcattctggtttacagtctgatttgcgcgtcatttatagctattcaaaacacaaaacaatcggtaaacgaaatgtttggcgttatgacaaatatcaatacaataccgattctggcgggcagtattgttattctctcttacgtcgtttttttcaggaaaaatatcaaagttgtgccgctgtttattattgcgcttactgccgccggctccagtttgcgcgatcttttagttctttcaaacggcatagagccgctgttctggatggccccctattctttcattctcatggttattttaatatacgcaatgctgattaccgaagaaaattttatccagggcgcgttttcacgctaccttgcgcctgaggtaatttccgaaattgtcaaagaccctgacaaactgaaccttggcggtgaaaagcgtgaaatgaccgcgatatttaccgatattcagggtttttccgctatttccgaacagcttgatcctgtccacattgtacagctcttaaacaaataccttacgacaatgagcgacattatcatggaacaccttggaactgtagataaatactggggggacgcaattatcgcgttcttcggagcgcctttgttcaatgctgatcacagtgcccttgcctgccgcagcgcccttgcgattaaggcggcggagagggaactaaataaaacgctagttagtgaagggttgagccctgtgcctatttttacccgaattggaataaataccggtgaaatggtagtaggtaatatgggggctgaaaaaaagatggattataccgttatggggaacgcggtaaatcttgcgtcgcgtattgaaggggtaaacaagcagtactgcactggcggcatattgataagcgaataccccgcgcgaaaatcggcgatgagttttcactgcgccgcattgaccgcgtccgcgtggttgggataa

SEQ ID NO: 60498 - protein, 547 aa, Unknown
  Obtained from environmental sample
  DOMAIN (370)...(542): Adenylate and Guanylate cyclase catalytic domain
  misc_feature (1)..(547): Xaa is any amino acid
MPGFEPYYGGDLPDPAGRSENYYVFKTTFSVSTDCLDRDITLYFNPPYTPFTVRVNNTVIYQSGIYTDGAYSTGTALAAHVPLSGGLIYYSEDSAPIENVLVIEAFPQYERNPLPEFSIADFTFNERKAFIKNLLTSHLVLTAQILSLLIAAYHFFLFFSRGRKDIKYLYFSLLCLSFFLAYVNVGFVYSSAHYTLLEKLSRIFQIFCFPFFSVFMLESVGLFGNKKKYIVISILVYSLICASFIAIQNTKQSVNEMFGVMTNINTIPILAGSIVILSYVVFFRKNIKVVPLFIIALTAAGSSLRDLLVLSNGIEPLFWMAPYSFILMVILIYAMLITEENFIQGAFSRYLAPEVISEIVKDPDKLNLGGEKREMTAIFTDIQGFSAISEQLDPVHIVQLLNKYLTTMSDIIMEHLGTVDKYWGDAIIAFFGAPLFNADHSALACRSALAIKAAERELNKTLVSEGLSPVPIFTRIGINTGEMVVGNMGAEKKMDYTVMGNAVNLASRIEGVNKQYCTGGILISEYPARKSAMSFHCAALTASAWLG

SEQ ID NO: 60499 - DNA, 1338 bp, Unknown
  Obtained from environmental sample
  misc_feature (1)..(1338): n is a, c, g, or t
ttgccagttacctcggcaattagacgctgggtttcaatcatgtcagatgactcctgcattcgccttaagcgcagcgagtgtaaagaagacgaagccgcgtttctaaatccgcgcggtgttatgtcgattttgattgtgccggtttttaccgagggtgagttttggggcgttgttacttttcaggacaataccaaggagcgggatttcgacaaggatagtattgccatgctgcgctcagccgcacgtatgtgcgtcaatacgattatcagagcggaaaaaaccaagagcgccaatcaggcggtggaagcgctcagacgacgcgaaaggatatcggatacgttaagcaaggtttccttgatctttctatctgaaaacgaggggaaagtcgaagatacgatggctgcaggcgtgcgtttgattactgatatggctgaacttgacaggctgattctttgccgcaatcacatagcagacaatagtttgcttgcgtctgaagtctaccgttgggacaggagttccgggggcagtaccgaagtgacggttgtttttgttgacgtaccttacgcacggttgatacctgattgggaaaaacttttgtctgacggaaatcacataaacagtccgtcaaggctgttgtctgaaagcgcagcctacgcgcttttatcgtttggtgttttgacagccgccgttataccaatacatatcaacaattatttttgggggttcgcgctttttggcgacaccaaaaacgaacattattttgaagatgatatcatagatatgctgcgttcggcggcatttttattcgcaaacgctttcatccgcgtcgacgcggagtatgatatgcttacaggcatttataacagacggttctttgataagaacatgaagcgtatcatacgttccttatcccgctcaggcagtttattaggaatgctgataatcgacattgacttctttaagcgttacaacgacacttacggccatgtcgaaggagataactgcctgaaaattgtcgcccaaacgctttttaacagcataacaagggcggacgattttgcggcaaggtacggcggcgaggaatttgtcgtcgttctgcccaacaccaacaaacaaggcgtgcaaattgtagcggaaaaactgctttacaacataaggaactgcaacgtcacccatgaacaaaacgacgccgcaaaatgcctgacaatttccatcggcgccaccgcaggaaaagtactgcacacgcacaccacggatgattttgtaaaaaaagccgacgagatgctttataaggcgaagcaaaacggacggaataagtatttttttgagcagctttga

SEQ ID NO: 60500 - protein, 445 aa, Unknown
  Obtained from environmental sample
  DOMAIN (128)...(273): GAF domain
  misc_feature (1)..(445): Xaa is any amino acid
MPVTSAIRRWVSIMSDDSCIRLKRSECKEDEAAFLNPRGVMSILIVPVFTEGEFWGVVTFQDNTKERDFDKDSIAMLRSAARMCVNTIIRAEKTKSANQAVEALRRRERISDTLSKVSLIFLSENEGKVEDTMAAGVRLITDMAELDRLILCRNHIADNSLLASEVYRWDRSSGGSTEVTVVFVDVPYARLIPDWEKLLSDGNHINSPSRLLSESAAYALLSFGVLTAAVIPIHINNYFWGFALFGDTKNEHYFEDDIIDMLRSAAFLFANAFIRVDAEYDMLTGIYNRRFFDKNMKRIIRSLSRSGSLLGMLIIDIDFFKRYNDTYGHVEGDNCLKIVAQTLFNSITRADDFAARYGGEEFVVVLPNTNKQGVQIVAEKLLYNIRNCNVTHEQNDAAKCLTISIGATAGKVLHTHTTDDFVKKADEMLYKAKQNGRNKYFFEQL

SEQ ID NO: 60501 - DNA, 2019 bp, Unknown
  Obtained from environmental sample
  misc_feature (1)..(2019): n is a, c, g, or t
atgccggtggaactcaaaaccaataaaaccggagaaacaataaaaatttctgtcgaaatggcgggaagaacagtaattgcacagatttgggaagtccgcgttgggcgtagctccctctaccttttggataccaacatatctgaaaattcccaggatttgcggaatatcacctcttcactttacggcggagacaaagaaacccggatgcagcaggaaatactccttggcatcgggggaatcagggctctgcgagcgctcggtataaacccggccgctacacacatgaacgaagggcattcggcgtttttgggcctggagagaatcagggaactcatagtggaaaagggcttcacttttgatgaggccagggaggccgtgtggccgaccaatatcttcacaactcacactccagtacctgcgggaaatgaacggtttgatatcagccttatggaaaaatacttcaatacttggccccaggttctgggcatttcctggagggattttatcagccttgggcgtgagcggccctatgatgatcatgagaatttctgtatgaccgtgctggcaataaaacttgccgcttatgccaacggggttgccaaacttcatggggtggtttcccgtgatatgtggaaaaacctatggccgggccttcccctggacgaagtacctatcagccatgtgactaacggcgttcacccgcatacttgggtttccagcaatatgagcgaactattggcccggtacttcggcccccattttgacgagacgcccacggatctttcagtttggaaccgtatggacaggatttcggacgaggagctttggcgcactcatgaacgccgcagggagcggcttgtggcgtttgcccgtgatagaatccgtgaacagtacaaacggacaggcgctgtggagcgccgtgtcaggcaagccgaagacgctctgtccccatacacactgaccctttgttttgcacggcgttttgcaacctacaagcgaggcaccctgcttttacgcgatccggaccgccttctcaggcttataaaagataatgatcggccaattcagcttattttcgccggaaaagcacatccccatgatatgcccggcaaagagctaatccgcgaaattgttcattttgcggaaaaaaatgatgtttccagccgaatcgtgtttattgagaactatgacatgactgtggccaaataccttaccacaggcggcgacgtttggcttaacaccccgaggcggcccctggaagcttccggaaccagcggcatgaaagccgccgtcaatggggttcttaactgctccatacttgacggctggtgggatgaagcctataaccccgaggtgggatgggcaataggccgcggtgaagaatacgaagacaccaatttacaggatgaaatcgagagtaaggctctttatgatcttttggaaagggaaataatccccctcttttatcagcggggaagggacggtctcccccgggaatggatcaaaatgatgaaaacctgcatgaaagaaatcggccagtccatgtcaagccaccggatgttgatggattattcaaacaagttctatttccctgccctgaaaaactatcgccggataataaaggacgatttcaaggaatcaaaagccctggccgcttatctgacaaaattacgccaggcctgggacagcatcaccatcagcaaaatcgaagccaattcgaagccggttatgcagcggggtgattttctgactgtgaacgctaaaatagagttaggctcccttaccccggatgaagtacaggtggagctttaccacggttccgtatcgaatcagtccgccgacatcaaaaatgcccggcgctcggaaatgaagtccatcggaaaggatggaaccgcgtatcgataccaggtcaggatcgaatgtaatgacacaggttaccagggacacaccatcaggattctacccaaacatgaggccctggttcatccatacaggactggttttataaagtgggcttaa

SEQ ID NO: 60502 - protein, 672 aa, Unknown
  Obtained from environmental sample
  DOMAIN (3)...(527): Carbohydrate phosphorylase
  misc_feature (1)..(672): Xaa is any amino acid
MPVELKTNKTGETIKISVEMAGRTVIAQIWEVRVGRSSLYLLDTNISENSQDLRNITSSLYGGDKETRMQQEILLGIGGIRALRALGINPAATHMNEGHSAFLGLERIRELIVEKGFTFDEAREAVWPTNIFTTHTPVPAGNERFDISLMEKYFNTWPQVLGISWRDFISLGRERPYDDHENFCMTVLAIKLAAYANGVAKLHGVVSRDMWKNLWPGLPLDEVPISHVTNGVHPHTWVSSNMSELLARYFGPHFDETPTDLSVWNRMDRISDEELWRTHERRRERLVAFARDRIREQYKRTGAVERRVRQAEDALSPYTLTLCFARRFATYKRGTLLLRDPDRLLRLIKDNDRPIQLIFAGKAHPHDMPGKELIREIVHFAEKNDVSSRIVFIENYDMTVAKYLTTGGDVWLNTPRRPLEASGTSGMKAAVNGVLNCSILDGWWDEAYNPEVGWAIGRGEEYEDTNLQDEIESKALYDLLEREIIPLFYQRGRDGLPREWIKMMKTCMKEIGQSMSSHRMLMDYSNKFYFPALKNYRRIIKDDFKESKALAAYLTKLRQAWDSITISKIEANSKPVMQRGDFLTVNAKIELGSLTPDEVQVELYHGSVSNQSADIKNARRSEMKSIGKDGTAYRYQVRIECNDTGYQGHTIRILPKHEALVHPYRTGFIKWA

SEQ ID NO: 60503 - DNA, 714 bp, Unknown
  Obtained from environmental sample
  misc_feature (1)..(714): n is a, c, g, or t
ttgatggccctttttgtggctattctcgttaccagtaatgtcgcttcttccgcaaaaatcgtggatttgggggataacccctcttggttttttggggaattccccctgtccctctggcttttgacggcggaaccctccttttcccncatcgtttatgttttgggggatgtttttaccgaggtttacggtttccgctttgcccgccgggttatatggacaggttttattgctctgtccctctgttccctgcttttttttgcccttgcccgcctgcctgccgatgaagtatgggaaagctatgccggaaccgccgcttttaacgccattctcggcggaatgagtaccggaggcatcgccctcgcaagcctggcaggctacctggttggcgaattttccaattctatggttttatcccgccttaaaatttatatgaaaggccgcgcgctctgggtgagggcaatcggcagcagcctggtgggggaattgctggacagcctggcatttgtgtttttcgccagccttaccggtgtattcggctgggaactttttatttcccttgtcctgacaaattacctttttaagctttcaatcgaaatattggtattcccattaacgtttataacggtgaggaagcttaaaaaagtcgagaggacagacgcatacgatgttgatgtcaggtatagacttttttattttggaggcaaaaatggataa

SEQ ID NO: 60504 - protein, 237 aa, Unknown
  Obtained from environmental sample
  SIGNAL (1)...(18)
  DOMAIN (30)...(195): Uncharacterized ACR, YhhQ family COG1738
  misc_feature (1)..(237): Xaa is any amino acid
MMALFVAILVTSNVASSAKIVDLGDNPSWFFGEFPLSLWLLTAEPSFSXIVYVLGDVFTEVYGFRFARRVIWTGFIALSLCSLLFFALARLPADEVWESYAGTAAFNAILGGMSTGGIALASLAGYLVGEFSNSMVLSRLKIYMKGRALWVRAIGSSLVGELLDSLAFVFFASLTGVFGWELFISLVLTNYLFKLSIEILVFPLTFITVRKLKKVERTDAYDVDVRYRLFYFGGKNG

SEQ ID NO: 60505 - DNA, 564 bp, Unknown
  Obtained from environmental sample
  misc_feature (1)..(564): n is a, c, g, or t
atgttgatgtcaggtatagacttttttattttggaggcaaaaatggataatgcgcttgtgcttttccagaccgatccagcctttcgcaatgagcttgaggctattttatgtaattttaaggttgtttttaatgaaagcgcggacacctcttccattgatactgggactgtgaaagaaacgcttgttattttcggcaatccaaagcccgattttttaatgctctgtccccgcctaagatggcttcagcttcaaaccgccagcgcgaacgactatgtcaacgggggagtacctgatggcatcatgctttcatgtacgacaggagcctttgggcacgcagtttcggaacatatgctggctctgaccattgagcttctaaaaaattgcatctttaccgggatgaacaggtcgcaggtcgctggaaagagcgtggaacggttaaaacatccagggcgcggtagttgtcgttatcggtcttggggacataggctcagcctatgcccggcgcatgaaagcttttggagcgtatatcattggtattcgccgcaccgcccatgccaagcctga

SEQ ID NO: 60506 - protein, 187 aa, Unknown
  Obtained from environmental sample
  misc_feature (1)..(187): Xaa is any amino acid
MLMSGIDFFILEAKMDNALVLFQTDPAFRNELEAILCNFKVVFNESADTSSIDTGTVKETLVIFGNPKPDFLMLCPRLRWLQLQTASANDYVNGGVPDGIMLSCTTGAFGHAVSEHMLALTIELLKNCIFTGMNRSQVAGKSVERLKHPGRGSCRYRSWGHRLSLCPAHESFWSVYHWYSPHRPCQA

SEQ ID NO: 60507 - DNA, 303 bp, Unknown
  Obtained from environmental sample
  misc_feature (1)..(303): n is a, c, g, or t
atgaaaaaaaacgctgtggtagtaaacgccggacggggtttcagcatcgatacggaagccctttgtgacgcccttgaatcgggcaacctggggggagccggccttgatgtaacggatcccgagcctctgcccgccggtcaccggctttggaagctggaaaacgccgtaattaccccgcatgtatcagggttcttcttcatgaaagaaaccggcaagtacatcatgcagatcaaccttgaaaatgcccggcgttatatccagggtaaaccgctggaaagcctcgtggactttaaaacaggctaa

SEQ ID NO: 60508 - protein, 100 aa, Unknown
  Obtained from environmental sample
  DOMAIN (1)...(62): D-isomer specific 2-hydroxyacid dehydrogenase, NAD binding domain
  misc_feature (1)..(100): Xaa is any amino acid
MKKNAVVVNAGRGFSIDTEALCDALESGNLGGAGLDVTDPEPLPAGHRLWKLENAVITPHVSGFFFMKETGKYIMQINLENARRYIQGKPLESLVDFKTG

SEQ ID NO: 60509 - DNA, 699 bp, Unknown
  Obtained from environmental sample
  misc_feature (1)..(699): n is a, c, g, or t
atggaactgtttatcggcgaatacgccaagattcggagcagcgtaaaattcaccgtcagcgcgaccggctccggcgacggaatcaaaggtgtgcctgccggtacatgcgaaataggtatgtccagccgggaactgactcctgccgagatcgggacgggaattgacgagcttgttatcgctatcgacggtatcgcagttatcatcaataacgcgaacccgattgcgagtctgacccaggagcagatcaggaatatctacaccggagagatcaccagttgggagcagctgggcacggcggccctgggcaagaccgggcgtatcgctgtggtttccagagaaccgggatcgggaacgcgaggcgcttttgaagagatcctcaagttccaggacaagctggtcaggggcgcgatagagttcgatggtactggcgctatcaaagccgaagtgtcccgcaacgccgacgcaatcggctacatctctctgggttctttggataattcaatcaaggccctgaacgttgacggaatcgccgctactacgggcaatgtggtttcaggctcctacaaaatcgccaggccctttattttattgacaaaaaaaggcgttgctctaaacgccgaaactaaggcgtttctggattgggtcatgagtcctatcggacaaaacattgtaaaaacaagctggatcagcgttaagtaa

SEQ ID NO: 60510 - protein, 232 aa, Unknown
  Obtained from environmental sample
  misc_feature (1)..(232): Xaa is any amino acid
MELFIGEYAKIRSSVKFTVSATGSGDGIKGVPAGTCEIGMSSRELTPAEIGTGIDELVIAIDGIAVIINNANPIASLTQEQIRNIYTGEITSWEQLGTAALGKTGRIAVVSREPGSGTRGAFEEILKFQDKLVRGAIEFDGTGAIKAEVSRNADAIGYISLGSLDNSIKALNVDGIAATTGNVVSGSYKIARPFILLTKKGVALNAETKAFLDWVMSPIGQNIVKTSWISVK

SEQ ID NO: 60511 - DNA, 1194 bp, Unknown
  Obtained from environmental sample
  misc_feature (1)..(1194): n is a, c, g, or t
atgatacctaggcgacttattgacactgcttttacatggcttttcagggcgttctcttttaccggagttgccgccctgggtgccattgttgttttcatactaatccagggggcagagcctttttttgtccctaccgccagaaccgtgcgaattgttaccgaaaggctggacagggttacaattaacggcaaggtttacgaaaaccccgaaggctttattgaattcccctgggacattaaaaacgtttcctttcaatttattaacaagggggaagagcgggagttgatcttccgtctttcgcctgataaaaattatcgcacaaggttgcttcagccgattgaagctggagatgccgatgtaagttttccggatgcgaacacttgctcggtgagcttccctggggcgttacccggtctcaaccagaagatacacatcattctgccagagccgccctacaatttattcaagtttatcgccggtatggaatggcttccggcatacagaaaagtctacgggatttttcccatgatcctgggcagcatactggtctgctttggagcgcttcttattggtgtgccgatagccctgctctgcgccctttttatggcggagtttcttccgccaaagctcgctaatgtttttcgtagcggcgtggagcttttggcaggtatcccttcggtggtatacggatttttcggccttatggtaatcgtgccgctggtcaagcagactttcaaaacgccgtcgggaaacagcctgctttcggttgtgattgtccttgcgataatgatcctgcctacgatcataaccgtgtccgaaaaatgcctgcaagcggtgcccctctctcggcgcgaggcgtccctggcgttaggcgcaagcaagatgcagaccgccttgcatgtggttttgccccacgctaagtccggcgtactggctgggatcatactcggcttttcccgcgccgtgggcgagacaatggcggttatacttgtcgcgggaaactcggtgcagctgataaaaagccctctggaaggggtaaggactttaaccgcgaccatcgccctggagatgggttacgctgagggcagacattcgcacatgctttttgccattggcatagtcctgcttgtaatgatccttcttcttaatggccttatccttttaatacgccgccggggagaggcagacgcgtga

SEQ ID NO: 60512 - protein, 397 aa, Unknown
  Obtained from environmental sample
  SIGNAL (1)...(24)
  DOMAIN (177)...(395): Binding-protein-dependent transport system inner membrane component
  misc_feature (1)..(397): Xaa is any amino acid
MIPRRLIDTAFTWLFRAFSFTGVAALGAIVVFILIQGAEPFFVPTARTVRIVTERLDRVTINGKVYENPEGFIEFPWDIKNVSFQFINKGEERELIFRLSPDKNYRTRLLQPIEAGDADVSFPDANTCSVSFPGALPGLNQKIHIILPEPPYNLFKFIAGMEWLPAYRKVYGIFPMILGSILVCFGALLIGVPIALLCALFMAEFLPPKLANVFRSGVELLAGIPSVVYGFFGLMVIVPLVKQTFKTPSGNSLLSVVIVLAIMILPTIITVSEKCLQAVPLSRREASLALGASKMQTALHVVLPHAKSGVLAGIILGFSRAVGETMAVILVAGNSVQLIKSPLEGVRTLTATIALEMGYAEGRHSHMLFAIGIVLLVMILLLNGLILLIRRRGEADA

SEQ ID NO: 60513 - DNA, 852 bp, Unknown
  Obtained from environmental sample
  misc_feature (1)..(852): n is a, c, g, or t
gtgaactatcttaaaaaaagaaaagttaccgatagcctttggtacgtcctgatggccgttgcttccgtagcggtaggagctgcgcttatcggaattatcgcctatatacttgtccagtccgcgggaatgtttaagctttccgttatttttggccccgtgagtgaaagccttctccccatgattgcggctaccgcctggacagtggttgtgtctctggctattgctgtgccgtttgggatcatgacagccatctacctgcacgagtacgctttcaaatccggtttaagcagctttctggggcttgccattgatacccttgccggcattccttctattatatacggccttttcgggctgttgtttttctgccgctttttgcatttgggtcagtccattatcgcgggcgggcttaccctgagcatcatgatccttcctgtgatcatcagaacgacagaagaagcgcttaagacagtgccgggttcttttcgggagggttctctttccctgggggccaccaaatttcaaaccatactccatgtggttctgccccccgcgatgcctggaatccttactgcggcgatacttggcgcgggccgcgtggtgggcgaatcggctcctgtgctgcttaccgtcgggattgcgcgtaacctgcccaaaacaatatttgagtcaggccgcactttgacaattcatttatattacctcaccaaagaagcaatcgaggccgacgattttgcccacgcttttaccgccgccgctgtgttgatcgtggtggtgcttatcataaatacgttggtaaagctattatacagaggcactgccggaagcggcattggagaaaacgcggattaa

SEQ ID NO: 60514 - protein, 283 aa, Unknown
  Obtained from environmental sample
  SIGNAL (1)...(27)
  DOMAIN (57)...(275): Binding-protein-dependent transport system inner membrane component
  misc_feature (1)..(283): Xaa is any amino acid
MNYLKKRKVTDSLWYVLMAVASVAVGAALIGIIAYILVQSAGMFKLSVIFGPVSESLLPMIAATAWTVVVSLAIAVPFGIMTAIYLHEYAFKSGLSSFLGLAIDTLAGIPSIIYGLFGLLFFCRFLHLGQSIIAGGLTLSIMILPVIIRTTEEALKTVPGSFREGSLSLGATKFQTILHVVLPPAMPGILTAAILGAGRVVGESAPVLLTVGIARNLPKTIFESGRTLTIHLYYLTKEAIEADDFAHAFTAAAVLIVVVLIINTLVKLLYRGTAGSGIGENAD

SEQ ID NO: 60515 - DNA, 531 bp, Unknown
  Obtained from environmental sample
  misc_feature (1)..(531): n is a, c, g, or t
gtgacgatagggggtaagaagtggatggcggagaatttgaacagagagacgacggattcttggtgttatggggagggcaattcatcatacacggaatcagaggtgcaggcaaattgcaacaaatacgggaggctgtatacgtgggcggctgcgaaagcggcatgtcagtcgatagggtggcatttgcctagtcgtgacgagtggggtgcattggctaaggcagctgggggtacagatacgtatggaacgggcggtacggctggcaatgcgttgaaatcgacgagcggttggattagtggtggtaatggtaaggatagtcttggcttttcggccttgcctggcggcatccgctactactccgatggcaatttctacaatgtcggcaactacggcatctggtggacgaacacggagagcaatagtaacgctcacgcttacgtccggtacatgggctacgacggcgtctacgtgtacgagaacagctactacgagagctacggttactccgttcgttgtgtcgccgacgactga

SEQ ID NO: 60516 - protein, 176 aa, Unknown
  Obtained from environmental sample
  misc_feature (1)..(176): Xaa is any amino acid
MTIGGKKWMAENLNRETTDSWCYGEGNSSYTESEVQANCNKYGRLYTWAAAKAACQSIGWHLPSRDEWGALAKAAGGTDTYGTGGTAGNALKSTSGWISGGNGKDSLGFSALPGGIRYYSDGNFYNVGNYGIWWTNTESNSNAHAYVRYMGYDGVYVYENSYYESYGYSVRCVADD

SEQ ID NO: 60517 - DNA, 426 bp, Unknown
  Obtained from environmental sample
  misc_feature (1)..(426): n is a, c, g, or t
atgaaaccgggacgctattatgttgattcgaatatagtgatctatcgcgccagcgatcagggactgctcacggcggaagttaaggatattctcaaagactcctgcaactatatatacgttccgtccaaatgcgtggaggaactgatattcctgcagcaatccgggcggatagaggtcaaaatctggaaatccgccgaggatattatcgggtatattgaagacgaactgtcctacgagataaggtacgtcaagaaagggcacttgcagacgctcgcgcgtctgccgctcttccctgaccacagagaccccacggataggatcgctatcgcgcaggctatcgatgaaaatataccgattatcagtagcgacagacagtttcatgactacaaacgctccgggttagaattcatctacaataaacgttaa

SEQ ID NO: 60518 - protein, 141 aa, Unknown
  Obtained from environmental sample
  DOMAIN (6)...(137): PIN domain
  misc_feature (1)..(141): Xaa is any amino acid
MKPGRYYVDSNIVIYRASDQGLLTAEVKDILKDSCNYIYVPSKCVEELIFLQQSGRIEVKIWKSAEDIIGYIEDELSYEIRYVKKGHLQTLARLPLFPDHRDPTDRIAIAQAIDENIPIISSDRQFHDYKRSGLEFIYNKR

SEQ ID NO: 60519 - DNA, 1116 bp, Unknown
  Obtained from environmental sample
  misc_feature (1)..(1116): n is a, c, g, or t
atgatggaaataggaatggatgtttcgactcttgaagaaacagagcggttaggcggcaaattttatgaaaacggaaaagaagccccgcttttggatattctaaaaaggcatggggtaacaagtatccgtttgcgcctctggaatgacccttttaacgaaaagggcgaaaattacggcgcgggcggctgcgatatagaaactgttttacgcgccgcgcgacgcgctgcggaaaacggaatgacctggattctggattttcactactcggacttttgggcggatccgtccaggcagcttatcccgaaagcgtggcaggggtttacccttgaaaagctggaaaaagccgtttatgagtatactaaagagatccttgcccgctgtaaaaaagaggcgctctatcccgcttatgtacagacaggaaatgagattaccaacggcatgctttggcccgcgggcaaggtgaattacgacaagcttacaggcgatcctgtcagttacgataatatgacgcacctgataaaggctggggccgcggcggcgcgtgaaagcggagacgttaaaataatttttcaccttgaaaagtcctgtgataacctaagataccgccaatggtttgatgcggttaccgcggcgggagttgattacgatattataggggtttcgtactatccgcattggcacgggaccctgaacaatctcaagaaaaatttagatgatattacagagcgttacaataaggacgtaatgatcgtggaaaccgcgtatccgtttaccaatgagcattattccgatattcccggcgtttcacttgtcattagcgacaaaataaaatcgcctctcggcagccctccgccgtatccgcacagcgtagaagggcaaagcctctttttgcgcgatcttgttaaaatggcaaaaagcgttaaacgctgtaagggcctgtattattgggaacccggatggcttcctctggacggatcaacatgggctgcggagtccgcgcgcaagtatataggcgaggaacacaaggccggaggaaacgaatgggcgaatcagtgcctgtttgattacaaaggaaatttactgcccgcgattaacgaattggatggcctgcaatga

SEQ ID NO: 60520 - protein, 371 aa, Unknown
  Obtained from environmental sample
  DOMAIN (5)...(367): Glycosyl hydrolase family 53
  misc_feature (1)..(371): Xaa is any amino acid
MMEIGMDVSTLEETERLGGKFYENGKEAPLLDILKRHGVTSIRLRLWNDPFNEKGENYGAGGCDIETVLRAARRAAENGMTWILDFHYSDFWADPSRQLIPKAWQGFTLEKLEKAVYEYTKEILARCKKEALYPAYVQTGNEITNGMLWPAGKVNYDKLTGDPVSYDNMTHLIKAGAAAARESGDVKIIFHLEKSCDNLRYRQWFDAVTAAGVDYDIIGVSYYPHWHGTLNNLKKNLDDITERYNKDVMIVETAYPFTNEHYSDIPGVSLVISDKIKSPLGSPPPYPHSVEGQSLFLRDLVKMAKSVKRCKGLYYWEPGWLPLDGSTWAAESARKYIGEEHKAGGNEWANQCLFDYKGNLLPAINELDGLQ

SEQ ID NO: 60521 - DNA, 1170 bp, Unknown
  Obtained from environmental sample
  misc_feature (1)..(1170): n is a, c, g, or t
gtgcagaaaaaccccggcaaattctacgccaacctgcagaacaacatcaagaaaggagcgcctacaaagtcgtttctgtggcctcttgatttggtgaagaaaggggacgatttcggttatatcatggagttgcggccccccgattacaaggacttttcccatatacttttaggcaaggaactggtgaatgaccagatagtaaaactgcgctggccgggcatttcaccgaaggttacggcggccttaaatattaccgccggattccgcgccctccattccaatggatataactatcaggatctgaacgacggcaacttttttatcaacctgagcgacccagcaaagtatggggatgtgctaatctgcgacaacgacaacgtggctgctcacccatcgggtatagccgggaaagcgcgatacatggcgccggaagtggtgctgggttccgatcctgataataagactgatgctttctctctggcggtggtgctgtttatgctctttgtgaacaaccatccccttgagggaaaggcagtactggaagctgatccttggaatgatgaagcggaaaagaaattttacggcaaagacccggtatttatcctggatccctatgacaaatccaacgctccggtgccaggtatacatcagggcgcggtaaaacgctggcccttcctgcctcagtacatcaaggatttgtttttaaaagctttcagcaaggaggctatgaaggataaggcatacagggttcttgagagagattggattcaggcctttgtccgcatgaggggagaaatatggaagtgtccgttatgncgtgaagtatacatagctgatccggtgacgcctaacccctgtccgtcatgcaataaacctcatgcctttctcttctatataaaaacatccagcggctataacgtgcccgcccaccagcggacggtgttgtatcagtgccatacaactaccgatgccgccggcgaagactttgatgtaaaaacaggggaaatgatggtcaagggagatgagatagggttgaagaacctttccaacgagcgatggtcgcgtatcaaagacgacgttcaggcgccggtagaacccggacgggccgcgagactcgaaaaaggcgttaaactggattttggcagaggggcgtctgcggaaattatataa

SEQ ID NO: 60522 - protein, 389 aa, Unknown
  Obtained from environmental sample
  misc_feature (1)..(389): Xaa is any amino acid
MQKNPGKFYANLQNNIKKGAPTKSFLWPLDLVKKGDDFGYIMELRPPDYKDFSHILLGKELVNDQIVKLRWPGISPKVTAALNITAGFRALHSNGYNYQDLNDGNFFINLSDPAKYGDVLICDNDNVAAHPSGIAGKARYMAPEVVLGSDPDNKTDAFSLAVVLFMLFVNNHPLEGKAVLEADPWNDEAEKKFYGKDPVFILDPYDKSNAPVPGIHQGAVKRWPFLPQYIKDLFLKAFSKEAMKDKAYRVLERDWIQAFVRMRGEIWKCPLXREVYIADPVTPNPCPSCNKPHAFLFYIKTSSGYNVPAHQRTVLYQCHTTTDAAGEDFDVKTGEMMVKGDEIGLKNLSNERWSRIKDDVQAPVEPGRAARLEKGVKLDFGRGASAEII

SEQ ID NO: 60523 - DNA, 822 bp, Unknown
  Obtained from environmental sample
  misc_feature (1)..(822): n is a, c, g, or t
gtgccttcgaaaacacgaataaggagaattattatgggattgaatgacgatgtagacgtagcaagaagagtaatggttttgttttttctggtggacacgtcgggaagcatgagcggctcaaagattggggcggtgaaccacgccatagaagaagttatcccggagataaaaagcatttccgtggggaacgcggacgcgcagatcaagattgcggtgatgaaatttgacaacagcgtcgaatggattaccaaaaacgggcccgaagattcggaaacttttatctggcgcagtctggacgcgaacggcatgacctacatgggcgaggcttgcaggcttcttgacaagaaactctccaccaaagaaggagggtttatgcgtgaggctaccggctcttacgcgcccgcgatttttatgatgtccgacggccagcccaatgacgactttgacggggggctgaaggcgttaaaggaaaacaactggttcaaagccgcggtaaaggttgcaatcgcaataggcgatgatgctaacaaggatgtgctcgcccagtttgtaggctccccggagggcgtgattaccgcccacgacgccgccacattaaagaaatggataaagtttgtcagcgtaaccgccagcaaagtcgccagcaaaagttccaacgccaaatccaacgcggacggaacccccgcgcccgacaacgcgaaacaggtggaactgcaacaggccatagccggacaggccgccgccacgggcgctactgtagggtcggacggcaccataaacgcgcccgccgcgtccacggccagtcccgacgacgtgtggtaa

SEQ ID NO: 60524 - protein, 273 aa, Unknown
  Obtained from environmental sample
  DOMAIN (27)...(203): von Willebrand factor type A domain
  misc_feature (1)..(273): Xaa is any amino acid
MPSKTRIRRIIMGLNDDVDVARRVMVLFFLVDTSGSMSGSKIGAVNHAIEEVIPEIKSISVGNADAQIKIAVMKFDNSVEWITKNGPEDSETFIWRSLDANGMTYMGEACRLLDKKLSTKEGGFMREATGSYAPAIFMMSDGQPNDDFDGGLKALKENNWFKAAVKVAIAIGDDANKDVLAQFVGSPEGVITAHDAATLKKWIKFVSVTASKVASKSSNAKSNADGTPAPDNAKQVELQQAIAGQAAATGATVGSDGTINAPAASTASPDDVW

SEQ ID NO: 60525 - DNA, 906 bp, Unknown
  Obtained from environmental sample
  misc_feature (1)..(906): n is a, c, g, or t
ttgaggataaaatttttcgcgtcgcggttttttttctgtctttttctctgttttttgataaccgccgccgccggcccccgctggggcgttggacaggcgagaaacgagtacagacgcgcggtagacgttgtgctcgctattgatgtttccaaaagcatgcttgtatgcgatggcaagacagcctccggcggctttgccggccacgactccgggggtggcaccgcaagtggtattacaggaagtattacagaaggcgttagccgcttaaaacaggggacgtcaatcgtgagggaagccgtcgccgcccttcccatgcgttttgccgtcgctgtcagccggaacaggggcattgtagcaataccattaacatgggacgacggcgcggtgcttgcttttctggaaaccattgacggttcatcgctgacaggaagggggacgaaccttgaatcgcttttggaagccggggcaagcgcgttccagccttccagcccttcaaacagggtgatccttcttgtttcagacggcgaggcgctgacgggctcgataaaaaacgccctttcgcgctgcagccgcaacggcataattgtcacttcaatactgacaggcagtgatgaaggagcgcctgttccagtcgggcctgttccaggcaatgaagatattatcagccgcagggacgccgcgaccatgcggatggccgcaggacaaacgggcggcattttcattgacgcgaaccgcgaagacgcggccgatgttttgatcaattatcttcgttccctggccgtggaaacagaaagccctgtaagcaatgaaataaaaaaagaacgctggtttgtatttttaatactggctattgtggcctatagcctgtcgaagatgtgcttgttgaatatcgggagcaagaaatga

SEQ ID NO: 60526 - protein, 301 aa, Unknown
  Obtained from environmental sample
  SIGNAL (1)...(24)
  misc_feature (1)..(301): Xaa is any amino acid
MRIKFFASRFFFCLFLCFLITAAAGPRWGVGQARNEYRRAVDVVLAIDVSKSMLVCDGKTASGGFAGHDSGGGTASGITGSITEGVSRLKQGTSIVREAVAALPMRFAVAVSRNRGIVAIPLTWDDGAVLAFLETIDGSSLTGRGTNLESLLEAGASAFQPSSPSNRVILLVSDGEALTGSIKNALSRCSRNGIIVTSILTGSDEGAPVPVGPVPGNEDIISRRDAATMRMAAGQTGGIFIDANREDAADVLINYLRSLAVETESPVSNEIKKERWFVFLILAIVAYSLSKMCLLNIGSKK

SEQ ID NO: 60527 - DNA, 489 bp, Unknown
  Obtained from environmental sample
  misc_feature (1)..(489): n is a, c, g, or t
atggcagtagaactcaacaattacgtagaaccctttgtggaagtaaccgtcaacacctttaaggaatttgtcggtttagacgtgagcccaaggcatcctcactttctggatccggaaaaaggaatggaatgggacatatcggccgtcatcggcctttccggcgccgtcaaaggagccgtaattgtctccatgaaggcggagttggcgattaaactgaccaacatcctcgccggagaggggcatacggaagttgacgccgatgttgttgacgcgataggcgaaataaacaacatcattgcgggtaacatcaaacccagagtgccgaacggggaaaagatagttatttctattcctactattattaaaggaaaagaacattcaatcgcgtggccaagcaaacaaacgcggatattgtgcattcctcataaggcttatgagaatgacatatttcacctgatggtggccattgaattggaacctgagaaataa

SEQ ID NO: 60528 - protein, 162 aa, Unknown
  Obtained from environmental sample
  misc_feature (1)..(162): Xaa is any amino acid
MAVELNNYVEPFVEVTVNTFKEFVGLDVSPRHPHFLDPEKGMEWDISAVIGLSGAVKGAVIVSMKAELAIKLTNILAGEGHTEVDADVVDAIGEINNIIAGNIKPRVPNGEKIVISIPTIIKGKEHSIAWPSKQTRILCIPHKAYENDIFHLMVAIELEPEK

SEQ ID NO: 60529 - DNA, 696 bp, Unknown
  Obtained from environmental sample
  misc_feature (1)..(696): n is a, c, g, or t
atgcaggtagcgtcggttccgcacggggagtccaatgatttcttaaatatcttcggagatgggaaagaggagagtttcagggatataccttctcttgtactggcgggagctcttgatacggatttaatcagatggggagtaaattacgttttaaattcctgttatataggattgaaatccgctatggcggctaaggtaagaacattaaagtccagcatgagcaaaggaagtttttatctgttttcaaaaatttccaattttttcaattatatatttatggcgtttgataaagaaattacgaatcagaattatgtaattaccgttgacgatgttgattacagcggtaaatacagccttatccatgtcgctaacggaccgtactatgccggaaagaagacaggcttatttgacgctacgccgaatgacggattgctggatatagcgcttatcagatcgggaggcgcgcttaaaacgctgttttcactgcgtaaatattcaagggggaagcgtccgaaaaacggcgtttatctgcaggggaaaaaagttactattcaatcggacaagaaaatgtggattcaactggacaatgagtgtattcagaatacggatatcaatcttgccgttattcataacggaactcagatagtcgcggtagataatttatcttacccggttgctgtgatttcgggtctttaa

SEQ ID NO: 60530 - protein, 231 aa, Unknown
  Obtained from environmental sample
  misc_feature (1)..(231): Xaa is any amino acid
MQVASVPHGESNDFLNIFGDGKEESFRDIPSLVLAGALDTDLIRWGVNYVLNSCYIGLKSAMAAKVRTLKSSMSKGSFYLFSKISNFFNYIFMAFDKEITNQNYVITVDDVDYSGKYSLIHVANGPYYAGKKTGLFDATPNDGLLDIALIRSGGALKTLFSLRKYSRGKRPKNGVYLQGKKVTIQSDKKMWIQLDNECIQNTDINLAVIHNGTQIVAVDNLSYPVAVISGL

SEQ ID NO: 60531 - DNA, 846 bp, Unknown
  Obtained from environmental sample
  misc_feature (1)..(846): n is a, c, g, or t
atggatcaaaattgtgtcatacaggatcactattcgcgctatcttgaagaactgctgtccgaagaaaatcttttcggcaaactgtttacggatgttatcgcgaattccgttacgcagaaagaactggtaagcataaaagattatttcggaatggtgcttgaaaacacctatgatcaggagatgctggacgatataaacccgttaaacgaactgcactacataaatgtaagaacaggcgacagaaaagtattccagtgcgcttttaccactgtagaacgcgggcatggggagctctttctgctggtaacggtttatgacataaccgcaagggtagaactgcagcaaaaactggctgaagaagaggcaaagcgccaggaagagatgcaggctgtctttgaacttatccagattgaacccgccgtgttcagcgatttcatggaagacatggaatttgaattcggaaatatcgataagatcctgaagaatgacgaattatccgcccatgacgcgcttgtaaaagtttatcaatctgttcatgccataaaatcgaacgcggttattttggggttaaatgttttcggcaacaaagtgcataatctggaatcgaagattaaaaagttacgcgaacaggaaggcgaagtgccgtttgttgaaatgctgaacctgactgtagatatagaaaaaatatcgaatgaaagggaaggcttcaaagaaattctggacaaacttcagtcttatgccggcggcggcggcggattagccggagttggcggcacgggcggcgcgagacagaacgttaaagttttggttgaatccctaccctcggccgatctgatcattgggtaa

SEQ ID NO: 60532 - protein, 281 aa, Unknown
  Obtained from environmental sample
  misc_feature (1)..(281): Xaa is any amino acid
MDQNCVIQDHYSRYLEELLSEENLFGKLFTDVIANSVTQKELVSIKDYFGMVLENTYDQEMLDDINPLNELHYINVRTGDRKVFQCAFTTVERGHGELFLLVTVYDITARVELQQKLAEEEAKRQEEMQAVFELIQIEPAVFSDFMEDMEFEFGNIDKILKNDELSAHDALVKVYQSVHAIKSNAVILGLNVFGNKVHNLESKIKKLREQEGEVPFVEMLNLTVDIEKISNEREGFKEILDKLQSYAGGGGGLAGVGGTGGARQNVKVLVESLPSADLIIG

SEQ ID NO: 60533 - DNA, 357 bp, Unknown
  Obtained from environmental sample
  misc_feature (1)..(357): n is a, c, g, or t
ttgacaatgatcagatcggcacgagggactggcgagcctttgcgtgagtttttgtggagcgaagatatggcagatgcctgtgtttattgcttagaaaacataaattacacagatgttaaaagccatataaatataggaacaggaaaagaaataagcatagcaaatttggcaacacttgtagcaaagacaataggctacaatggcaaaattatttttgacagctcaaaacccaatggcacaatgcgaaaactctgtgatgttagcaaaattcaatctatgggctggcggcacaaaattgagattgaagaaggcgttgaaaaattgtacgaatggtatttaaagaatgaacgaagatag

SEQ ID NO: 60534 - protein, 118 aa, Unknown
  Obtained from environmental sample
  misc_feature (1)..(118): Xaa is any amino acid
MTMIRSARGTGEPLREFLWSEDMADACVYCLENINYTDVKSHINIGTGKEISIANLATLVAKTIGYNGKIIFDSSKPNGTMRKLCDVSKIQSMGWRHKIEIEEGVEKLYEWYLKNERR

SEQ ID NO: 60535 - DNA, 1191 bp, Unknown
  Obtained from environmental sample
  misc_feature (1)..(1191): n is a, c, g, or t
atgaacgaagatagccttcctttggaggcactcaagtttttgcaaaaagcggaaatacaatctattgcagaagaatgtgtgcccttactaaaagaccctttaaaactatccgttaaactttccaaaaaatatgaccagcaagagcggcgtgctttgattcactatcttgaaattttgccaaagataagaaaaaaattttgtttgcaaaacattgatttaatttgcgacaggctggcttttgaacaggcaactgcaagggatatttctgaatataaggcaagaatgtggcagagtgggactaaaattgcagatttgtgttgcggtatgggcggagatagtttttggttgccaagcggcattgttgcaagcggtgcggatattgcgccagaaagagttttgatgttcaacgaacatatggaacgcttgaaattgcctcataaggcagttttgcaaaatgccttggaagttaaaggcggagattttttttgcatagaccccgcaaggcgaggggacctaaatccgaattttgataacatacttgacctctcaaaaaaattttgtggcggaatggtgaaattgcctcctgcatatcccgaagatgaacttccaaatgagagtgatattctttacttgggagatgcaaaggattgcagggaatgccttatgctaattggtgtgtttggaaaaggatttattcgtgcagcggctatttgcgaaggagaaacttttgaatggcaatgcgaaaaaaatgaattgcaaaatataaatttggatattagaaaattgggcaattttattttggaacctattccggttttggttcgcagccatctgtttttgagcgaagcaaagaaactcggcttttggcaaatagattctacccttgcttatttgtcttgcgaagaactctcatttgagcataaaggatttgtggcgtataaggttatagaccagagtagcctttccacaaataatgtaaaggctatgctaaaaaaacatggcattggaaaactcacgttgaaaaaacgcggcgttgaggttgttccagaggcagaaattcagcgtctttcgccaaaaggcgaaagagaaggggttttgttttacactagagttttgggtgagaagcgggctattttgtctgaatctaattttggatttttgaaattggctacgagtttatatgttatataa

SEQ ID NO: 60536 - protein, 396 aa, Unknown
  Obtained from environmental sample
  misc_feature (1)..(396): Xaa is any amino acid
MNEDSLPLEALKFLQKAEIQSIAEECVPLLKDPLKLSVKLSKKYDQQERRALIHYLEILPKIRKKFCLQNIDLICDRLAFEQATARDISEYKARMWQSGTKIADLCCGMGGDSFWLPSGIVASGADIAPERVLMFNEHMERLKLPHKAVLQNALEVKGGDFFCIDPARRGDLNPNFDNILDLSKKFCGGMVKLPPAYPEDELPNESDILYLGDAKDCRECLMLIGVFGKGFIRAAAICEGETFEWQCEKNELQNINLDIRKLGNFILEPIPVLVRSHLFLSEAKKLGFWQIDSTLAYLSCEELSFEHKGFVAYKVIDQSSLSTNNVKAMLKKHGIGKLTLKKRGVEVVPEAEIQRLSPKGEREGVLFYTRVLGEKRAILSESNFGFLKLATSLYVI

SEQ ID NO: 60537 - DNA, 888 bp, Unknown
  Obtained from environmental sample
  misc_feature (1)..(888): n is a, c, g, or t
atggcggcggtaaaaacggcgaaaaaacaaaagaaactggcggccggcaggaggctgaaccgctcttacggcggcgacgcgtttattatcgcaatcctgacgatcttcggcctgtttttcgcctacccgctggtgtacgccattaacaacgcgttcaaacccctgaatgaaattttcctgtttccgcctcggctctgggtgcgccaacccacaatgaataacttccaggacctctttatcattatgagcaagtcctgggttaccttttcccgctatatttttaacactgtgctgatcaccgccgtgggaacgggcggcctcattatcgcggcttcaatgggggcctttgtggtatccaaataccgcttccccggcgcgaagctgttttttaacgtagtcattgtcaccctgatgttctccggttatgtgacggcgattcccaattacctggttatggccaaactcggctgggtggatacctacctttcggttatagttccggcattcgccatgccgatggggttctttctgctcaaacagtttattgacaccataccgaacaccctgcttgaagcggctaaggttgacggcgcgaaagagtggcgcattttcctggtgataatccttcccatgataaagcccgcgtggctgaccgtgatgattttttccgtacagagtctgtggaacgcccgcgcttccaactttatttattcggagcagcttaaaacgctgccctacgcgctttcgcagatcatcacaggcggcattgcccgcgccggagtaggggcggcggtaactctctttgtaatgatcgtgccgctggtaatgttcattttcgcgcagagcaacattctgcaaacaatggcaagctcggggatcaaggagtag

SEQ ID NO: 60538 - protein, 295 aa, Unknown
  Obtained from environmental sample
  DOMAIN (89)...(295): Binding-protein-dependent transport system inner membrane component
  misc_feature (1)..(295): Xaa is any amino acid
MAAVKTAKKQKKLAAGRRLNRSYGGDAFIIAILTIFGLFFAYPLVYAINNAFKPLNEIFLFPPRLWVRQPTMNNFQDLFIIMSKSWVTFSRYIFNTVLITAVGTGGLIIAASMGAFVVSKYRFPGAKLFFNVVIVTLMFSGYVTAIPNYLVMAKLGWVDTYLSVIVPAFAMPMGFFLLKQFIDTIPNTLLEAAKVDGAKEWRIFLVIILPMIKPAWLTVMIFSVQSLWNARASNFIYSEQLKTLPYALSQIITGGIARAGVGAAVTLFVMIVPLVMFIFAQSNILQTMASSGIKE

SEQ ID NO: 60539 - DNA, 933 bp, Unknown
  Obtained from environmental sample
  misc_feature (1)..(933): n is a, c, g, or t
atgagtttagcgcggtatacggaaaaaaagaaagcggccttttcgtatttgttaagggaaatagcaaaaagccgcgtgtgctatatttttctcgcgccttacgccatagtcttcgccctgttctatatcgcgccgcttgtggtttccgtattttacagttttacctactttaatatccttgagccgcccaaatttatcggcctgcgcaattatatcaatcttttgctgggcgacgatgtgttcctcaaggcaatgaaaaatacttttatcatggcggcggcaaccggccccataggttacctcttttcatttttgttcgcgtggtttatcaacgaactgccccgctatatacgcgccgtggtaactcttgttttttacgcgccgtcaatttccggagccgtgtacatgatatgggcgatcattttctccggtgacgcctacggctacatcaacgggcttttgctgaatctgggcattctggatcagcctgtgctttggctgaccgatcccaagtacatgatgccggtcatgttaattgtcatcctatggatgagtttggggacgggattcctggcttttattgccggcttaagcaccatcgacgtatcgctctacgaagccggcctcgtggacgggataaagaaccgctggcaggaactatggtacattaccctgcccaatatgaaggggatgctgatgttcggcgcggttatggcgattactcagtcattcggcgtcgccgatgtcaccgtggccctggcgggattccccagtacggattacgcggcgcataccgtggtgaatcacctggttgattacggctcgcttcgttttgaaatgggttatgcgtcagcgattgcgaccctgctgttcctgaccatgattatctgcaatactctggtgcagaaattactgcgccgggtggggacctga

SEQ ID NO: 60540 - protein, 310 aa, Unknown
  Obtained from environmental sample
  DOMAIN (81)...(310): Binding-protein-dependent transport system inner membrane component
  misc_feature (1)..(310): Xaa is any amino acid
MSLARYTEKKKAAFSYLLREIAKSRVCYIFLAPYAIVFALFYIAPLVVSVFYSFTYFNILEPPKFIGLRNYINLLLGDDVFLKAMKNTFIMAAATGPIGYLFSFLFAWFINELPRYIRAVVTLVFYAPSISGAVYMIWAIIFSGDAYGYINGLLLNLGILDQPVLWLTDPKYMMPVMLIVILWMSLGTGFLAFIAGLSTIDVSLYEAGLVDGIKNRWQELWYITLPNMKGMLMFGAVMAITQSFGVADVTVALAGFPSTDYAAHTVVNHLVDYGSLRFEMGYASAIATLLFLTMIICNTLVQKLLRRVGT

SEQ ID NO: 60541 - DNA, 2103 bp, Unknown
  Obtained from environmental sample
  misc_feature (1)..(2103): n is a, c, g, or t
gtgcgaagatccgatccttccttgtatcccatttatgatcgttcttcaggagcgacagaacccccgagcgtggcaaggataaggctcaatatgattggagggcaaagctggcgcgtggctgggcagtggattgaatgggaatttgacgtgcctgaaaacggaatgtaccgtatttcagttaagggcagacaaaattataaccgcggctttgtttcaaaccgcactgtaatgattaacggggaaattccggttcaggaactttcttccgtgccttttaactacagcaataaatggagcctaaccacgttaggtgataaaagcggcgcttattatttcccgttggaagccggaatgaataccattcgcgttcaagcggctatgggcggcatgggtgaaatgcttaacgtaatggaagaaagcgttttccgtcttaacgccatttaccgcaagatacttgtattaacgggaccggagcccgatatttaccgcgattacctcgttgatgttgtatacccggaaattattcaggcgatggaacttgaaagcagaatactttttaaacttgttgatgatttaacaaagtattcgggagagcgaagcgcacaggcggcggttgcattaactcttgcccgccagcttgaactttttgtaaaacgccccgataaaattccaagaacgcttgtcaattttaaaaccaatataagctccctgggcgacagtttgcttgcgctttctcaatcacagcttgatatagattacattgcgattagcgcatctgaagcaaatttaccgaagataaatgagattttctttgtcaccgcttcgcatgaaatacgttcattttntgagtcgttcttgnttgattacaataatcttggcgattatcaccagaaggccgctgatgttatcaatgtttggattcttgccggacgcgatcaaagtacaatcttaaaagcgatgatagacgatacttttactccgttaaccggaataaaagtaaacgtaaaacttgtagccgctgacgcggttatgccggcggttgtagcgggtacggggcctgatatggctcttaccgttcctcagggcgatccagtcaattacgccattcgtaaagcggctgtggatatttcaaagtttcctgattatgaagaagcggtaaaagatttaagcgaaagcgtgattgttccatttacgtttcaaggcggcgtatacggtttaccggaaactcaatatttccatgtaatgttttacagaaaagatatttttgaagaactaaaacttccaatccccgatacatgggatgaattaattaatattctgcctgttattcaaaaaaacaatatgaatgtgggcgttccttccgtcgcgaccagtattcaggcaaacatcgacttttcaaacttccttgcgcatttgttccaacgcgacggacgtatgtacaatgaagataactcgcggactcttttgagcgatgaaatagccatagaagcatttgatgtttacacaaaatttttcacacattataaaacacccgttgtttacgattttgtaaaccgtttccgtaccggtgagatgccgcttgcgtttgcggattatacaaactttaataccctggaagtattcgcgcctgaactccgcggtctttggggtttcgcccgtatgcccgggctgcgtaaagcggacggcagcattgaccgttcggtaccgacaggaacgcttgcctcgatgatcttttccaatgcgaaaaaaccggaacttgcctgggaatttctgaagtggtgggtcagcgccgatacccagcttcgcttcggcagggagcttgaaagcgtcatgggcgcggcggcgcgttatcccacggcgaattttgacgcttttacgcggctctcctggggttcggatcaaatggtcgtgctgagagaacagcgttcctggaccgtgggcacgccggaagtgccgggcggttactacgtcagccgccatataaccaacgcggtgcgccgcatactgaacgaaggcgaagacacgagggaaaccctgctggattacagcattacgataaatgacgagctgataaaaaaacgcaaggaattcggtctggaataa

SEQ ID NO: 60542 - protein, 700 aa, Unknown
  Obtained from environmental sample
  DOMAIN (235)...(601): Bacterial extracellular solute-binding protein
  misc_feature (1)..(700): Xaa is any amino acid
MRRSDPSLYPIYDRSSGATEPPSVARIRLNMIGGQSWRVAGQWIEWEFDVPENGMYRISVKGRQNYNRGFVSNRTVMINGEIPVQELSSVPFNYSNKWSLTTLGDKSGAYYFPLEAGMNTIRVQAAMGGMGEMLNVMEESVFRLNAIYRKILVLTGPEPDIYRDYLVDVVYPEIIQAMELESRILFKLVDDLTKYSGERSAQAAVALTLARQLELFVKRPDKIPRTLVNFKTNISSLGDSLLALSQSQLDIDYIAISASEANLPKINEIFFVTASHEIRSFXESFLXDYNNLGDYHQKAADVINVWILAGRDQSTILKAMIDDTFTPLTGIKVNVKLVAADAVMPAVVAGTGPDMALTVPQGDPVNYAIRKAAVDISKFPDYEEAVKDLSESVIVPFTFQGGVYGLPETQYFHVMFYRKDIFEELKLPIPDTWDELINILPVIQKNNMNVGVPSVATSIQANIDFSNFLAHLFQRDGRMYNEDNSRTLLSDEIAIEAFDVYTKFFTHYKTPVVYDFVNRFRTGEMPLAFADYTNFNTLEVFAPELRGLWGFARMPGLRKADGSIDRSVPTGTLASMIFSNAKKPELAWEFLKWWVSADTQLRFGRELESVMGAAARYPTANFDAFTRLSWGSDQMVVLREQRSWTVGTPEVPGGYYVSRHITNAVRRILNEGEDTRETLLDYSITINDELIKKRKEFGLE

SEQ ID NO: 60543 - DNA, 624 bp, Unknown
  Obtained from environmental sample
  misc_feature (1)..(624): n is a, c, g, or t
atggctctaaagaaaaagactgtaaaagacatcgactttaaaggcaagcgcgttttaatgcgcgttgacttcaacgtgcctatggacaagggcgtaattcaagacgacacccgcatccgagccgctctgcctaccatcaagtatgtcttagagaacggggctaagagcctcgtcctcatgtcccacctcggcaatcctaaaaaggatatggccaaggctaaggagaaggcggagaaggcgggcaagcccttcgacgaggcgcagtatctcgcctggaagcacaagatggcgccgctggccgagcatttgtccaagcttttggggaaaaacgtggccctcgcccccgactgtatcagtgacgagaccaaggctatggcggccaagcttgacggcggggctatcctcatgctggagaacacgcgcttccacaaggaggagacctccaaggaggccgccgaccgcgagaagatggctaatgctttggcggagctcggcgacgtgtacgtgaacgacgctttcggcacggcgcaccgcgcccacgcctccacggagaccgtcgcccacttccttccggcggtggcgggcttcctgatggaaaaggagctcgtgttcctccaagactag

SEQ ID NO: 60544 - protein, 207 aa, Unknown
  Obtained from environmental sample
  DOMAIN (2)...(207): Phosphoglycerate kinase
  misc_feature (1)..(207): Xaa is any amino acid
MALKKKTVKDIDFKGKRVLMRVDFNVPMDKGVIQDDTRIRAALPTIKYVLENGAKSLVLMSHLGNPKKDMAKAKEKAEKAGKPFDEAQYLAWKHKMAPLAEHLSKLLGKNVALAPDCISDETKAMAAKLDGGAILMLENTRFHKEETSKEAADREKMANALAELGDVYVNDAFGTAHRAHASTETVAHFLPAVAGFLMEKELVFLQD

SEQ ID NO: 60545 - DNA, 642 bp, Unknown
  Obtained from environmental sample
  misc_feature (1)..(642): n is a, c, g, or t
gtggacgcgcccgtgaaacccttcgtggcgattatcggcggggcaaaggtctcgtccaagatcgcggtgcttgagagcctgctttcaaaggtcgacagcatgatcatcggcgggggcatggcctacaccttccaaaaggcgctggggcagagcatcggcgagtcgctcgttgaggacgacatgatcgatacggctaagagcattatggataaggcgaagtccaaaggggtcaagctgctgctgccggtagacaacgtggtgaccaaggagttcgcggcggaggccgagtctaaagttgtggccgccggggcggttgaggccggttggatgggcatggacataggcccgaagacgacggagctcttcaaagacgcgctgaagagcgccaagacggtcttctggaacggcccgatgggcgtcttcgagttcccgaagttcgcggtggggacgcaggcgatagcggcgacgctggccgaactgaagggcgcgaccactgtgataggcggcggcgactcggtgtcggcggtgaagaaggccggcgtggccgacaagatgtcgcacatatcgacgggcggcggagcgtcattagagttagtagagggtaaggagctgccgggagttgtggcgcttaatgataagtag

SEQ ID NO: 60546 - protein, 213 aa, Unknown
  Obtained from environmental sample
  DOMAIN (2)...(210): Phosphoglycerate kinase
  misc_feature (1)..(213): Xaa is any amino acid
MDAPVKPFVAIIGGAKVSSKIAVLESLLSKVDSMIIGGGMAYTFQKALGQSIGESLVEDDMIDTAKSIMDKAKSKGVKLLLPVDNVVTKEFAAEAESKVVAAGAVEAGWMGMDIGPKTTELFKDALKSAKTVFWNGPMGVFEFPKFAVGTQAIAATLAELKGATTVIGGGDSVSAVKKAGVADKMSHISTGGGASLELVEGKELPGVVALNDK

SEQ ID NO: 60547 - DNA, 441 bp, Unknown
  Obtained from environmental sample
  misc_feature (1)..(441): n is a, c, g, or t
atgtgcgacatcttgtcggccacgccggccttcttcaccgccgacaccgagtcgccgccgcctatcacagtggtcgcgcccttcagttcggccagcgtcgccgctatcgcctgcgtccccaccgcgaacttcgggaactcgaagacgcccatcgggccgttccagaagaccgtcttggcgctcttcagcgcgtctttgaagagctccgtcgtcttcgggcctatgtccatgcccatccaaccggcctcaaccgccccggcggccacaactttagactcggcctccgccgcgaactccttggtcaccacgttgtctaccggcagcagcagcttgacccctttggacttcgccttatccataatgctcttagccgtatcgatcatgtcgtcctcaacgagcgactcgccgatgctctgccccagcgccttttggaaggtgtag

SEQ ID NO: 60548 - protein, 146 aa, Unknown
  Obtained from environmental sample
  misc_feature (1)..(146): Xaa is any amino acid
MCDILSATPAFFTADTESPPPITVVAPFSSASVAAIACVPTANFGNSKTPIGPFQKTVLALFSASLKSSVVFGPMSMPIQPASTAPAATTLDSASAANSLVTTLSTGSSSLTPLDFALSIMLLAVSIMSSSTSDSPMLCPSAFWKV

SEQ ID NO: 60549 - DNA, 300 bp, Unknown
  Obtained from environmental sample
  misc_feature (1)..(300): n is a, c, g, or t
ttgacactgaacctcctatccatcttacgcctgatgcaacccaaccttctcattccggctacaacagctctgggaacgatcgacgccaccggacgggaacaaggaattctcgccggagccaacgtggtcatgccgaatctatcacccgtggaagtacgcgacaaatacctactatacgacaacaaaatctgcaccggcgacgaagccgcggagtgcgtaaactgtatgcgaatgcggatcagaagtattgggtatgagcttgttgtgtcgcgaggagattttttaagtcaaattctttaa

SEQ ID NO: 60550 - protein, 99 aa, Unknown
  Obtained from environmental sample
  misc_feature (1)..(99): Xaa is any amino acid
MTLNLLSILRLMQPNLLIPATTALGTIDATGREQGILAGANVVMPNLSPVEVRDKYLLYDNKICTGDEAAECVNCMRMRIRSIGYELVVSRGDFLSQIL

SEQ ID NO: 60551 - DNA, 498 bp, Unknown
  Obtained from environmental sample
  misc_feature (1)..(498): n is a, c, g, or t
gtggcggttatgaacgaggggcaggtggtgcaggtcggcacgcccttcgagatctacgagagcccgagcgacccctttgtggcgcacttcatcggcgagacgaactacatcggcggcaccgtgacggaggtcataggcgacaaacacgccaaagtagactttccggatatcggcacgctctttgtctatcaggacaagccgctcgccgcgggcgacagggtcaaggtgacgatacgtccggagaagatacgcatctcctccgacaagccgtccgccctcggcgaccagatgaacctgctggagggcggcgtcgacgagctcatctactccggtttccagagcaagttcttcgtgagggtgagcgagcgggcgacgtttagggtgtttcggcagcacgtcaagttcttcatggacgaaaaagccatcaattggaaagacagggtcttcatctggtggaacgacaacgacggctacgtggtggaggtggagaaaccgtga

SEQ ID NO: 60552 - protein, 165 aa, Unknown
  Obtained from environmental sample
  DOMAIN (76)...(160): TOBE domain
  misc_feature (1)..(165): Xaa is any amino acid
MAVMNEGQVVQVGTPFEIYESPSDPFVAHFIGETNYIGGTVTEVIGDKHAKVDFPDIGTLFVYQDKPLAAGDRVKVTIRPEKIRISSDKPSALGDQMNLLEGGVDELIYSGFQSKFFVRVSERATFRVFRQHVKFFMDEKAINWKDRVFIWWNDNDGYVVEVEKP

SEQ ID NO: 60553 - DNA, 783 bp, Unknown
  Obtained from environmental sample
  misc_feature (1)..(783): n is a, c, g, or t
atgctagaagcggcaacacaaaacgggaaactaaaaccgggcggcgtggttatagagccaaccagcggcaatacgggcatagggcttgcgtttgcctgtgcagcacagggctataaacttatactcacaatgccagagaccatgtccatagaacggagaaagctggtgcgaatgctcggagcggacttggttctaacccccggcaacgaaggcatggcaggttcaataaaaaaagcaaaggaactcaatgcccaaattactggtagctttatgccgttgcaatttgaaaatccagccaatccgcaggttcaccgcgaaacaacagctgaagaaatttggcaagacacaaacggagaggtggatatattcgtagcgggcgtaggcacgggcggcacaatcactggtgttggcgaggtgctgaaagggcgtaaaaacaccgtgcggatagtagcggtggaaccggatgcttcccctgtgctttcgggtggcaggcctggtccgcaccgcatacagggaataggagcgggttttgtgccaaaaatcctcaatcgttccattatcgatgagataatccgagttaccaatgaagacgcatttgataccgccaagaaattagggcgtatggatggagttttggtgggcatatcctccggtgcggcggtgtgggcggcattgcagcttgcggcaaagcccgaaaatgcaaataaaacaattgttacaatgctaccagactctggagagcgttacatctccacgcaactttctaatatacaagaggattag

SEQ ID NO: 60554 - protein, 260 aa, Unknown
  Obtained from environmental sample
  DOMAIN (1)...(245): Pyridoxal-phosphate dependent enzyme
  misc_feature (1)..(260): Xaa is any amino acid
MLEAATQNGKLKPGGVVIEPTSGNTGIGLAFACAAQGYKLILTMPETMSIERRKLVRMLGADLVLTPGNEGMAGSIKKAKELNAQITGSFMPLQFENPANPQVHRETTAEEIWQDTNGEVDIFVAGVGTGGTITGVGEVLKGRKNTVRIVAVEPDASPVLSGGRPGPHRIQGIGAGFVPKILNRSIIDEIIRVTNEDAFDTAKKLGRMDGVLVGISSGAAVWAALQLAAKPENANKTIVTMLPDSGERYISTQLSNIQED

SEQ ID NO: 60555 - DNA, 957 bp, Unknown
  Obtained from environmental sample
  misc_feature (1)..(957): n is a, c, g, or t
atggctaacaaaaattatcggtttgagactattcaggttcacgctgggcaagaaaatccagaccctgctaccgatgcacgggcggtgccaatttaccaaaccacctcttatgtgttcccaagcgcaaagtctgcggcagaccgctttgctctaaccgaggctggaaacatatatacgcggattactaaccccacttgggatgtctttgaaaaacgcattgctgcccttgaaaaaggcgttgccgctctggcactttcgtccggggctgctgccaccacttacgccattcaaaacataacctgcgccggcgaccacatagtttccgataaccaaatctacggcggaacctataaccttttcgcaaacacattcaaagatatgggcgttgagactacttttgtggacggcagcgatacagccagttttgaaaaagcgataaagccaaataccaaagctatctttattgaaactttgggcaatcccagccccagcgttgtggacattgaggctgttgcagccattgcccataagcacggtattccattgattgcagacaacacttttgcctcgccttatctctttaggcccattgaacacggagcggatatagttgtggaatcggcaaccaaattcataggcgggcacggcacaagcatcggcggcgtgatagttgatagcggcaaattcgattgggcacagaacgataaattcccaggtctctcaaaaccaaatcccagctatcatggcatagtcttcaccgaagccgtaaagaacttggcttacataatcaaagtccgcacaaccctgctacgcgacaccggctccgctctttcgccttttcacgcctttttgtttttgcaggggctagaaacgctctctctccgcgtggagcggcacgttttcaatgcgctcaaagtgatagattttctcaagaacatccgcaagttgagaaagtaa

SEQ ID NO: 60556 - protein, 318 aa, Unknown
  Obtained from environmental sample
  DOMAIN (29)...(307): Aminotransferase class I and II
  misc_feature (1)..(318): Xaa is any amino acid
MANKNYRFETIQVHAGQENPDPATDARAVPIYQTTSYVFPSAKSAADRFALTEAGNIYTRITNPTWDVFEKRIAALEKGVAALALSSGAAATTYAIQNITCAGDHIVSDNQIYGGTYNLFANTFKDMGVETTFVDGSDTASFEKAIKPNTKAIFIETLGNPSPSVVDIEAVAAIAHKHGIPLIADNTFASPYLFRPIEHGADIVVESATKFIGGHGTSIGGVIVDSGKFDWAQNDKFPGLSKPNPSYHGIVFTEAVKNLAYIIKVRTTLLRDTGSALSPFHAFLFLQGLETLSLRVERHVFNALKVIDFLKNIRKLRK

SEQ ID NO: 60557 - DNA, 885 bp, Unknown
  Obtained from environmental sample
  misc_feature (1)..(885): n is a, c, g, or t
atgtgtttgaatggtcctgtaagctcctgccctccaggtggcacattgagcaacaactgcccttatggcagttcaagctcttcgccgagcagcaattcaaacgggaacagcagttcaagctcaacgccaagcaacagcagtgttgggacaacttattactgcgattttggacttagggaaacttgtccatcttgcgcaaatggcgttggtggaggttgttatgaaatggaaaatcaatacggtgaatgtgattcaagatatggcagggtaaccacttcttgcagtacgggtttagtttgcgattggggtcctagatattatgattcttctcattctgactgcggtaacgactattgcggtggctgttatataataggttctggtagcggtataaccgtagcatcctgcgaaagagataatggcacggtacgttccgaatgtccacaatcttctttggttacaggcacaaagccaagtagttcgtccaagccagctggagtttcttcatcaagtgttaaaccgagcagttcaagcacaacaccaagcagtagcagcagtaaggcaactccgagcagttcgtctggctgcgttgatgaagctacttgctgtttgggaacaagtattactattaatgcgaatagttctggcagtactaataccaacacaaaaaatgcagtatgctttaaaatagcaggaagcatttctagttggaacgtttatagcgcaaatggacgtacctgtagtgctaatggtggtagtaaaataactgctcctggttatggtaatattcaggatcaaccagcagttagtgcaataaacgggtatgtatatattaattgttcagcaggagagtatgacttctgttcaatttcctttacgaagtaa

SEQ ID NO: 60558 - protein, 294 aa, Unknown
  Obtained from environmental sample
  misc_feature (1)..(294): Xaa is any amino acid
MCLNGPVSSCPPGGTLSNNCPYGSSSSSPSSNSNGNSSSSSTPSNSSVGTTYYCDFGLRETCPSCANGVGGGCYEMENQYGECDSRYGRVTTSCSTGLVCDWGPRYYDSSHSDCGNDYCGGCYIIGSGSGITVASCERDNGTVRSECPQSSLVTGTKPSSSSKPAGVSSSSVKPSSSSTTPSSSSSKATPSSSSGCVDEATCCLGTSITINANSSGSTNTNTKNAVCFKIAGSISSWNVYSANGRTCSANGGSKITAPGYGNIQDQPAVSAINGYVYINCSAGEYDFCSISFTK

SEQ ID NO: 60559 - DNA, 894 bp, Unknown
  Obtained from environmental sample
  misc_feature (1)..(894): n is a, c, g, or t
atgataatagcttatagtacctggttaataggctgcaaaggtatgctgggaacagagctttccctgctgctggaaaagtccggcctttttgtcgggacagatcgcgaagcagatattaccgacgcggcggcgtttgggcaatttgccaaacagttaaacaaaaaacaacccatcgactggattatcaactgcgccgcctatacggcggttgacaaggccgaagacgacgccgaaaactgccgccgcctgaacacgctgggggccgccaacatcgccgcttgcgctaaaagcatcggcgcacggctcatccatatatcaaccgactatgtatttgacggctccctcccgcgcccataccgtgaggatgatgcaactaatcctatcgggatttacggactgaccaagcgagacggagaacttgccgtgctggaaaacaatccccactcatacataattcgcaccgcctggctttacggcaagcatggaaacaattttgtacatacaatgctccggcttatgaatgagcgggacgaagtaaaagtagtggatgaccagcggggcagcccgacatgggcttttgatctggcttctgcggtacttgccttgattaaaacagtcgattcgggaaaaagtgtcccctttggcatttatcactataccaatgaggggaacattacctggtttgattttgccaaagaaattttcaggcaggggcgggagcaggggcgcataacaaaagactgcgccgtgaagccctgcaccagcgcggaatttcccgctaaagtgaaacgccccgctttctcggttttggataaaggcaaaatcaaaacagcgctggagattgacgtgccgggctgggaaaaaagtttatcggagtttttgaaaaatgcgtaa

SEQ ID NO: 60560 - protein, 297 aa, Unknown
  Obtained from environmental sample
  DOMAIN (8)...(250): 3-beta hydroxysteroid dehydrogenase/isomerase family
  misc_feature (1)..(297): Xaa is any amino acid
MIIAYSTWLIGCKGMLGTELSLLLEKSGLFVGTDREADITDAAAFGQFAKQLNKKQPIDWIINCAAYTAVDKAEDDAENCRRLNTLGAANIAACAKSIGARLIHISTDYVFDGSLPRPYREDDATNPIGIYGLTKRDGELAVLENNPHSYIIRTAWLYGKHGNNFVHTMLRLMNERDEVKVVDDQRGSPTWAFDLASAVLALIKTVDSGKSVPFGIYHYTNEGNITWFDFAKEIFRQGREQGRITKDCAVKPCTSAEFPAKVKRPAFSVLDKGKIKTALEIDVPGWEKSLSEFLKNA

SEQ ID NO: 60561 - DNA, 405 bp, Unknown
  Obtained from environmental sample
  misc_feature (1)..(405): n is a, c, g, or t
gtgcaggacaaccagtcccggtccgtcaggggcgtgctgcggggcctgcattttcagaaaacccacgcgcagggcaaactggtccgcgccattgaaggcgaaatcttcgatgtcgcggttgacttgcgggccgattcccccacacgcggcaaatggcacgccgtttttttaagcggcgaaaagcaaaaccaattttacatccccgccggttttgcccacggatttctggtgttaagcggcacggcggttttcgcgtataaatgcacggatttttattaccccgaagacgagggcggcattatctggaatgatccggtaatcggcgtaaaatggccggagctggggatggattacctgctttccgaaaaagataaaaagttgcctggttatgataatagcttatag

SEQ ID NO: 60562 - protein, 134 aa, Unknown
  Obtained from environmental sample
  DOMAIN (1)...(133): dTDP-4-dehydrorhamnose 3,5-epimerase
  misc_feature (1)..(134): Xaa is any amino acid
MQDNQSRSVRGVLRGLHFQKTHAQGKLVRAIEGEIFDVAVDLRADSPTRGKWHAVFLSGEKQNQFYIPAGFAHGFLVLSGTAVFAYKCTDFYYPEDEGGIIWNDPVIGVKWPELGMDYLLSEKDKKLPGYDNSL

SEQ ID NO: 60563 - DNA, 369 bp, Unknown
  Obtained from environmental sample
  misc_feature (1)..(369): n is a, c, g, or t
gtgccggggctgtatttttacgacaacgaagtggttgggattgccaaaaatatcaaaccctccggccggggcgaaattgaaattaccgcggtgaacaacgcctatctggaaaaagggcgcctctccgtggaggtgctgggcaggggcatggcatggctggacacgggcacttacgacgggcttttggaggcttcaaattttattgaaacaatccagaaacgtcagggcgtatacgtttcctgcattgaagaaattgcgtataacaacggctggttgtcaaaagacgggcttctgaaactcgcggcgggttataaaaccgaatacggcgaatacctgagatacatcgcggagggcgattctgccttttaa

SEQ ID NO: 60564 - protein, 122 aa, Unknown
  Obtained from environmental sample
  misc_feature (1)..(122): Xaa is any amino acid
MPGLYFYDNEVVGIAKNIKPSGRGEIEITAVNNAYLEKGRLSVEVLGRGMAWLDTGTYDGLLEASNFIETIQKRQGVYVSCIEEIAYNNGWLSKDGLLKLAAGYKTEYGEYLRYIAEGDSAF

SEQ ID NO: 60565 - DNA, 1035 bp, Unknown
  Obtained from environmental sample
  misc_feature (1)..(1035): n is a, c, g, or t
gtgtttttgatagacattaaaaccgcgatggagaaccatctgaataacctgaccaagccgctgggcagcatgggtaatctggaatcgtattgtgtaaaaatggcggagatacaaaaacgtgtcccgcccaaaattgaaagaaaaggcgtctatgtgtttgcgggcgatcacggcgtggcggcggagggagtgtccctgtatccacaggaagttacgcggcagatggtgttgaatatactttcaggaggcgcggggatcaacgctctggcaggtggaaccggctgggatgtaattctggtggacgccggcgtctctggtgatgattttccggcggatagcgagataaagccggtatgctcatttctgcgggagcgcattcggcagggcagcgggaattgcctgagggaatccgcaatgagcgccgaagaaacaacgcgcgcccttgaacggggaaaagcgctggcccgtgatgccttaaaacaaggttttgacatgatcgccatcggcgaccttggcatcggaaatacgaccaccgcttcggcaatgcttgttgccgccggtttcggcgtcgatcttgtggtggatcggggtacgggaatagacagcgccatgctggagcacaagcgcggcgttgtggaggaagccgtccgccgcgccaatgtcccgccgggcgacggcgaggcgatactgcgggagctgggttcccccgatttcgcgatgatggcgggtttcatacttggccttgaggggacaggcattgcatgcgttcttgacggcttccctgttacttccgccgcttttatggcctggttaatcaatcctgaaatcagcaaccggctttttgcggggcatctttccaaagtagcgggtcacaagccggtactggaacgtatgggccttgagcccattgtgaatttaaacatgcggctgggcgaaggaacaggcgcggtcatcggcggttacattgtggaactcggcgtactggctgcccggaatatggcgtccttcacggaagcccggcattgcggccggtag

SEQ ID NO: 60566 - protein, 344 aa, Unknown
  Obtained from environmental sample
  DOMAIN (2)...(339): Phosphoribosyltransferase
  misc_feature (1)..(344): Xaa is any amino acid
MFLIDIKTAMENHLNNLTKPLGSMGNLESYCVKMAEIQKRVPPKIERKGVYVFAGDHGVAAEGVSLYPQEVTRQMVLNILSGGAGINALAGGTGWDVILVDAGVSGDDFPADSEIKPVCSFLRERIRQGSGNCLRESAMSAEETTRALERGKALARDALKQGFDMIAIGDLGIGNTTTASAMLVAAGFGVDLVVDRGTGIDSAMLEHKRGVVEEAVRRANVPPGDGEAILRELGSPDFAMMAGFILGLEGTGIACVLDGFPVTSAAFMAWLINPEISNRLFAGHLSKVAGHKPVLERMGLEPIVNLNMRLGEGTGAVIGGYIVELGVLAARNMASFTEARHCGR

SEQ ID NO: 60567 - DNA, 1047 bp, Unknown
  Obtained from environmental sample
  misc_feature (1)..(1047): n is a, c, g, or t
atgctccaaatctcaaacaaaacattcagctcgcggcttttcttgggaagcggcaagtttgcttcgccgcaagaaatggttgttgctttgcaagaatcgcaaagcgaaatgctcactgttgctttaaagcgaattggcaaaaaccaaaaagaagattccattttgagtgcattaaaagatttcaaagggcagattttgccaaatacctctggtgctagaactgcaaaagaagcggtgtttgctgcgcaaatggcaagagaagcacttggcacaaactgggtgaaattggaaattcatcccgaccaaaaatatttgcttccagacccaattgaaacattgaacgcagccgcagaacttgcaaaagatggctttgtggttttgccatacattcaggcagaccctgttttgtgcaaaaggctggaagattgtggctccgcggctgttatgccacttggttcgccaataggttcaaacagaggtttgcaaacagaggcgatgctaaaaataataatcgctcagagcaaagttcccgttgtgatagacgcgggcataggtgctccatctcacgcttgcctcgctatggaaatgggtgcggatgccgttttggtgaataccgccattgcagttgccccaaaccctgcggttatggcaaaatgctttaaactagcggtggaaagtggaagaatggcttacgaaagcggtttgcctttgcaggcagaaaacgcagttgccagcagcccgctcacggacttcctaaccagtccacgctatagccaaggcatcgcttgcatcaagtgcggagttttgagtttgaacgccgagcaacctgctcatcatatttgcaacctgctccttgctcgcagctccatttcctgtaaccgcctttttaatttcgcgtgggcttttttccgaaaataccaaatcgtatttaaaaccgagagccataatcgctccgcgtatatgccccaaaataagcgcgctgtttgcgttctttgcaaaaaatgctttttccatgcaaaaagcaattggcttgtattttgcaattaa

SEQ ID NO: 60568 - protein, 348 aa, Unknown
  Obtained from environmental sample
  DOMAIN (1)...(253): Thiazole biosynthesis protein ThiG
  misc_feature (1)..(348): Xaa is any amino acid
MLQISNKTFSSRLFLGSGKFASPQEMVVALQESQSEMLTVALKRIGKNQKEDSILSALKDFKGQILPNTSGARTAKEAVFAAQMAREALGTNWVKLEIHPDQKYLLPDPIETLNAAAELAKDGFVVLPYIQADPVLCKRLEDCGSAAVMPLGSPIGSNRGLQTEAMLKIIIAQSKVPVVIDAGIGAPSHACLAMEMGADAVLVNTAIAVAPNPAVMAKCFKLAVESGRMAYESGLPLQAENAVASSPLTDFLTSPRYSQGIACIKCGVLSLNAEQPAHHICNLLLARSSISCNRLFNFAWAFFRKYQIVFKTESHNRSAYMPQNKRAVCVLCKKCFFHAKSNWLVFCN

SEQ ID NO: 60569 - DNA, 465 bp, Unknown
  Obtained from environmental sample
  misc_feature (1)..(465): n is a, c, g, or t
ttgaagcaaattgttatgatgggcattgaccctggtagctatgcaacgggctttgcttttttaagtttaacaggtaacaagattgatgttttggactatggaattattcgcccaaaaaaagatgcggaacttatttttagaataggacatataatcaaggaacttgaaaacttaattgcaaaatacaagccaattgctttttgcatggaaaaagcattttttgcaaagaacgcaaacagcgcgcttattttggggcatatacgcggagcgattatggctctcggttttaaatacgatttggtattttcggaaaaaagcccacgcgaaattaaaaaggcggttacaggaaatggagctgcgagcaaggagcaggttgcaaatatgatgagcaggttgctcggcgttcaaactcaaaactccgcacttgatgcaagcgatgccttggctatagcgtggactggttag

SEQ ID NO: 60570 - protein, 154 aa, Unknown
  Obtained from environmental sample
  DOMAIN (6)...(154): Crossover junction endodeoxyribonuclease RuvC
  misc_feature (1)..(154): Xaa is any amino acid
MKQIVMMGIDPGSYATGFAFLSLTGNKIDVLDYGIIRPKKDAELIFRIGHIIKELENLIAKYKPIAFCMEKAFFAKNANSALILGHIRGAIMALGFKYDLVFSEKSPREIKKAVTGNGAASKEQVANMMSRLLGVQTQNSALDASDALAIAWTG

SEQ ID NO: 60571 - DNA, 486 bp, Unknown
  Obtained from environmental sample
  misc_feature (1)..(486): n is a, c, g, or t
gtggctgaggaattttatgctcaaagaaaagaagaagcctttgtagctggtattttgcacgatattggcaagctcattttggctatttgctccccagaagattttgcaaattgcatgaacctagccacaagcaaaggctgtctatttttagatgcagaaagagaggtgctagggatttgccacacagacatagctgactgggtaaataggagatggaacctgcccagagaaatagctgcggtgatgataaatcatcatagaaacatcaacgtattgggtgaacataccagaatgattgccattgttaagctggcagatgttttggcaagaggtttgcaacttgggcacccttgcgattattccgtacctattttggaacccgatgtttctgctttgttgaaagttactccaaaaaaattagatactattttagcggccagttatggagcgattcaaagctcaatggattttttaaacgcaacctaa

SEQ ID NO: 60572 - protein, 161 aa, Unknown
  Obtained from environmental sample
  misc_feature (1)..(161): Xaa is any amino acid
MAEEFYAQRKEEAFVAGILHDIGKLILAICSPEDFANCMNLATSKGCLFLDAEREVLGICHTDIADWVNRRWNLPREIAAVMINHHRNINVLGEHTRMIAIVKLADVLARGLQLGHPCDYSVPILEPDVSALLKVTPKKLDTILAASYGAIQSSMDFLNAT

SEQ ID NO: 60573 - DNA, 492 bp, Unknown
  Obtained from environmental sample
  misc_feature (1)..(492): n is a, c, g, or t
atgctgaaacacgaaggccccgcgagggttttcgattccgaggaaaccgcgtttgacgcaatcatggaaaagaagataaaaccgggagatgtcgtcgttatacgttacgaagggcccaagggcggccccggcatgaaggagatgctcgcgcccacagcggcccttgccggcatgggccttgacgacaaagtagccctcattaccgacgggcgtttctccggcgcttccaagggcgcgtccataggccacgtttcgccggaagccgcgacaggcgggaacatcggtattattaacgaaggggatataatttgcatagacatcgacgggctttctataaacgtgaagttaagcgatgaagaaattgagaagcggcggaaaatccggaagcccctttcaaaaaattctgttggctaccttgcccgctatgccgcgcaagtcggctccgcagcatcaggcgcggtctttaattcacagccgtgtaaaggagattaa

SEQ ID NO: 60574 - protein, 163 aa, Unknown
  Obtained from environmental sample
  DOMAIN (1)...(156): Dehydratase family
  misc_feature (1)..(163): Xaa is any amino acid
MLKHEGPARVFDSEETAFDAIMEKKIKPGDVVVIRYEGPKGGPGMKEMLAPTAALAGMGLDDKVALITDGRFSGASKGASIGHVSPEAATGGNIGIINEGDIICIDIDGLSINVKLSDEEIEKRRKIRKPLSKNSVGYLARYAAQVGSAASGAVFNSQPCKGD

SEQ ID NO: 60575 - DNA, 1872 bp, Unknown
  Obtained from environmental sample
  misc_feature (1)..(1872): n is a, c, g, or t
atgaagaaattgagaagcggcggaaaatccggaagcccctttcaaaaaattctgttggctaccttgcccgctatgccgcgcaagtcggctccgcagcatcaggcgcggtctttaattcacagccgtgtaaaggagattaagatgcagtacaccggcgctcaaatattaatagaatctctgattgagcagggagtggataccattttcggctttccaggcggaacggttttaaatatttatgacgaactctataaacaccgcgacaggatacgccacatccttgtaagccacgaacaacacgccgcccacgccgctgacggttacgcgcgttccaccggaaagacaggagtgtgcatcgcgacatcagggcccggcgcgacaaatcttattacgggaattgccacggcgtacatggactcggttccgctggtagcgattaccggcaacgtccccacggggattttaggcaaggacagttttcaggaagtggacatcaggggcatctccatgcctatagtgaagcacaactggattgtaaaacacgtcgagaatcttggagaagtgatccgcgaggcgtttgaacttgcgtcttccggccgtcaggggcctgtgctgattgacatacctaaagatattaccgcgcttacagcagaatggagcccatccaggaagaaaggcgagataaaagacaaagctctttcagcgcgggcgaagcggcttgacgagcgtacagcgagaatcagttttacggacgaagatattgaggaagccgcggaaatgatcagtgaagccaaacggcctttgctttatgcgggaggaggagtcatcagttcaggcgcggaggcggagcttgtcgcgcttgccgaaagactgaacgctcccgtcgcgctcagcctgatgggaatcggcgcgataccgaaggatcaccgcctgtgtacgggtcttatcggaatgcacggaacagtggcgagcaacaaggcgacgcagaaagcggatctgcttctcgcgattggagcgcgcttctccgacagggttatcagcaaggcggatatgttcgcgaataccgcgcaggtgattcactttgacattgatcccgctgaagtggggaaaaacattgaaacccacgcgtgggtgattggtaacttaaagaatactcttgccgctctgcttgcaaaacttccggcgcgtcttaataccgaatggcacggcgagattgaaaaatggaaaacccatctgcctcagacttatacccacgaggttacatttgccaagaacgcgcttcacccccgttttattattgaagagaccgcaaaggcgctgggcccggaaacaattgccgttaccgacgtaggccagcaccagatgtggacggcgcagttcttccctgcggagaaacctagaacatttatcagttccggaggactaggaacgatgggcttcgggctgggagccgcttgcggtgcaaaagtcgcgaatcccaaaaagcctgtggcgctttttaccggagatggcagtttcagaatgaactgcgcggagatggcgacccttactaataataaaatcccgctgttgataattatctttaacaacggagtgttaggcatggtaagacagtggcagagtttcttttatgaaagcagatactctcatacaactttgagcggggtacctgacttcttaaaactgtgcgacgcttacggcgttacgggcttccgcgccgcagacagggagtcttttaagaaagcgctccacgccgccgccgcggaactgtccgccgggagagcggctctcatcgtggcggacatagaccgcgatgagaacgtgctgcccatggttccgtccggtaagcctattgatgagcagattttgtaa

SEQ ID NO: 60576 - protein, 623 aa, Unknown
  Obtained from environmental sample
  DOMAIN (253)...(412): Thiamine pyrophosphate enzyme, central domain
  misc_feature (1)..(623): Xaa is any amino acid
MKKLRSGGKSGSPFQKILLATLPAMPRKSAPQHQARSLIHSRVKEIKMQYTGAQILIESLIEQGVDTIFGFPGGTVLNIYDELYKHRDRIRHILVSHEQHAAHAADGYARSTGKTGVCIATSGPGATNLITGIATAYMDSVPLVAITGNVPTGILGKDSFQEVDIRGISMPIVKHNWIVKHVENLGEVIREAFELASSGRQGPVLIDIPKDITALTAEWSPSRKKGEIKDKALSARAKRLDERTARISFTDEDIEEAAEMISEAKRPLLYAGGGVISSGAEAELVALAERLNAPVALSLMGIGAIPKDHRLCTGLIGMHGTVASNKATQKADLLLAIGARFSDRVISKADMFANTAQVIHFDIDPAEVGKNIETHAWVIGNLKNTLAALLAKLPARLNTEWHGEIEKWKTHLPQTYTHEVTFAKNALHPRFIIEETAKALGPETIAVTDVGQHQMWTAQFFPAEKPRTFISSGGLGTMGFGLGAACGAKVANPKKPVALFTGDGSFRMNCAEMATLTNNKIPLLIIIFNNGVLGMVRQWQSFFYESRYSHTTLSGVPDFLKLCDAYGVTGFRAADRESFKKALHAAAAELSAGRAALIVADIDRDENVLPMVPSGKPIDEQIL

SEQ ID NO: 60577 - DNA, 1488 bp, Unknown
  Obtained from environmental sample
  misc_feature (1)..(1488): n is a, c, g, or t
ttgtcaaagctggactatcttcgcgctcttggcgtcgacgcaatatggttaagtcctgtgtacgattcacccaatgacgacaacggttacgacattcgcgattattacaaaattttaccggagtacggaacaatggatgatatggacgcgctcatagccggcctgcatgaacgcggcatgaagctggtcatggatcttgtcgtcaaccatacatcggacgaacacccctggtttcagtcagcgttaaacgatgaaaactcgccgtaccgcgatttctattatttccgtaaatcggacggcaaaccgcccaataactgggtttcttttttcagcggctccgcgtggaactactatccaaagcaggatatttgggcgctccaccttttttcaaaaaagcaaatggacttaaactgggaatgtcccgcgttacgcgaagaaatatataaaatggtacgctggtggctggaaaaaggcgtggacggcttccggcttgacgttatcaattttatttccaagagcccgggtcttggtgacggcaatccgtttataggggcgttgatgatgtataccggcattgaacattatttttacgggcctaaactaaacgaataccttaaagaactgcgcgccaaagcgtttgatccgtacaaagcgttttccgtcggggaaacgcccggtatcggaatatatgcgggacgccttctgacagacagttaccgccatgagcttgatctgattttttcgtttgaccatcttatatcaccgggccacacccgttttgacaatcaacgttacagcctgtcctatctaaaacatttttacatgacgcacctgaacgccgatctcggacacggctggagcacgcttttcttcaacaaccacgacaacccgcgcatggtgtccaagattgatcctgagggcttgtacaccataccgctcgcgaaacttctcgcaacattgcagttgactctgcgcggcactccttttctgtttcaaggcgacgaagccggcgcctgcaacgttaagtttaaatctattgatgaaatcaccgatgtagaaagcctcggtctttacgccgaactgataaaaaccatgcctcccgataaagcgttcaaacgaattctcggcggaactcgcgaccacgcgcgcgctccaatcaactgggaagagcacgagcaccaacgcggcgaagcggactcggtgtggcgtttctacagcgacattatcgtcatgcgccgctcatcgcaggcgctgatttacggcgacttggaattcctgcgcccgcacgataaaaatttattatgcttcctccgccgttcaaagagcgaatgtttttacattgaggcgaaccttactccgaagaagcgcaaaagcagggcaaagcgcggcgctgttccgctgtttgggaattacgacaagtccgcggacaagatactgcggccttacgaggcgagggtttattcattaccgttgaacgctaagatatga

SEQ ID NO: 60578 - protein, 495 aa, Unknown
  Obtained from environmental sample
  DOMAIN (1)...(383): Alpha amylase, catalytic domain
  misc_feature (1)..(495): Xaa is any amino acid
MSKLDYLRALGVDAIWLSPVYDSPNDDNGYDIRDYYKILPEYGTMDDMDALIAGLHERGMKLVMDLVVNHTSDEHPWFQSALNDENSPYRDFYYFRKSDGKPPNNWVSFFSGSAWNYYPKQDIWALHLFSKKQMDLNWECPALREEIYKMVRWWLEKGVDGFRLDVINFISKSPGLGDGNPFIGALMMYTGIEHYFYGPKLNEYLKELRAKAFDPYKAFSVGETPGIGIYAGRLLTDSYRHELDLIFSFDHLISPGHTRFDNQRYSLSYLKHFYMTHLNADLGHGWSTLFFNNHDNPRMVSKIDPEGLYTIPLAKLLATLQLTLRGTPFLFQGDEAGACNVKFKSIDEITDVESLGLYAELIKTMPPDKAFKRILGGTRDHARAPINWEEHEHQRGEADSVWRFYSDIIVMRRSSQALIYGDLEFLRPHDKNLLCFLRRSKSECFYIEANLTPKKRKSRAKRGAVPLFGNYDKSADKILRPYEARVYSLPLNAKI

SEQ ID NO: 60579 - DNA, 438 bp, Unknown
  Obtained from environmental sample
  misc_feature (1)..(438): n is a, c, g, or t
atgacagtacaatacaatccctcatggaaagtcttttgtgttgatgaggctattgcgcagctgcggaaacggcgatccgcggacatggcaacggggatttcgctttccggcccccatcgcgaccggtatgtttttaaccttgatggcagggaattcgccggaaacgcctcgacagggcagcgccgccttttggccctgcttctgcgggttgcccaggcccgccgttaccgtgaaacgaccggcagaaaccccattctgcttttggacgatgtgttgctggaaatggacggcgaaaaacgccgccgctttcttgccgcgctgccggactacgatcaggcgttttacacttttttgcctgaagagccctttcagcattatcggaccggggatactttggtatactatgtaaaacaggggcgcattgagacggagaagtaa

SEQ ID NO: 60580 - protein, 145 aa, Unknown
  Obtained from environmental sample
  misc_feature (1)..(145): Xaa is any amino acid
MTVQYNPSWKVFCVDEAIAQLRKRRSADMATGISLSGPHRDRYVFNLDGREFAGNASTGQRRLLALLLRVAQARRYRETTGRNPILLLDDVLLEMDGEKRRRFLAALPDYDQAFYTFLPEEPFQHYRTGDTLVYYVKQGRIETEK

SEQ ID NO: 60581 - DNA, 1413 bp, Unknown
  Obtained from environmental sample
  misc_feature (1)..(1413): n is a, c, g, or t
atgaatgtacaattttattctcttggcgccgcggaagaagtaacgggctccaaacacgtaatcgaagttgacggtgaaagctatcttatcgactgtgggtcttttcagggttcccgcgcggaagcagacaggaaaaaccaggatttcggtattgaggccgaccgtatcaaaagcgtaatactgacgcacggccatcttgaccattgcgggctgttgccactgctggtcaaaagaggctacaggggcaatatttacgcaacccccgcaagcagtgacatcgcaagcctaataatgctggattcggcgcatatacaggccaatgacgcggagtatctgcgtaaagaggctcataaaaaaggtgaaaaatttgactgggctcccctttatacggaatcggacgcgattgccgcgtcatcccagacagtcggagtaccgtataataggcctatgctcatcggcgacggtataacgctggaatttttcgacgcggggcacatactcggctcggcgatggcgtatataactattaggcggagcggcaaggaactgcgtattctagccacaggcgatcttggccgcaagggcaagcctattatccgcaatccctcgattccgggcccggccccggactatattatcgtggaaagcacttacggcgaccgcagacatgacaaaaccagcgacgccacggaaaaacttgcggagctggccaaacgcgccgtggagactaaaggaaggatcatcatcccctcgtttgccatagagcgcacgcaggagctggtgtattatttccacctgcttgttgacgacgggattataccggaaatcccgatctatgtggattctccgatggcgactaacgcgacgacgatttttcaggtacaccctgaatgttacgacgaagaaataatgaaagcctttatcaaacaccacaaaaacccctttggttttaacaatctccactttactaccagcgtccaggaatccaagtccctgaacgatgaaaagggcccccttatcatcatctccgcggacgggatgtgcgaggccgggcgtatacagcaccacctgatccacagcatacaggatcccaacacaaccattcttctcgtgggatacatggcggaaaacaccctgggccgcagaatacgcaaccgcgagagcgaggtaaaaatccacgggatgtggctcaaactaaaagcccatgtcgagcagataaacgcgttcagcgcccacgcggattatgaggaaacagtagaatggctcaacgagctggacaggtcgcgcctgaagggcctttttatggttcacggcgaaaagaaggcgcaagcggcgttcaaaaaataccttgccgaacaaggatacgccaacacggagatagttaaatacggtaaaacctacgaactggattga

SEQ ID NO: 60582 - protein, 470 aa, Unknown
  Obtained from environmental sample
  DOMAIN (397)...(441): RNA-metabolising metallo-beta-lactamase
  misc_feature (1)..(470): Xaa is any amino acid
MNVQFYSLGAAEEVTGSKHVIEVDGESYLIDCGSFQGSRAEADRKNQDFGIEADRIKSVILTHGHLDHCGLLPLLVKRGYRGNIYATPASSDIASLIMLDSAHIQANDAEYLRKEAHKKGEKFDWAPLYTESDAIAASSQTVGVPYNRPMLIGDGITLEFFDAGHILGSAMAYITIRRSGKELRILATGDLGRKGKPIIRNPSIPGPAPDYIIVESTYGDRRHDKTSDATEKLAELAKRAVETKGRIIIPSFAIERTQELVYYFHLLVDDGIIPEIPIYVDSPMATNATTIFQVHPECYDEEIMKAFIKHHKNPFGFNNLHFTTSVQESKSLNDEKGPLIIISADGMCEAGRIQHHLIHSIQDPNTTILLVGYMAENTLGRRIRNRESEVKIHGMWLKLKAHVEQINAFSAHADYEETVEWLNELDRSRLKGLFMVHGEKKAQAAFKKYLAEQGYANTEIVKYGKTYELD

SEQ ID NO: 60583 - DNA, 1053 bp, Unknown
  Obtained from environmental sample
  misc_feature (1)..(1053): n is a, c, g, or t
atgataataagcgcaagcagaagaaccgatattccttcacattattcggaatggttttttaaccgaataaaggagaaatttgtttatgtaaggaatcccatgaatatacgtcaagtcagcgcaataaatcttgatcccgaaattgtagattgtattgttttctggagtaaaaacccaaagccaatgatagacaattttcaattaataaaagattataagtattattttcaatttacccttaatccgtatgaaccggatgttgaagcaggattgccacccaaaaccgaaataattgaaacctttaaaaaattatcggatataatcggcccgcagaaagttatttggcgttatgatccaattttgattaatagcaaatacaatacggcatatcatattgataaatttgagaaaacagcctgtgtccttaaaggatatacagaaaaagtaacattcagttttattgatttctataaaaagacagcggaaaatattaaatcattggagattattgaaataccaacagaagaaaagaatatcatcgcccaaaaattttcagaaatcgctaaaaataatgatttattaattgatacatgcgcggaagatattgatctttcagaatatggcattgcgcgcgcccgttgtatagacgacaggttaatctcaaaaataacaggatataatttacctgttgaaaaagacaaaaaccagcgtccggaatgcggctgtgttaaaagcattgatataagcgaatataactcttgttccaatggatgcgtttattgttacgcaaattatagcaataatattgttgaaaaaaacatcaaaaaacatatcccgtcatcgccattattgacaggtgatgtttgccctgatgatattgtaaaggaacgaaaaataacaagtgaaaaatattatcccctttgttcgcttaactgcgaaagaggtaccagtccggggttgtcattttcgccttcggtgcgggacagttcttccagcagctccttgccccggcgggaaattttttccggtatgcggacaattaaaatgatgtag

SEQ ID NO: 60584 - protein, 350 aa, Unknown
  Obtained from environmental sample
  misc_feature (1)..(350): Xaa is any amino acid
MIISASRRTDIPSHYSEWFFNRIKEKFVYVRNPMNIRQVSAINLDPEIVDCIVFWSKNPKPMIDNFQLIKDYKYYFQFTLNPYEPDVEAGLPPKTEIIETFKKLSDIIGPQKVIWRYDPILINSKYNTAYHIDKFEKTACVLKGYTEKVTFSFIDFYKKTAENIKSLEIIEIPTEEKNIIAQKFSEIAKNNDLLIDTCAEDIDLSEYGIARARCIDDRLISKITGYNLPVEKDKNQRPECGCVKSIDISEYNSCSNGCVYCYANYSNNIVEKNIKKHIPSSPLLTGDVCPDDIVKERKITSEKYYPLCSLNCERGTSPGLSFSPSVRDSSSSSSLPRREIFSGMRTIKMM

SEQ ID NO: 60585 - DNA, 366 bp, Unknown
  Obtained from environmental sample
  misc_feature (1)..(366): n is a, c, g, or t
gtgataatcagaataaagcaccatgaatattttgagcggaataaccttgatctgtactgcgcgattgcaatctctgttacacaggcgactctgggcgcggaaatacgtgtcagcacccttgacggcaaaacaataaaggtaaaagtgcctcccggaacccagaacggcaaaagactccgcatccgcgctgaaggcgtgccttcgggaagctaccggggcgatctctacatcattttaattgtccgcataccggaaaaaatttcccgccggggcaaggagctgctggaagaactgtcccgcaccgaaggcgaaaatgacaaccccggactggtacctctttcgcagttaagcgaacaaaggggataa

SEQ ID NO: 60586 - protein, 121 aa, Unknown
  Obtained from environmental sample
  DOMAIN (2)...(99): DnaJ C terminal region
  misc_feature (1)..(121): Xaa is any amino acid
MIIRIKHHEYFERNNLDLYCAIAISVTQATLGAEIRVSTLDGKTIKVKVPPGTQNGKRLRIRAEGVPSGSYRGDLYIILIVRIPEKISRRGKELLEELSRTEGENDNPGLVPLSQLSEQRG

SEQ ID NO: 60587 - DNA, 630 bp, Unknown
  Obtained from environmental sample
  misc_feature (1)..(630): n is a, c, g, or t
atgaactacggcgaagccttccaaaaaatgtttgaactggttgtccgcctgcgcagtccaggcggctgcccctgggatttggaacaaacctcgcttacactgcgcggcaatttaatcgaagaaacctacgaatgtgttgaagcaataaatgaacaaaacccgctccatgtaaaggaagagttaggtgacatatttctgcttgtcacgatgctggcatacatgcaagaacaggaaggacattttaccgtcgccgaagtgttgaatgagctgtcggaaaaactaatccgccgccacccacacgttttcgagacaaacgccaatagggtaggctctgctctgtcttcggaagaagttttacggaattgggctaaaataaaagttgaacaggaaggccgtaaacccaaagattcacttttggatgaagtctcccgaggtcttccgccgctggacagggcctggaaactccaaaaaaaggccgcaaaggtcggctttgattggcccgatgcggccggcgtaattgccaaaataaaagaagaactatgcgaaactgaagcggcaatagagaatgtagcttctgttgccgacaacactaccctcgaggaagaactgggcgatctgctttttctgtag

SEQ ID NO: 60588 - protein, 209 aa, Unknown
  Obtained from environmental sample
  DOMAIN (29)...(102): MazG nucleotide pyrophosphohydrolase domain
  misc_feature (1)..(209): Xaa is any amino acid
MNYGEAFQKMFELVVRLRSPGGCPWDLEQTSLTLRGNLIEETYECVEAINEQNPLHVKEELGDIFLLVTMLAYMQEQEGHFTVAEVLNELSEKLIRRHPHVFETNANRVGSALSSEEVLRNWAKIKVEQEGRKPKDSLLDEVSRGLPPLDRAWKLQKKAAKVGFDWPDAAGVIAKIKEELCETEAAIENVASVADNTTLEEELGDLLFL

SEQ ID NO: 60589 - DNA, 1881 bp, Unknown
  Obtained from environmental sample
  misc_feature (1)..(1881): n is a, c, g, or t
atgagtgataacagaaactcgccaggcagggttacggggattcgcggcccgggattgagcaggggcggccccggaggaatgttcgccgcaatgggcgctaaggcgaaagacttcaaaggcaccatgaggcagcttgcctcttacctgaaacccttccgactgaccatcgtcgtcgtgtgggttctggctttggtttccacagcctttacgattgtcggtccctggatcatgggaatggttacggacgaactggtaacgggaatttcccggcaaatgtcaggggtaggcattatcgacttcggaaggatagcgtcaatacttatcatgcttttaagcctctacctgataagcgccctgtgttcgtggctccagggttttttgatgacaaaggtgagcgttaaggtaacttatactttaagagaagatatcaacaaaaagcttcacctgttgcctttcagttattttgataacgttacccacggagaagtcctctcccggcttaccaacgatgtggacacggttaaccaaaccctcaccatgagccttacccagatcattacgtcggtcagttccgtgcttggaatcctctgtatcatgttctcggtaagctggattctcactcttatagctatttgctttctttccctttctattattttcatcactttaattgtgaagcagtcccaaaaattttttaaagcccagcaaaaatgcctggggaacgtgaacggccacattgaggaaatgttctcaagccacatagtagtcaaagctttttcaggggaaaccgaatcggtaaaagcgtttagttcactcaacaaagagttatatcgagctgcgtggaaggcaaattttttctccggccttcttatgccactaacaaactttgttgggaacctgacctatgttgccatttgtgtcgctggcgggatctttgccattcgaggaacgataaccattggcagcatacaggctttccttcaatacatacgctctttcaaccatcccctgacgaatatcgccaatatttcaaacatactccaacaaacagcggcggcggcggaacgggtattcgagtttcttggcgaaaccgaggaggttcctgatcctgtgccagcacagcctgtcccccgttccaacagcgttctggcttttgagcacgtttatttcagttacgatcccaaaaaacccgtacctgtaatcgaggattttaacgccaggattgaagggggccaaaaaatagccatcgtgggccccaccggcgcgggaaagactaccattgtaaagctcctcatgcgtttttacgatgtaaacgatgggtcaataacaatagacggaaaagacatacgcgaatttacgcgtaacgatcttcgctctctttttggcatggtgctgcaagaaacctggcttttttccggcaccatcgccgaaaatatccgctacagccgcagcgaagcctcggatgcggaagtagaggcggctgccaaagctgcccaggtggatcattttgtgcgctcttttccggacggctacaacatggtacttaacgaagaaagcgacaatatttccgttggtcagaaacagctccttaccattgcaagggtcattcttgcaaatcctgaaatgctcatacttgacgaagccacaagtagcgtggacacccgcacggaacggctaattcagaaggcaatggacaatttaatgaaagggcgaaccagttttattattgcccacaggctttctaccattcgcaacgccgatcttattttagttttaaaaaacggtgcgatagtggaacaaggaaaacaccgcgagcttcttgatcgcaaaggtttttattcagagctttacaacagccaattcgcgggtcaaaggatataa

SEQ ID NO: 60590 - protein, 626 aa, Unknown
  Obtained from environmental sample
  DOMAIN (56)...(337): ABC transporter transmembrane region
  misc_feature (1)..(626): Xaa is any amino acid
MSDNRNSPGRVTGIRGPGLSRGGPGGMFAAMGAKAKDFKGTMRQLASYLKPFRLTIVVVWVLALVSTAFTIVGPWIMGMVTDELVTGISRQMSGVGIIDFGRIASILIMLLSLYLISALCSWLQGFLMTKVSVKVTYTLREDINKKLHLLPFSYFDNVTHGEVLSRLTNDVDTVNQTLTMSLTQIITSVSSVLGILCIMFSVSWILTLIAICFLSLSIIFITLIVKQSQKFFKAQQKCLGNVNGHIEEMFSSHIVVKAFSGETESVKAFSSLNKELYRAAWKANFFSGLLMPLTNFVGNLTYVAICVAGGIFAIRGTITIGSIQAFLQYIRSFNHPLTNIANISNILQQTAAAAERVFEFLGETEEVPDPVPAQPVPRSNSVLAFEHVYFSYDPKKPVPVIEDFNARIEGGQKIAIVGPTGAGKTTIVKLLMRFYDVNDGSITIDGKDIREFTRNDLRSLFGMVLQETWLFSGTIAENIRYSRSEASDAEVEAAAKAAQVDHFVRSFPDGYNMVLNEESDNISVGQKQLLTIARVILANPEMLILDEATSSVDTRTERLIQKAMDNLMKGRTSFIIAHRLSTIRNADLILVLKNGAIVEQGKHRELLDRKGFYSELYNSQFAGQRI

SEQ ID NO: 60591 - DNA, 813 bp, Unknown
  Obtained from environmental sample
  misc_feature (1)..(813): n is a, c, g, or t
gtgctgggaacggaagtttctattcgtgattcagaaacgccgtcaactgcgggaaagggcgcggtttccggccaacgtgtggaatttaaaaatgtgtcattccgttatgaaggcgcaacggaagatgccctgaaggatattagttttacagcagagggaggacagaccactgcgattataggcgcgacaggttccggaaagtcaaccctcgtaaatcttattatgcgtttttacgatgttacgggcggaagcatagcggttaacggtgtggatgtaagatcgctttcccaaatggaacttcgcggcggaatcggttatgtgccgcaaaagagtatccttctttccgggcctgtgtcttttaacctccgttatgggaaaactgatgcatccgctgcggagattcgcgaaggagcggagattgcgcagattctggattatattgaggaaagcccggagggctttgaatcgggcattgcgcaagggggcgccaatgtttcgggcggccagaaacaaaggctttctatcgcgcgggcgcttgtgcgtgacccggcgattcttatttttgacgacagcttttccgctctggactttgccactgacgcacggctgaggcatgcgctggaagaaaagagaaaatgggtcacaaaaattatagtcgcccagcgagtgggaaccatcatgcacgccgacaagatcatcgtgttggaaaaaggcaggatcgccggcatgggtaagcaccaggaattgatggaaacctgcgctgaatacagggaaattgccgaatcccaattttcacaggaagccgtattatga

SEQ ID NO: 60592 - protein, 270 aa, Unknown
  Obtained from environmental sample
  DOMAIN (54)...(238): ABC transporter
  misc_feature (1)..(270): Xaa is any amino acid
MLGTEVSIRDSETPSTAGKGAVSGQRVEFKNVSFRYEGATEDALKDISFTAEGGQTTAIIGATGSGKSTLVNLIMRFYDVTGGSIAVNGVDVRSLSQMELRGGIGYVPQKSILLSGPVSFNLRYGKTDASAAEIREGAEIAQILDYIEESPEGFESGIAQGGANVSGGQKQRLSIARALVRDPAILIFDDSFSALDFATDARLRHALEEKRKWVTKIIVAQRVGTIMHADKIIVLEKGRIAGMGKHQELMETCAEYREIAESQFSQEAVL

SEQ ID NO: 60593 - DNA, 396 bp, Unknown
  Obtained from environmental sample
  misc_feature (1)..(396): n is a, c, g, or t
ttgccatatatacaagaacaaaaacctactgatagttatataatattacataacaatataaagataggctatattcaaacatatttgttgaaaaattatcctgaatataatgagcttgttcaagctgatgataattcagccggaattgatatgttaataggtgaaaaagagtatattcacaaaggattaggaccaataattattaaaaaatttttaatagatattgtatttcaaaataaaaacataaagaattgtgttattgggccagagccaaaaaatataatcgctattaaagcatatgaaaaggctggatttaaatatatcaaaacaataaaagtcccagatgaagatgaacctgaatatataatggaaatatcaaagaatgaaattgaataa

SEQ ID NO: 60594 - protein, 131 aa, Unknown
  Obtained from environmental sample
  DOMAIN (13)...(106): Acetyltransferase (GNAT) family
  misc_feature (1)..(131): Xaa is any amino acid
MPYIQEQKPTDSYIILHNNIKIGYIQTYLLKNYPEYNELVQADDNSAGIDMLIGEKEYIHKGLGPIIIKKFLIDIVFQNKNIKNCVIGPEPKNIIAIKAYEKAGFKYIKTIKVPDEDEPEYIMEISKNEIE

SEQ ID NO: 60595 - DNA, 1293 bp, Unknown
  Obtained from environmental sample
  misc_feature (1)..(1293): n is a, c, g, or t
gtgcgccttgaacgccggaaaatcggtgtcatcagttatgacatcaattttcataattacaggagttttgctatgcacaacgattttactttgttttctagggtggttccatcggggaaaaaggtggtgtattactacgcttatgaccatgatggaaaacggtcggggccgtggactactggacagaccaataggacggcggcacggaattactgcaattcgctgattaagaaaggcaagttattgccggggctaaaggatattcccacttttgaggaatacgccgccgatttttgggattggaataacagcccctacttcaaagaccggaagaaacggcggcaattaacgcaacattacgccgataaaaataaacgagtaaccgaaaaatcactcgttccgtattttggcaaaatgaaacttgataaaataacaggagaggttatagaccagtggcttgattacatgattaagcggggctaccaaaatacgacaaccaatacttattttacaactttacaaacgatgttgaaatgggcggtgcgaaaagaaattatcgaaaaagaccccttcttgaacgtgcaacggctgattaacgagaaaaaaataaagaaaatcattacccctgacgaatttaaggcgttgtttgttgataattgggaaaaagtgtggaataacgattttctgcggtgtaccgcccataagctgacggctttgacgggcatgaggtgctgtgaagtgttgggattgcggggtgaatatgtgttcgatgaccatatatacctgtgcgggcaatatgacaaatacggctatcgggaaacgaaaacgaaagtaaaacaccatattccgattgccgccgaattggtgggggatttgcgaaccctgatgaagataaacggacaggggtatatattttcccttgacgggggtgctacgccgatatgccggaaacatatgtacgtggggttgcggaaggctcttaataatattggcataactaatacggagataacggagcggggcttgcatattcatgcgtggcggcatttctgtaatacggaattgcagaagggcgggcttccggtacaaaaggtacaggcggttaccggacataaatctgaaagaatgacggaacactatacccactttgacccggcggattttggagcagtaccggaaatacaggaaaccttattaagaaaaactgatacgcttgcgaaagaacgcccgccgcttacgttggtaaaaatgccggaggataatacgccgaatgaaagcaagcgggcttcataa

SEQ ID NO: 60596 - protein, 430 aa, Unknown
  Obtained from environmental sample
  DOMAIN (216)...(390): Phage integrase family
  misc_feature (1)..(430): Xaa is any amino acid
MRLERRKIGVISYDINFHNYRSFAMHNDFTLFSRVVPSGKKVVYYYAYDHDGKRSGPWTTGQTNRTAARNYCNSLIKKGKLLPGLKDIPTFEEYAADFWDWNNSPYFKDRKKRRQLTQHYADKNKRVTEKSLVPYFGKMKLDKITGEVIDQWLDYMIKRGYQNTTTNTYFTTLQTMLKWAVRKEIIEKDPFLNVQRLINEKKIKKIITPDEFKALFVDNWEKVWNNDFLRCTAHKLTALTGMRCCEVLGLRGEYVFDDHIYLCGQYDKYGYRETKTKVKHHIPIAAELVGDLRTLMKINGQGYIFSLDGGATPICRKHMYVGLRKALNNIGITNTEITERGLHIHAWRHFCNTELQKGGLPVQKVQAVTGHKSERMTEHYTHFDPADFGAVPEIQETLLRKTDTLAKERPPLTLVKMPEDNTPNESKRAS

SEQ ID NO: 60597 - DNA, 1524 bp, Unknown
  Obtained from environmental sample
  misc_feature (1)..(1524): n is a, c, g, or t
atgagcgaaatggcgctggtgctggatttcggcggccaatataaggagcttatcgcgggaacggtaaggaacctgtccgtatactcgcagataatgccgggcaataccccgcttgatgaaatcaaacggttgaaccccatcggcataatcctgacaggcgggccgaacagcgtatacctgcccgactcgccacggtgcgaccctgaaattttttcattgggcattcccatcctcggcatctgctacggaatgcatttaatgtgttatacgctcggcggcaaggttgcgcccggcggtatgggagaatacgggcgcgtcaaagtaacgcccgcgaaaacaccgtcaaagttatttcaaggtaaaaaagattccttttacacgctgatgagccacggggatgccgcagcaagcctgccggacggctttcgcgtaacggcaaaaagcgcggtctgcattgcggcctgtgagaataaggcgaaaaaactttacgccgtgcagttccacccggagacaaaacacaccaaaggcgggcgcgaaattattaaaaggtttttatatgatatttgctgcgcgtcgggcgattataaacttggcgattatatagatacccaaattaaacaaatacgaaaaaccgccggcgataatcatgtcctgctcgctctgtccggcggggttgattcgtccgtatgcgccgggcttttatcaaaggcggtacccgggcagcttacctgcatctttgtcgatcacggccttatgcgcttaaacgagggcgatgaaatagagcgcgcgttttcaaaacgaaaccttaacttcatccgcgtgaacgcgcaaaaacgcttccttgccaaactggagggcgtaaccgagcctgagaaaaagcgcaaaataatcggtgaggagttcatccgcgtgtttgaggaagagtccgctaagttaggcgacattccgtttctggcgcaggggacgatataccccgatgtcgttgagtcgggcggcaagcacggcgcggtaatcaagagccatcacaacgtgngcgggcttccggaaaccctcaagtttacgggtatcatagagccgttgtcgcggcttttcaaggatgaggtgcgcgagttaggcagaaaacttaagctgccgtcgtcgcttgtaaaccgccagccgttccccggtcccggacttgctatccgcgtcatgggcgagattacggaagaaaaacttgacgttctgcgaaaagccgacgcaattctgcgcgaagaattggacaaactgaaacgcagacccgatcaatatttttgcgtacttaccaacacacggtcggttggcgttaagggggacgacaggacatacgactatgtaatcgccctaagagccgtaaagaccgacgactttatgacatgcgaatacgctcccctgccccacaagattctaagccgtatttcatcgcggattacgagcgaaataccgtccgcaagcagaattgtttacgatattacgtcgaagcctccggctacgatagaatgggaatga

SEQ ID NO: 60598 - protein, 507 aa, Unknown
  Obtained from environmental sample
  DOMAIN (17)...(170): Peptidase C26
  misc_feature (1)..(507): Xaa is any amino acid
MSEMALVLDFGGQYKELIAGTVRNLSVYSQIMPGNTPLDEIKRLNPIGIILTGGPNSVYLPDSPRCDPEIFSLGIPILGICYGMHLMCYTLGGKVAPGGMGEYGRVKVTPAKTPSKLFQGKKDSFYTLMSHGDAAASLPDGFRVTAKSAVCIAACENKAKKLYAVQFHPETKHTKGGREIIKRFLYDICCASGDYKLGDYIDTQIKQIRKTAGDNHVLLALSGGVDSSVCAGLLSKAVPGQLTCIFVDHGLMRLNEGDEIERAFSKRNLNFIRVNAQKRFLAKLEGVTEPEKKRKIIGEEFIRVFEEESAKLGDIPFLAQGTIYPDVVESGGKHGAVIKSHHNVXGLPETLKFTGIIEPLSRLFKDEVRELGRKLKLPSSLVNRQPFPGPGLAIRVMGEITEEKLDVLRKADAILREELDKLKRRPDQYFCVLTNTRSVGVKGDDRTYDYVIALRAVKTDDFMTCEYAPLPHKILSRISSRITSEIPSASRIVYDITSKPPATIEWE

SEQ ID NO: 60599 - DNA, 1011 bp, Unknown
  Obtained from environmental sample
  misc_feature (1)..(1011): n is a, c, g, or t
atgattgttgttattaaaaaagacgcgaacgaaaagagcgtagaaaatcttatctcatggctggaaaatcagggactgcgcgttaatgtaaaccgcggcatgtttcaaactgttcttgggttgattggcgacacgcacagccttaacgcggaacttgtcggcggcatggacattgtagagcgtgtacagaggatcagcgagccgtataaaaaagccaaccgcaagtttcacatagacgataccgttgtggacatgggcggttataaaatcggcggcggcaattttcagtttatcgccggtccctgttccgtagaatcaaacgaacaaatatgcggaatcgcgaagcaggtaaaacaggcgggagcgaatcttctgcgaggcggagcgttcaagcctcgaacttcgccatattcgtttcaggggcttcgggacgaaggtatagaatttttattaaaagcaaaagagctgacaggaatgccggttgttaccgaaataatgaacgcaaatcatctacccatgtttgaacaggtggatgttattcaagtcggcgcgcgcaatatgcagaattttgaattgttgaaggaactgggaaaacagaaaaaaccaatcctgttaaaacgcggacttgccaatactcttgaagaactgcttatgagcgcggagtacataatgtccgaaggaaacactcagatcattttgtgtgaacgcggtatccgtacctttgaaacatcaacccgcaatactcttgatatttccgccgtgccgatgttaaagcgtttgacgcatctgcctgtcattattgatccaagccacgccgcaggagatgccgctcttgtatacccgctctctatggcggcggcggcggcaggcgcagacggtcttatcattgaagtgcataacgatccggctcatgctctgtgcgacggacctcagtcgattaagcctgacgctttcgcttctttggcgcatgatgtagagaaagtcttagctattgtcaataaaaaaggatga

SEQ ID NO: 60600 - protein, 336 aa, Unknown
  Obtained from environmental sample
  DOMAIN (80)...(330): DAHP synthetase I family
  misc_feature (1)..(336): Xaa is any amino acid
MIVVIKKDANEKSVENLISWLENQGLRVNVNRGMFQTVLGLIGDTHSLNAELVGGMDIVERVQRISEPYKKANRKFHIDDTVVDMGGYKIGGGNFQFIAGPCSVESNEQICGIAKQVKQAGANLLRGGAFKPRTSPYSFQGLRDEGIEFLLKAKELTGMPVVTEIMNANHLPMFEQVDVIQVGARNMQNFELLKELGKQKKPILLKRGLANTLEELLMSAEYIMSEGNTQIILCERGIRTFETSTRNTLDISAVPMLKRLTHLPVIIDPSHAAGDAALVYPLSMAAAAAGADGLIIEVHNDPAHALCDGPQSIKPDAFASLAHDVEKVLAIVNKKG

SEQ ID NO: 60601 - DNA, 849 bp, Unknown
  Obtained from environmental sample
  misc_feature (1)..(849): n is a, c, g, or t
gtgacatcagtttccaaagaagaactttctgaaatgatggtaggcagaaaggtgaatcttttggttgaaaaagcggataaacagcccggagacgttattcttaaggtagagaatcttatcgtaacaagcagtatgtcggatatacctcttgtaaacaacgtaaattttgaagtgcgcgagggcgagattgtctgcatcgcggggatcgacggcaacggccagcaggagcttgtgtacgcccttgcgggaatgacggaaattgacagcgggcgcattgtatataacgggaaagatattacacataacgatatatggtcgagggggcttgcccatattcccgaagacaggcagaaacacgggcttgtgctggattacaatatcgcctacaatcttattttacagaattattttactccgcagtttcagaaaaaaggttttcttaaatttgacgaaatttacaaatttgcggataacttgatagaagcctttgatattcgctgcgggcacggatcgcgcaccattacaaggggaatgtcaggcggcaaccagcaaaaggtaattgtcgcaagggaaatatcaaggaattcaagcctgttaattgcggttcagccgacaagagggcttgatgtcggcgctatcgaatatattcacaaacagcttgtagcccagcgcgataagggaaagggagtgcttttggtttctctggaacttgacgaagtaatgaacgtgagcgacaggattcttgttattcataaagggaatcttgtcgccgacgtaaggccgaaggacgtaacatataaagatttgggtctttatatgctgggtgtcgtaaagcaaaacgcggcgtaa

SEQ ID NO: 60602 - protein, 282 aa, Unknown
  Obtained from environmental sample
  DOMAIN (61)...(253): ABC transporter
  misc_feature (1)..(282): Xaa is any amino acid
MTSVSKEELSEMMVGRKVNLLVEKADKQPGDVILKVENLIVTSSMSDIPLVNNVNFEVREGEIVCIAGIDGNGQQELVYALAGMTEIDSGRIVYNGKDITHNDIWSRGLAHIPEDRQKHGLVLDYNIAYNLILQNYFTPQFQKKGFLKFDEIYKFADNLIEAFDIRCGHGSRTITRGMSGGNQQKVIVAREISRNSSLLIAVQPTRGLDVGAIEYIHKQLVAQRDKGKGVLLVSLELDEVMNVSDRILVIHKGNLVADVRPKDVTYKDLGLYMLGVVKQNAA

SEQ ID NO: 60603 - DNA, 750 bp, Unknown
  Obtained from environmental sample
  misc_feature (1)..(750): n is a, c, g, or t
atggaaaaacaataccacgttgattttgacggcagccacggcgcgttatacgcaattcttcccggcgatcccggcagggtggaaaaaatcgcctcatttcttgaaaaaccgcgcttttatcatcaaaaccgcgaatacacaacatggttaggcgaattgtcaggcaagaccgtgatggtaatatcgaccggcatgggagggccttccaccgcgatagccgtagaagagctttacaaaacaggagtgcgaaattttataagaataggaacctgcggcggaatggcgcttgacgtattgggaggggacattgttatcgcgacgggcgcaatccgcatggaagggacaacaaaggagtatgtgcctgttgaattccccgccgtagctaatcttgatattacaaacgcgcttgtagaggccgcgaaaaacttaaaacaaaaatggcacgcgggcattgtgcaatgcaaagattccttttacggccagcacgatcccgcccgcatgccgtccggctacgagttacaggacaaatgggaagcgtggaaaaaagccggctgtcttgcctcagaaatggaaagttccactcttttcatcgtgagccagatactgggcgcgcgcgccggctgcgtactaaacgtggtctggaaccaggagcgcgaaaaagccggcatggaaaacccccactgccacgacaccgaagccgcgattaagacagctgtggaagcggtaaggcttttgattcaaaaaggataa

SEQ ID NO: 60604 - protein, 249 aa, Unknown
  Obtained from environmental sample
  DOMAIN (16)...(242): Phosphorylase family
  misc_feature (1)..(249): Xaa is any amino acid
MEKQYHVDFDGSHGALYAILPGDPGRVEKIASFLEKPRFYHQNREYTTWLGELSGKTVMVISTGMGGPSTAIAVEELYKTGVRNFIRIGTCGGMALDVLGGDIVIATGAIRMEGTTKEYVPVEFPAVANLDITNALVEAAKNLKQKWHAGIVQCKDSFYGQHDPARMPSGYELQDKWEAWKKAGCLASEMESSTLFIVSQILGARAGCVLNVVWNQEREKAGMENPHCHDTEAAIKTAVEAVRLLIQKG

SEQ ID NO: 60605 - DNA, 471 bp, Unknown
  Obtained from environmental sample
  misc_feature (1)..(471): n is a, c, g, or t
gtggtttttgaaaccttcctgaacgatttgccggacataggctccgtctgttccggcggccgttacgacaacctcgccggcctgtattccagggataaaaattcaatcagcggcgtaggcgcgtccataggacttgaccgcctgattgccggtcttgagagccttaacaaactgcccgccgcggactattgccgcgcggccattgcctgcgtggatattgaaaaatcgggacagtatcaggcgtttgccggaagactgcgccaagccggcatcccctgcgaggtgtttactgaaggctgcggcgaaaaacagcttgtaaaacaatacgtgcttgcggagaaaaaaggcctgcgttatgtaataataccgggcaagaatatatcaagcgataccgttaccttacgcgacatcacaacacgccaaaaccatgaattatccattgaagaactgatcgagattttgaagcgctag

SEQ ID NO: 60606 - protein, 156 aa, Unknown
  Obtained from environmental sample
  DOMAIN (65)...(156): Anticodon binding domain
  misc_feature (1)..(156): Xaa is any amino acid
MVFETFLNDLPDIGSVCSGGRYDNLAGLYSRDKNSISGVGASIGLDRLIAGLESLNKLPAADYCRAAIACVDIEKSGQYQAFAGRLRQAGIPCEVFTEGCGEKQLVKQYVLAEKKGLRYVIIPGKNISSDTVTLRDITTRQNHELSIEELIEILKR

SEQ ID NO: 60607 - DNA, 621 bp, Unknown
  Obtained from environmental sample
  misc_feature (1)..(621): n is a, c, g, or t
atggacagattcggccgaggcgttgtagactgtaatcaggaatcgctcagattgtttgaaatatcgaataaacaggaatatatcgacagattttatgatttaatgccggcatatcagccggacggaaaaacactcgaagacggcattggatttgtcaaaaaggcgtttgaagaaggctactgccgttttgaatggacgcaccagaaattgaacggcgagctcattccgtgtgaaattacccttatccgcgttaaatataaagacggcaatattgttgtgggatacacgcgcgatttacgcgagcagaaggcaatgctcgccgaaatatacaaggaaggcgaaaaatcccgtacaatggcccattggtataattcaattcttaacgcgataccgctgccaatatcggttaccgacgcggataccaaatggacgtttattaatgcggccgttgaaaaaattttggggataacgcttgaagacgccatangcaagccctgcaataattggggcgccgatatctgntatacgccggactgcggtatcgcctgcgctaaaaggggcctacacaaacatatttttcaaggggagattcatcatatcaggtcgatgttccataattaa

SEQ ID NO: 60608 - protein, 206 aa, Unknown
  Obtained from environmental sample
  misc_feature (1)..(206): Xaa is any amino acid
MDRFGRGVVDCNQESLRLFEISNKQEYIDRFYDLMPAYQPDGKTLEDGIGFVKKAFEEGYCRFEWTHQKLNGELIPCEITLIRVKYKDGNIVVGYTRDLREQKAMLAEIYKEGEKSRTMAHWYNSILNAIPLPISVTDADTKWTFINAAVEKILGITLEDAIXKPCNNWGADIXYTPDCGIACAKRGLHKHIFQGEIHHIRSMFHN

SEQ ID NO: 60609 - DNA, 1026 bp, Unknown
  Obtained from environmental sample
  misc_feature (1)..(1026): n is a, c, g, or t
ttgaagacgccatangcaagccctgcaataattggggcgccgatatctgntatacgccggactgcggtatcgcctgcgctaaaaggggcctacacaaacatatttttcaaggggagattcatcatatcaggtcgatgttccataattaaagacccgaacggcacaacgatggggtatatcgaagttgtgcaggatattaccaacctgaaactgatggcaaaaaaacaggccgatgcggaagccgccaacctcgccaaatccgctttcctggcaaaggtaagccacgaagtacgcacgcccatgaacgccatcctgggcattaccgagattcaactgcaggacgaaatgcttccggcaaagacgcaggaggctttgggtgaaatttacaattcgggttatttgctgctgggcattatcaacgacatactggacctgtccaaaatagaagcgggcaaactggaactggttccggtcaactacgacgtccccagtctgatcaacgataccgtacatctcaatgttatgcgctatgacagcaagccgattgaattcagccttcaggtagatgagaaccttccgacaactctgttcggcgacgaactgcgcattaaacaaattcttaacaatctgctttccaacgcgtttaaatataccaactcaggcaaagtcacgctgtcggttgtttatgaggcgcaggaaggagaaactgctggtataatgcttgttttccgcgtcagtgataccgggcagggcatgaatgaggaacagataaataaactgtttgatgaatatacccgcttcaacatggaagccaaccgcacaaccataggtacgggcctgggcatggccattacgaaataccttgtccagatgatgaacggcataatttcagtggaagcaagccgggtaaaggttcgacatttaccgtgcggctgccgcaggggatcgttgcccaatcaggcgtattgggaaaggaattggcgaaaaacctcggcctgttcaaccttggcagggcggcgcaaatga

SEQ ID NO: 60610 - protein, 341 aa, Unknown
  Obtained from environmental sample
  DOMAIN (85)...(151): His Kinase A (phosphoacceptor) domain
  misc_feature (1)..(341): Xaa is any amino acid
MKTPXASPAIIGAPISXIRRTAVSPALKGAYTNIFFKGRFIISGRCSIIKDPNGTTMGYIEVVQDITNLKLMAKKQADAEAANLAKSAFLAKVSHEVRTPMNAILGITEIQLQDEMLPAKTQEALGEIYNSGYLLLGIINDILDLSKIEAGKLELVPVNYDVPSLINDTVHLNVMRYDSKPIEFSLQVDENLPTTLFGDELRIKQILNNLLSNAFKYTNSGKVTLSVVYEAQEGETAGIMLVFRVSDTGQGMNEEQINKLFDEYTRFNMEANRTTIGTGLGMAITKYLVQMMNGIISVEASRVKVRHLPCGCRRGSLPNQAYWERNWRKTSACSTLAGRRK

SEQ ID NO: 60611 - DNA, 867 bp, Unknown
  Obtained from environmental sample
  misc_feature (1)..(867): n is a, c, g, or t
gtgcggctgccgcaggggatcgttgcccaatcaggcgtattgggaaaggaattggcgaaaaacctcggcctgttcaaccttggcagggcggcgcaaatgaaaaaggctccgcaaattatacgcgagtatatgccttacggcaggattctggttgtagacgatgtggaaacaaacctgtatgtcgccaaaggattgatgaccccctacggcctgtcggttgaaacggccacgagcggatttgaaacagttgaaaaaatcaaggacggcgcgatttatgacatcatattcatggatcattttatgccaaagatggacggcatagaaacaacaaaaaatctgcgcgagttgggatatacgaggcctatagtagcgttgacagctaacgccctgacagggcaggcggaaatgtttgcggcaaacggtttcgatgattttatttccaagccaatagacatacgccaactgaataccacgctcaacaggctgatacgcgacaagtatccggctttaacgattgaagccgcgcggaatctcaaagacaatctgaaaaaaagtcccgccagcggcgataccgccaatgccgcatcgcggccttctattgacccggaactggcaaaaatttttacgcgggatgccgaaaaagccgccgccacactggaagcaatacagaaaaaagaaggcaattacggggacgaagatatacaaatgtatattataaatgtccacgccatgaaaagcgcgctggcaaatatcggcgagacggcgctttccggctccgcgctgaaactggaacaggccgggcgggcgcgggacaccgccgtaatgaccgccgaaccccggctcttctggattctctgcgaaaagtaa

SEQ ID NO: 60612 - protein, 288 aa, Unknown
  Obtained from environmental sample
  DOMAIN (47)...(160): Response regulator receiver domain
  misc_feature (1)..(288): Xaa is any amino acid
MRLPQGIVAQSGVLGKELAKNLGLFNLGRAAQMKKAPQIIREYMPYGRILVVDDVETNLYVAKGLMTPYGLSVETATSGFETVEKIKDGAIYDIIFMDHFMPKMDGIETTKNLRELGYTRPIVALTANALTGQAEMFAANGFDDFISKPIDIRQLNTTLNRLIRDKYPALTIEAARNLKDNLKKSPASGDTANAASRPSIDPELAKIFTRDAEKAAATLEAIQKKEGNYGDEDIQMYIINVHAMKSALANIGETALSGSALKLEQAGRARDTAVMTAEPRLFWILCEK

SEQ ID NO: 60613 - DNA, 492 bp, Unknown
  Obtained from environmental sample
  misc_feature (1)..(492): n is a, c, g, or t
atggacagattggccgagtctccgnctaccgttgaaagttatcttgacgctttccgtgacagctattttctatacaaagcggacagatacgacgttaaaggcaggaaactcttaaaaacgctcaataaatattacatggttgatatggggctgcgccgtctcctgcttggcgataaagctgttgacagcggacatatactggagaatattgtttatcttgaacttctgcgccggggctataaagtctatatcggcaaagttgacgacaaagaagtagatttcgcggcggaaggtccggacggtactgaatattatcaggtatctgaaactgtacgcggcaaggaaacacttgcgcgggaacttgccccgcttgaaatgatacgcgatcataaccctaaatttatgcttacccgtgattacgaaccaaatatatcgcataacggcataaagcagataaatgtactggactggctggtgtgggatggcagatag

SEQ ID NO: 60614 - protein, 163 aa, Unknown
  Obtained from environmental sample
  misc_feature (1)..(163): Xaa is any amino acid
MDRLAESPXTVESYLDAFRDSYFLYKADRYDVKGRKLLKTLNKYYMVDMGLRRLLLGDKAVDSGHILENIVYLELLRRGYKVYIGKVDDKEVDFAAEGPDGTEYYQVSETVRGKETLARELAPLEMIRDHNPKFMLTRDYEPNISHNGIKQINVLDWLVWDGR

SEQ ID NO: 60615 - DNA, 2292 bp, Unknown
  Obtained from environmental sample
  misc_feature (1)..(2292): n is a, c, g, or t
atgtcaatgcagacgagaaaaagtacaaaatcggcgccgcagtataaaacgaaaagcgcttttcgttttgccgatttttttataattgtattttttctgtctcttgcctttatcagtattgttttattcaggcaggatctgcttcaaactctgggcgctcagaataaagaatccgccggtattgtcatcgtaaaaaaaaatatagtacaacggcggcttggcgaccgcgtgctgtgggacaggcttgtcaatgactcccccgtatatctgggggatttaatccgcgtcgcggatatttcttccgcgttactcgacatagaaaacaacagcatagatttggatgaaaatacccttgtccgcatagcgcgctccgccgacggcgaaggttttcagattgagttaagttccgggaaggtgtcggtttcttccggcgccgacgcgaagagcgtttctttggaaataaacgggcaaaatataaagacaaaccctggaacggtaatgagcgccagcgccggaaacgccggagtatcggtgcaggttaccgccggaaccgcgcaaattacaaagagcgataacggcggcgccgcgggttcgcgcggagtgtctgcgcgaagtatttcatccggcgaaaagattatgatggacacggccgggagggaagtgtttgaaaagacggttgccgtaatgcggccggtacaaaacgcccgttatctgaaaagcgccaattcgcctatccccgttaattttgaatggaacaggataaatttttcaccggaagaaaagctgcgccttgaaatcgccatggacaggaactttaggcagattttcagggtaattaacggacttgacaatcaagcgcgggtcactcttgatacgggaatgtggtactggcggctgtctttcgggaattccgtcctttctgacggaaggattactgttgcggacggcgcgggactgcaattaataagccccgcgatgaacagtttgttccgttaccgcgacagtctgcctttgatgaatttccagtggtcgcgcgaagaagacgcttcttcttacattatagaaataagcagatcgtcggatttttcttccctgcaaatacgcgcacaggtcgcgtcctccaattacagcgattcaggtttaggagcgggaacatggtattggcgcgtaatgcccgttttccctggcgttttctcaggcacctcttctttttcccagcccgcttttttccggattgaacaaagcgcgccgcttccttccgccgccgaatcgacagggcctgccggcgccgagcggactgctcttgaaagaaacgcaacggaacggaacagccttgaagaatggttcgcggacgcggctccgtccaaaagagaagtgcctaaagacgtgccgccggagcttgttcccgaagaatggaaagccgagcccaaacctgaaaataaacccgaagctaagccggcttcaaaacctgaggcgaaaccggaaccaaaaacggaaaggagaacagaaagaaaaccggaacccaaacctgagcccaaaccggaacctaagcccgaacccagacccgaacctgagcctgagccaagaccggaacctgatagcgcgcttccggaaatacatctgcttcttcctgagcaaagggaaagattggaagggcttactgccatgcgtcagcagactgttttttcatgggaatgtacaggtaatatagtaagagcaagatttgtgctgtcaagaaatccgaaccccttgcagacagacgcggtggtggaaattcaaaatcccggatacactatccgccttgaccgtcttgaagaaggcgtatggtactggaatgttgaagcgcaaacccccgacggctttaccataagcgcgcccgcggcatatcaattacaggtgctgcctgtccttctcctggcgccgccggaaaatataagtccccgcgcaaggcagcgttacggactggcggaattaaggaatctcaggaacatagtctttgagtggaggccggtaaacggggcgaacgcgtatatatttacgctttaccagcagactgaaaccgggcggcggcaaatagcggttaccgaccctgttgcccggaccggctatgtattggataatctaagtgtgcttgaaaacggaacgtttatctggcaggtagaggcgctgcacataggcagtaacggcgaagttgaacagcacggaaggccggccgaatattcttttgttctggattttccgcgtccggagccggtacaaattgaggatctgggaatattgtatggcaattaa

SEQ ID NO: 60616 - protein, 763 aa, Unknown
  Obtained from environmental sample
  misc_feature (1)..(763): Xaa is any amino acid
MSMQTRKSTKSAPQYKTKSAFRFADFFIIVFFLSLAFISIVLFRQDLLQTLGAQNKESAGIVIVKKNIVQRRLGDRVLWDRLVNDSPVYLGDLIRVADISSALLDIENNSIDLDENTLVRIARSADGEGFQIELSSGKVSVSSGADAKSVSLEINGQNIKTNPGTVMSASAGNAGVSVQVTAGTAQITKSDNGGAAGSRGVSARSISSGEKIMMDTAGREVFEKTVAVMRPVQNARYLKSANSPIPVNFEWNRINFSPEEKLRLEIAMDRNFRQIFRVINGLDNQARVTLDTGMWYWRLSFGNSVLSDGRITVADGAGLQLISPAMNSLFRYRDSLPLMNFQWSREEDASSYIIEISRSSDFSSLQIRAQVASSNYSDSGLGAGTWYWRVMPVFPGVFSGTSSFSQPAFFRIEQSAPLPSAAESTGPAGAERTALERNATERNSLEEWFADAAPSKREVPKDVPPELVPEEWKAEPKPENKPEAKPASKPEAKPEPKTERRTERKPEPKPEPKPEPKPEPRPEPEPEPRPEPDSALPEIHLLLPEQRERLEGLTAMRQQTVFSWECTGNIVRARFVLSRNPNPLQTDAVVEIQNPGYTIRLDRLEEGVWYWNVEAQTPDGFTISAPAAYQLQVLPVLLLAPPENISPRARQRYGLAELRNLRNIVFEWRPVNGANAYIFTLYQQTETGRRQIAVTDPVARTGYVLDNLSVLENGTFIWQVEALHIGSNGEVEQHGRPAEYSFVLDFPRPEPVQIEDLGILYGN

SEQ ID NO: 60617 - DNA, 543 bp, Unknown
  Obtained from environmental sample
  misc_feature (1)..(543): n is a, c, g, or t
atggcagtaagcccttccaatctttccctttgctcaggaagaagcagatgtatttccggaagcgcgctatcaggttccggtcttggctcaggctcaggttcgggtctgggttcgggcttaggttccggtttgggctcaggtttgggttccggttttctttctgttctcctttccgtttttggttccggtttcgcctcaggttttgaagccggcttagcttcgggtttattttcaggtttgggctcggctttccattcttcgggaacaagctccggcggcacgtctttaggcacttctcttttggacggagccgcgtccgcgaaccattcttcaaggctgttccgttccgttgcgtttctttcaagagcagtccgctcggcgccggcaggccctgtcgattcggcggcggaaggaagcggcgcgctttgttcaatccggaaaaaagcgggctgggaaaaagaagaggtgcctgagaaaacgccagggaaaacgggcattacgcgccaataccatgttcccgctcctaaacctgaatcgctgtaa

SEQ ID NO: 60618 - protein, 180 aa, Unknown
  Obtained from environmental sample
  SIGNAL (1)...(24)
  misc_feature (1)..(180): Xaa is any amino acid
MAVSPSNLSLCSGRSRCISGSALSGSGLGSGSGSGLGSGLGSGLGSGLGSGFLSVLLSVFGSGFASGFEAGLASGLFSGLGSAFHSSGTSSGGTSLGTSLLDGAASANHSSRLFRSVAFLSRAVRSAPAGPVDSAAEGSGALCSIRKKAGWEKEEVPEKTPGKTGITRQYHVPAPKPESL

SEQ ID NO: 60619 - DNA, 594 bp, Unknown
  Obtained from environmental sample
  misc_feature (1)..(594): n is a, c, g, or t
ttggcgatgcacttaaagtcgctcaggtgcgcgcccccgccgaccaccgcgaccgcctcgttaactcgggcgccccccagcggctccagcacaatctggtctaaaacactccacgaacggtcaacgtccatgcgtatcgcgccgggaacgcgaaacaatacgctgccgtatatttcgggcggcgtagagccggtaatcgtgagcgtactcctcgcggacgatatgtttacggcgcggccgaccggcacgctcgttatggtgtattttttctgctcgtttgcaatacgcccgccggaaagcacaacatcgcctcccgcaagcacaatagtggcgccggaatccgattccaccgtttcgaaatcggcgccttccgatatgcggacttcgccgccccgaacattcaaggttatacccccgtcggtagccgagaaaatcccgccggttatctccgcatcatggaaggtcgacaacgccacacccgacgcggtcgtaaaccgaccgcccgatattctgacattaccggtggttctgacgctctcgttcccctcagactcaaacgtcccccccgatatttcaagccgtgccgtgctatga

SEQ ID NO: 60620 - protein, 197 aa, Unknown
  Obtained from environmental sample
  misc_feature (1)..(197): Xaa is any amino acid
MAMHLKSLRCAPPPTTATASLTRAPPSGSSTIWSKTLHERSTSMRIAPGTRNNTLPYISGGVEPVIVSVLLADDMFTARPTGTLVMVYFFCSFAIRPPESTTSPPASTIVAPESDSTVSKSAPSDMRTSPPRTFKVIPPSVAEKIPPVISASWKVDNATPDAVVNRPPDILTLPVVLTLSFPSDSNVPPDISSRAVL

SEQ ID NO: 60621 - DNA, 378 bp, Unknown
  Obtained from environmental sample
  misc_feature (1)..(378): n is a, c, g, or t
atgatcagatcggccgagctctcgcttgcccctgcccttgaaattgaaggagcgctaaagcggaaattattcggcaaaaaaagttttaattccggtctaaaccccgatgcacttttggctatccttcccgaccttgtaaagccgggactcataagagggaatggtccgagcgggaaaaaagaactcggttttctctgcctctttacagacggcgaaggcaactattggacaaaatgttcccgccgctttcatacgagccttaacgaaagcctcgccagcgtagaaacccttattgacgaactggccgatcatgtggacgccgagaaaaagcgccttgtaaaccggtgctaccggagattgtcagattacctggggtag

SEQ ID NO: 60622 - protein, 125 aa, Unknown
  Obtained from environmental sample
  misc_feature (1)..(125): Xaa is any amino acid
MIRSAELSLAPALEIEGALKRKLFGKKSFNSGLNPDALLAILPDLVKPGLIRGNGPSGKKELGFLCLFTDGEGNYWTKCSRRFHTSLNESLASVETLIDELADHVDAEKKRLVNRCYRRLSDYLG

SEQ ID NO: 60623 - DNA, 681 bp, Unknown
  Obtained from environmental sample
  misc_feature (1)..(681): n is a, c, g, or t
atgttttttgccagaggaatggcaaccatcattacgaaatactcacattcggttaaactggaaagttttttagcgctcaaagaaacaaatataaaaattgcggccctggggtataccgccagaagcgggaatttgataccggtgaccatagatataggagtgatcgtcgctttggcggtggtgctggttattgtctttgttctaaaatggacaagattcggacgcaatctgtacgcggtcggcggtaataaccaaagcgcgctgacgcttggtatcaatgtcagacgcacaaagtttttttcctaccttatttgcggatttctcgccggcataggcggtttcgtcttccttctgaaggcagggtcgggttactcgcagcacgccatgttttttgaaatgaaagccatcgcctcgtccattatcggcggcacgctgctgaccggaggcgtcggcaatattatcggttctccgattggcgtattggcgcttatgacgattgacacgattgtccgggcttcgggaataacaaccggaggccgggagtatctgcaggatatcacgaccggcgcaatgctgttcatcgcgcttatactgcaaagcgtggttctctcgcgccgcggcaagggaagtttcaaacagatgatccccaaatggctgagtttcaggcgtaaaaacagctga

SEQ ID NO: 60624 - protein, 226 aa, Unknown
  Obtained from environmental sample
  DOMAIN (2)...(196): Branched-chain amino acid transport system / permease component
  misc_feature (1)..(226): Xaa is any amino acid
MFFARGMATIITKYSHSVKLESFLALKETNIKIAALGYTARSGNLIPVTIDIGVIVALAVVLVIVFVLKWTRFGRNLYAVGGNNQSALTLGINVRRTKFFSYLICGFLAGIGGFVFLLKAGSGYSQHAMFFEMKAIASSIIGGTLLTGGVGNIIGSPIGVLALMTIDTIVRASGITTGGREYLQDITTGAMLFIALILQSVVLSRRGKGSFKQMIPKWLSFRRKNS

SEQ ID NO: 60625 - DNA, 969 bp, Unknown
  Obtained from environmental sample
  misc_feature (1)..(969): n is a, c, g, or t
atggacgtaaaacaagctattatcgaaaccaaaacgtatctggggatcgaatttggttccacgcggataaaagcggtattaattgacacgcattacgagcctatagcgtcgggcattcatgattgggaaaacaacttggaaaacggagtctggacttatcatcttgaagatgtttggacagggctgcaggactgtttctcgaagctggccctggatgtaaaaaaccgctacggcctgacactttcttcggtcggcgctatcggcatttccgccatgatgcacgggtatctggtatttgacaaaaacggcaatcagctcgctcccttccgtacctggcgcaataccattaccgaaaaggcctcggttatactcaccgaaaaattcaagttcaatattccccagcgctggagtatcgcccatttatatcaggcgatcctgaacggggaaacccatgtaaaggatattgattatataaccacccttgccggttacgtacactggaaattaacaggtaaaaaagttctgggcattgacgacgcttcgggtatgtttccgatagacggtgataattacaatttttcgatgctaaaacagtttgacgatcttgtcgccccctgtaattacaactggagaattgaggatattctccccggcgttttgagcgccggtgaagacgccggaacactcacggcggaaggggcgaaactgcttgacccttccggctgtctgtgggaccgcatacccctgtgcccgcccgaaggagacgccggtaccggcatggttgcgactaacagcgtggcccagcgtacaggcaatatcgccgcgggcacttctattttcgccatgattgttatggaaagagaattgtcaaatgtataccccgaaattgatatagttgccactccggcgggaaagctggtggccatggtccattgcaacaactgcacttccgatattgacgcgtggtaa

SEQ ID NO: 60626 - protein, 322 aa, Unknown
  Obtained from environmental sample
  DOMAIN (12)...(250): FGGY family of carbohydrate kinases, N-terminal domain
  misc_feature (1)..(322): Xaa is any amino acid
MDVKQAIIETKTYLGIEFGSTRIKAVLIDTHYEPIASGIHDWENNLENGVWTYHLEDVWTGLQDCFSKLALDVKNRYGLTLSSVGAIGISAMMHGYLVFDKNGNQLAPFRTWRNTITEKASVILTEKFKFNIPQRWSIAHLYQAILNGETHVKDIDYITTLAGYVHWKLTGKKVLGIDDASGMFPIDGDNYNFSMLKQFDDLVAPCNYNWRIEDILPGVLSAGEDAGTLTAEGAKLLDPSGCLWDRIPLCPPEGDAGTGMVATNSVAQRTGNIAAGTSIFAMIVMERELSNVYPEIDIVATPAGKLVAMVHCNNCTSDIDAW

SEQ ID NO: 60627 - DNA, 624 bp, Unknown
  Obtained from environmental sample
  misc_feature (1)..(624): n is a, c, g, or t
gtggtaaaattattcggcgagctgtttgatataagcggaacaaagccggacaaaacagcgatctacaatatgttgtataacaaagccctggaagctgacaatgactgcggcgggcttctntccttcaattacttttcgggtgaaacaattacaggatttgaggaaggacgtccgctttttgcgcgtctgccgaacagcaattttaatttggcaaattttatgcggactcttctattttcgagcatggcgacattaaagtacggcatagatatacttaccaaagaggagaaggcgcgtatagacagcttgttgggacacgggggcttgtttaaaataaaaggcataggacagcgatttatggcagcggtctttaacgctcctgttggcgtaatggaatccgcgggagaaggcggcgcgtggggcattgcccttcttgcggcgtttatgcgcgagggaaaagaaactttggaaaaatttcttgcgaataaagtctttgccggaaagacaggcgcgcggattgaacctgatccgaaagatacggaaagtttcggtaaatacatggaacgttataccgcggggcttaaaattgagcgggccgcggttgaaaatttgaaaagggggtga

SEQ ID NO: 60628 - protein, 207 aa, Unknown
  Obtained from environmental sample
  misc_feature (1)..(207): Xaa is any amino acid
MVKLFGELFDISGTKPDKTAIYNMLYNKALEADNDCGGLLSFNYFSGETITGFEEGRPLFARLPNSNFNLANFMRTLLFSSMATLKYGIDILTKEEKARIDSLLGHGGLFKIKGIGQRFMAAVFNAPVGVMESAGEGGAWGIALLAAFMREGKETLEKFLANKVFAGKTGARIEPDPKDTESFGKYMERYTAGLKIERAAVENLKRG

SEQ ID NO: 60629 - DNA, 393 bp, Unknown
  Obtained from environmental sample
  misc_feature (1)..(393): n is a, c, g, or t
ttggcggaaaaaagagccatgatacaacagggagggggtatcaggtatttacatggaggtacaaatatgtccgtagcaagtgtgggatttaactctgtctcgccaatgctttttccggaacaggaaagaacggtcagacagccggcggatcagccggaaaaaaaagcaaaacctcaaatacacaactctacaacagctgatttggaaaaaatcggtcttgcttttaacaaaaaactgcaatttgtggtagatcacagctctcacgaggtcattatcaaggtaattgataaagaaaccgataaagtgattaaggagcttcctcccgaagaattacagcgtctgcatagtaatctaaaagaggctattggtctgttatttgatgagatggtctag

SEQ ID NO: 60630 - protein, 130 aa, Unknown
  Obtained from environmental sample
  DOMAIN (29)...(129): FlaG protein
  misc_feature (1)..(130): Xaa is any amino acid
MAEKRAMIQQGGGIRYLHGGTNMSVASVGFNSVSPMLFPEQERTVRQPADQPEKKAKPQIHNSTTADLEKIGLAFNKKLQFVVDHSSHEVIIKVIDKETDKVIKELPPEELQRLHSNLKEAIGLLFDEMV

SEQ ID NO: 60631 - DNA, 336 bp, Unknown
  Obtained from environmental sample
  misc_feature (1)..(336): n is a, c, g, or t
atgcgcttgtttgaaaaacgcacagggcgacggaaagatttcatttccgacccgacagcggcaaaccttgctatcggcactgtagattcagcgttaaaaattgtttccaaacaacgtgctgaccttggcgcttatcaaaaccgttttgaaatcgcggcgcagggcgtagcggtagcggcggagaatttgcaggctgcggaatcccgcattagggataccaacatggcgaataagatggttgactatacaaaagattccatcttgtcccaggctggaaccgcaatgctggcgcaagctaatcttcgcacgcaatcggttttatcactgctttcataa

SEQ ID NO: 60632 - protein, 111 aa, Unknown
  Obtained from environmental sample
  DOMAIN (18)...(89): Bacterial flagellin C-terminus
  misc_feature (1)..(111): Xaa is any amino acid
MRLFEKRTGRRKDFISDPTAANLAIGTVDSALKIVSKQRADLGAYQNRFEIAAQGVAVAAENLQAAESRIRDTNMANKMVDYTKDSILSQAGTAMLAQANLRTQSVLSLLS

SEQ ID NO: 60633 - DNA, 1671 bp, Unknown
  Obtained from environmental sample
  misc_feature (1)..(1671): n is a, c, g, or t
gtgcaggcaaacggggtgaactacctaatcccggtaggggctgttatatccagcgaaaactccctgcgggaccgggcggtttcggttcagtgggctctggcggaactgaacgaggcgagtaacgaactcaacgtggtggtgctggacgcctgccgggacaaccccttcgcgtgggcaagatccggcggtaatcggggccttacggtgatttcccagcaacccgcggacagcatcatcgtgtacgcgacaagcgcgggctctattgcccaagacgggacaggcaggaacggcctttttaccactcatttactgaacaacctcaagacaccgggccttgaagtaaaggaaatattcaaccgcaccggcgcggacgtatctcaggccagtaaccggcagcagataccggcggtgtattcgcaattcttcggaaccgcgtttttcgatccccggcctgcccccgcgcctttgccccagacggtttctgtaaccggtgtgtccctcaacaaaacaagtatcggccttgtcgcgggcgcctcggagaccctcaccgcaaccataacccccgccaacgcgacaaacaggaacgtaacctggacgagcaacaaccccgacgtagccagggtaacgggaggcacgattaccgctgtcgcaacaggtacggcaaccatcaccgtttcgtccgcagacggcaacagaaccgccgcctgtaccgtttccgtaagcgccgtgcccgcatccacggcagtccaacccgcgcccacggtggtttctgtatccggcgtgtccctcaacaaaacaagtaccacccttgcagcgggcagctcggaaaccctcaccgcgacgataagccccgccaacgcggcaaacaggaacgtaacctggacgagcagtaacaccaacgtggccagggtaacgtccggcacggttaccgctgttgcggccgggacggcaactattaccgtttcgacagtagacggcaacagaaccgccgcctgtaccgttactgtaagcgccaggcccacatccacagcagtacagcccgcgcccgttccaacgtccctccctttcacctataccgaaaccgcaaccgagataaccattaccgggtacacaggaaccggtggcaatgtaacgataccggagagtataaacggaaaaccagttacctccatcggggatagagcgttttccaacaaacgactaagcagcgttaccatccccttcagcgtgacctccattaggggctctgcgttttctaacaaccaactgaccagcgttaccatttcctctagcgtgacctccattgggggctctgcgttttctaacaaccaactgaccagcattaccattcccaacagcgttaagaccatcggcgaagaggcgtttgccggaaaccaactgaccagcgttaccattcctgacagcgttacttatatcagtgagctggcatttgcggacaaccaactgaccagcgttaccattggcaacagcgttacttctatcggtgaaagtgcgttcagagacaacgaccaactaaacaggattaacatcggcagtaatgtagaccttgaagaaaatgcgtttgattactattttgatgcctataacaaggggggcaaacgggcgggaacatacgtcttgaaaccacggatcggctggatcagggaatga

SEQ ID NO: 60634 - protein, 556 aa, Unknown
  Obtained from environmental sample
  DOMAIN (257)...(334): Bacterial Ig-like domain (group 2)
  misc_feature (1)..(556): Xaa is any amino acid
MQANGVNYLIPVGAVISSENSLRDRAVSVQWALAELNEASNELNVVVLDACRDNPFAWARSGGNRGLTVISQQPADSIIVYATSAGSIAQDGTGRNGLFTTHLLNNLKTPGLEVKEIFNRTGADVSQASNRQQIPAVYSQFFGTAFFDPRPAPAPLPQTVSVTGVSLNKTSIGLVAGASETLTATITPANATNRNVTWTSNNPDVARVTGGTITAVATGTATITVSSADGNRTAACTVSVSAVPASTAVQPAPTVVSVSGVSLNKTSTTLAAGSSETLTATISPANAANRNVTWTSSNTNVARVTSGTVTAVAAGTATITVSTVDGNRTAACTVTVSARPTSTAVQPAPVPTSLPFTYTETATEITITGYTGTGGNVTIPESINGKPVTSIGDRAFSNKRLSSVTIPFSVTSIRGSAFSNNQLTSVTISSSVTSIGGSAFSNNQLTSITIPNSVKTIGEEAFAGNQLTSVTIPDSVTYISELAFADNQLTSVTIGNSVTSIGESAFRDNDQLNRINIGSNVDLEENAFDYYFDAYNKGGKRAGTYVLKPRIGWIRE

SEQ ID NO: 60635 - DNA, 549 bp, Unknown
  Obtained from environmental sample
  misc_feature (1)..(549): n is a, c, g, or t
atgaggcataaaccatttgccacgccgcttcgcgccgcctcccccttgcgggcgcggctattgggcagggtaccatggttaagaaatagcagaggcaggaggcatacagtgttttgttcaatgtgtggaagtgaattggaagacggcgcgaagttttgccggaattgcaaccgggcggttcccgtggcggcggttcgggagggtgacgctaaggcttataacaaacggggaaagaagtatgccgaaatgggggactacgacctggcaatcgcggatttcaaccaggccatacggattgatcccgctaacgctgaggtttataacaaccggggctctgcgtatggcaataagggggattatgaccgggctctcgcggatttcaaccaggccatacagcttgatcccactgacgctatggcttatagcaaccggggcattgcgtattgcgatatggggggcatagacctggcaatcgcggatttcaaccaggccatacggattgatcccactggcgctatggcttatagcaacgcggggctttangtatag

SEQ ID NO: 60636 - protein, 182 aa, Unknown
  Obtained from environmental sample
  DOMAIN (138)...(171): Tetratricopeptide repeat
  misc_feature (1)..(182): Xaa is any amino acid
MRHKPFATPLRAASPLRARLLGRVPWLRNSRGRRHTVFCSMCGSELEDGAKFCRNCNRAVPVAAVREGDAKAYNKRGKKYAEMGDYDLAIADFNQAIRIDPANAEVYNNRGSAYGNKGDYDRALADFNQAIQLDPTDAMAYSNRGIAYCDMGGIDLAIADFNQAIRIDPTGAMAYSNAGLXV

SEQ ID NO: 60637 - DNA, 1107 bp, Unknown
  Obtained from environmental sample
  misc_feature (1)..(1107): n is a, c, g, or t
atgagaattgaaatttactcgccgactatcaggcgaaaggaaatggacgctgtccttaccgcaatggtggaggaccggattggtccgggagaacgttcccgtcttcttttacaaacagccaaagagcatatccgtttcgattatgccctcgcgttgcgaagcccggttacagccctccgtttggcgcttaaagcattggagttgaaggatggagacggggtgctgatttccgcgctttccccgcgttattacgcccagacgattgctgaccttcgcctcgtgcctttgtactgcgacgtgtcgtattctttcccctgtataagccgtgagagcgttgaaaaagcgataatggtaaaaccgtccggggtagaaccgcgttgtataatccttcatcatactctgggcttcgtgcccgacgcggcgtctatcgccgatcttggtattcccattattgaggatatttcccagagttacagccctccgcaggaacaggccgaaggagcaaatgaaaagctgtcgggggaggccgccgcgccgttaggcgcgccgcccccaagcgcagcctcggtacagacggtctgcggggtatttgcaatattgggacttgaggaaagggatatgcttactgccggcggaggggcgattctgtttgccatgaacaggagagacggacagatgctgcgcgctttttcaaatataccacccgaatactgtctgcccgacattaacgccgccatggcaactgtgcagttcagggaggcgccccgcaatatggcaaggcgtcaggaaatcgccaaggcctatacccaggcaagccttcgtaccaaacacaagcgtttcgttccgcttgagggtgaatactgcaattacgtttttcccctggtgctggagaccggcatgaaggatgtcgcggcttatgcccgtaaaaaagaaattatcgtggaaagcgcctttgagcaaagtttggccggagccggggttattgattcggttttatgccctgtgagctattccctgtcgctgagaaccgtattgtttcccctgtatccccggctgcgttcgcaggaagctgagcgcgtgtcaaggctgatcatgacgcttccttaa

SEQ ID NO: 60638 - protein, 368 aa, Unknown
  Obtained from environmental sample
  DOMAIN (8)...(365): DegT/DnrJ/EryC1/StrS aminotransferase family
  misc_feature (1)..(368): Xaa is any amino acid
MRIEIYSPTIRRKEMDAVLTAMVEDRIGPGERSRLLLQTAKEHIRFDYALALRSPVTALRLALKALELKDGDGVLISALSPRYYAQTIADLRLVPLYCDVSYSFPCISRESVEKAIMVKPSGVEPRCIILHHTLGFVPDAASIADLGIPIIEDISQSYSPPQEQAEGANEKLSGEAAAPLGAPPPSAASVQTVCGVFAILGLEERDMLTAGGGAILFAMNRRDGQMLRAFSNIPPEYCLPDINAAMATVQFREAPRNMARRQEIAKAYTQASLRTKHKRFVPLEGEYCNYVFPLVLETGMKDVAAYARKKEIIVESAFEQSLAGAGVIDSVLCPVSYSLSLRTVLFPLYPRLRSQEAERVSRLIMTLP

SEQ ID NO: 60639 - DNA, 918 bp, Unknown
  Obtained from environmental sample
  misc_feature (1)..(918): n is a, c, g, or t
atggccgggccgcaggttaaatcggcaattttaattataaacctccacaaagaaaacgccgcgtccgttgccgaagaaatccggctggaactggaaagcgcgggagtgcggacaacccttttcgcttttgaagggcgtcctgagtccccccctgaaggcagatgggatgtcgcttttagcctgggtggcgacgggactgttctgtatacggcgcgaatcctggcccattcgggcacgccaatcctccccgtgcatcttggaacgctgggatttatagccggcgtggaaaggcatgaatggcttttggtttacaggcgctggctttcaggtgaaataaagccttcccggcgctgtatgctggaattttccattgaaaggggcggtaaatatgccgttaataatagtatatgcctgaatgacgtggtgatttcatctttggggatagcaaaactgatacgtttacaggcaagaacagaggttgcccccggcgaattcgcggaaattggctgctatcgctcggacgggcttataatcgctactcccaccggttccacggcgtattccatggcggccggcgggccaatattggatccggagatggaagcgcaaatcatcagcccaatctgcccctttactctgtcgaatcgtccgctggtgcttccgtcacggcagacattgcagataacggtctgcatggatcagcggagcggtgtgttgttgacttgcgacgggcaggaaaccttcgatctggaaccgggcgatttgatcaccataagacattcgccccattacgcgcttctgattaccgcggggtattcatcgtattataaagcgctttcggaaaaattggcctggtcctccgaaggagtcggcgcctccgaaggagtcggcgcctccgaaggagtcggtcatgcttga

SEQ ID NO: 60640 - protein, 305 aa, Unknown
  Obtained from environmental sample
  DOMAIN (8)...(270): ATP-NAD kinase
  misc_feature (1)..(305): Xaa is any amino acid
MAGPQVKSAILIINLHKENAASVAEEIRLELESAGVRTTLFAFEGRPESPPEGRWDVAFSLGGDGTVLYTARILAHSGTPILPVHLGTLGFIAGVERHEWLLVYRRWLSGEIKPSRRCMLEFSIERGGKYAVNNSICLNDVVISSLGIAKLIRLQARTEVAPGEFAEIGCYRSDGLIIATPTGSTAYSMAAGGPILDPEMEAQIISPICPFTLSNRPLVLPSRQTLQITVCMDQRSGVLLTCDGQETFDLEPGDLITIRHSPHYALLITAGYSSYYKALSEKLAWSSEGVGASEGVGASEGVGHA

SEQ ID NO: 60641 - DNA, 324 bp, Unknown
  Obtained from environmental sample
  misc_feature (1)..(324): n is a, c, g, or t
atgcttgaggaacttacaataagaaattttgccctggttgattccatatccctctcctttcggcccggttttaacgtgcttacgggcgaaaccggcgcgggtaaatcgattattgtcggttctcttggttttcttatgggcgtaaaaaccgagactgacgttatacgatcaggctgcgaggaggcgagcgtatcagccattgtgtcaataggcaagggaaacaacgacgcttttgaatggcttagaagccgtgaaatcaacagtgaagaggagactgtcattgtccgccggaatattaaaacgtcgggcaggggatcaatttaa

SEQ ID NO: 60642 - protein, 107 aa, Unknown
  Obtained from environmental sample
  misc_feature (1)..(107): Xaa is any amino acid
MLEELTIRNFALVDSISLSFRPGFNVLTGETGAGKSIIVGSLGFLMGVKTETDVIRSGCEEASVSAIVSIGKGNNDAFEWLRSREINSEEETVIVRRNIKTSGRGSI

SEQ ID NO: 60643 - DNA, 1440 bp, Unknown
  Obtained from environmental sample
  misc_feature (1)..(1440): n is a, c, g, or t
atggaaaactcggcgctttttacggatttttattcacttacaatggctcaaggttactggaagcgcgggcagaacgaacgcgccgtgttcgagatgttttttcgcacacagccgtttaacggcggttacgcgatattcgcagggcttggaaccctgcttgaaaaactaacaaacttttcttactcggcggatgatattgaataccttaaaagcttgtcggtttttgacggcgagtttttggattttctaaaaacttttcgttttaacggctctttatgggcgatggatgagggaaccgtagtctttccgcaggagccgcttatcagggtggaaggcagtcttatcgagtgccagataatcgagggcatgctgcttaacacagtaaattttcaaagtttaatagcgacaaaaacctgccgtatatggcttgcgagcggaaaaggcaaattgatggagttcggtatgcgccgcgcccagggatttaacggcgcgatttccgcgtcaagagcggcgtatattggcggcgcaaacggaaccagcaatacgctcgccggtaaaatcttcggcatacccgtaatggggacaatggcgcactcgtgggttatgtcgtataacagcgaagaagaggcttttgacgcttatgccgccatgtatccggacaggtctatctttttaatagacacttacgacacgttaagaagcggaatacagagcgcgattaagtcgggaaaaaaacttgccgaaaaaggcaagagtttcggagtgcgccttgattcgggagacattcagtatctttctacagaagtaagaaagcgtcttgacgaggcggggcttcaaaaagcgtttattacggtatccaacgatttggacgagaatattatcgaaaatcttgtaaaagacggcgccccggtagacagttggggcgttggaaccagaatggtaacaggcggaaatgtcgcggcttttaccggcgtttacaaattaaccgccatgttggaaggaaacaccgctgttccagtaatgaaattctccgacaatccagaaaaaaccacaaacccaggcgttaagcaggtttggcgtatttgggacaataaaggtcaggcggttgcggacttgctcggtatttatgacgatgactatgcgccgaaagaaggtcagaagagttgtttctggcacccgtccgccgactacaggcacttttaccacatcatagaaaacgccgaagcaatgttaaaaaaccgcatacaaaacggagagcttaccgccgacctgccgaagttagacgaaatcaaagcctacacaaacgcaaacttaagccgcttcgacgcgacctacaagagactgttaaatcctcatatttacaaagtttcgattacggaaaatctgcgtaagttaaaacttgaattgatcgaaaaaaatctaacaagaagacagaattag

SEQ ID NO: 60644 - protein, 479 aa, Unknown
  Obtained from environmental sample
  DOMAIN (148)...(366): Nicotinate phosphoribosyltransferase (NAPRTase) family
  misc_feature (1)..(479): Xaa is any amino acid
MENSALFTDFYSLTMAQGYWKRGQNERAVFEMFFRTQPFNGGYAIFAGLGTLLEKLTNFSYSADDIEYLKSLSVFDGEFLDFLKTFRFNGSLWAMDEGTVVFPQEPLIRVEGSLIECQIIEGMLLNTVNFQSLIATKTCRIWLASGKGKLMEFGMRRAQGFNGAISASRAAYIGGANGTSNTLAGKIFGIPVMGTMAHSWVMSYNSEEEAFDAYAAMYPDRSIFLIDTYDTLRSGIQSAIKSGKKLAEKGKSFGVRLDSGDIQYLSTEVRKRLDEAGLQKAFITVSNDLDENIIENLVKDGAPVDSWGVGTRMVTGGNVAAFTGVYKLTAMLEGNTAVPVMKFSDNPEKTTNPGVKQVWRIWDNKGQAVADLLGIYDDDYAPKEGQKSCFWHPSADYRHFYHIIENAEAMLKNRIQNGELTADLPKLDEIKAYTNANLSRFDATYKRLLNPHIYKVSITENLRKLKLELIEKNLTRRQN

SEQ ID NO: 60645 - DNA, 774 bp, Unknown
  Obtained from environmental sample
  misc_feature (1)..(774): n is a, c, g, or t
gtgggaagcatagaaagcctggactggcatatcgccgccattcttcccattaccgcctcggacaccctgaacagcggagtaaccatattcttcatggtaatgctggcagtcatagctgtcattctcattatttcttttatatttatcagcagccttctcaaacccatgcgttacatgatacaaacgctggatcaaatagctaaaaaccgggacctcacccggcggcttgaattcaggcaccatgacgaaattggaacagtgggtgatttttttaaccggacttttgaagaattcagaattctcgtagggacaataaaatataaaatcaacgggcttaaccataccagttttgagctttccgacaatatgggcaaaacctcgacagccgtagagaagatttcgtctaaccttgacagcatggaaaaccttgtagtcaaacaggaaaacggagcgttagtagcaggcgaggcggtaggggctattaaaacaaatattgacagccttaacaaaatgatagagcaacaggctgaaagcgtagataagtcttcttccgcaatagaggaaatgacagccaacattcattcggtaacacagacgcttgcggaaaacagcaagaatgtcgatgttttagtcgaagcgtcggagaacggcaagacaggactccagaccgtcgcgcaggagatacgggaaatagcccatgattccgaaggacttttggaaattaactcggtaatggaaaacatatcgccagccagaccaacctgctttcgatga

SEQ ID NO: 60646 - protein, 257 aa, Unknown
  Obtained from environmental sample
  DOMAIN (30)...(100): HAMP domain
  misc_feature (1)..(257): Xaa is any amino acid
MGSIESLDWHIAAILPITASDTLNSGVTIFFMVMLAVIAVILIISFIFISSLLKPMRYMIQTLDQIAKNRDLTRRLEFRHHDEIGTVGDFFNRTFEEFRILVGTIKYKINGLNHTSFELSDNMGKTSTAVEKISSNLDSMENLVVKQENGALVAGEAVGAIKTNIDSLNKMIEQQAESVDKSSSAIEEMTANIHSVTQTLAENSKNVDVLVEASENGKTGLQTVAQEIREIAHDSEGLLEINSVMENISPARPTCFR

SEQ ID NO: 60647 - DNA, 339 bp, Unknown
  Obtained from environmental sample
  misc_feature (1)..(339): n is a, c, g, or t
atgaacgccgcgattgaagcggcacacgcaggagaagcgggcaagggctttggcgtagttgccgatgaaatccgcaaactggcggaaagctccagcgagcaatccaaaacaattggtacggtactgaaaaaaataccggaatcaatcaagaaaattaccgactctaccgcgaatgtgctaaacaagttcgaagcgatacactcggcggtaacaacggtgtccgatcaggaagaaaatatccgcaacgctatggaggaacagggcgaaggaagcaaacaagttctgcatatcgcacgcagtttaagcgaacttacccaacaggtaaagagcggttcctaa

SEQ ID NO: 60648 - protein, 112 aa, Unknown
  Obtained from environmental sample
  misc_feature (1)..(112): Xaa is any amino acid
MNAAIEAAHAGEAGKGFGVVADEIRKLAESSSEQSKTIGTVLKKIPESIKKITDSTANVLNKFEAIHSAVTTVSDQEENIRNAMEEQGEGSKQVLHIARSLSELTQQVKSGS

SEQ ID NO: 60649 - DNA, 1842 bp, Unknown
  Obtained from environmental sample
  misc_feature (1)..(1842): n is a, c, g, or t
atggcagatgaaaactggtattccgcgatagaaactttcatggactgcgtaaggctcaacccagcccatgccgaaggaacggcggcccttgccgagtgctactacgaactttccgaatttgacgaagcgctcaactgggtgcggaaggcaaaacttctggcgcgcggcaacttatcaatagcgaatcttgaagtttttactctaatcgcgcttggccgtctggacgaagcgtccgcgcttgttagtgacatacttgtaaaagagccgtataacagggaggcgctatttgccgccggcgaacttgatatcgccagaaacaggccgtccgaggccttgctccgttacagggaggcggtacgccgttatcccgacgaccgcaggcttttaatttccctcgctcttgtatcgctttcgcttggagacggggatactgctctccgttatataaacaacgccctcgagcagcatcccgacgattaccgcgtatttttctacgcggcctacatttattcaaaaaacaacaaacttgcggacgccatcacctacgcggcgcgcgccctgtactacaaacccgaccacgagccgtccaattcgctgatggctgttctgcgctaccgcagcaagcagtacgaagaggcgatccgtctttcggatatgtccatcgcgaagaacaggcagaacacgggagcgtggtacttaaaagggctttcgcttatacgcttgaaccgccagcaggaagcgattacggttctttctacggcgctcagcgtaaacgaggaagaggaatttatccgcgccattcttgaagagacgcttatctcatcgactccacttgaagattcccgccgcgcaagatgggcttcctggcattttgccggcgcgaaaaattaccgcacgcgcaatttaaccgatcaggccttatttgaataccgccgcgggcttaggttaaatcccttcgcgcaggacaggcgcgactacgccgaagcgcttagggtcacaggctacccgtctcgttatcttgaggaacttctctttttgaaggaacagggaatgacggacacgccgttaaacgacgcgatagaagcctacggttccctgctttccaacgcgcttttcaagcagtggaacgtgaatcccgttgaacttgctgaacgccactggaaagtcgccgtcttttctctggaaggccagtccagttttgttcacgccgacgcgggagaagtcgcggcgtccgttatcaaggatcttttaaatcacgaccgcaacataacgccggcaaacttacaattacgccagccttctttttcgcaagccttcaggcaggcaagggaaagcggcgctgattatttcatgcttgtatccgtaaccgagaacgaaagggacatttcgataaagggagaacttttcacgtccagaaccggctcccccgccgccgcattttacacctaccgcacaggcacgggaagattgcgcgacgcgtcgaaagggatagccgagcaattatccgccgcgcttcctttcagggggcaggctgcttatccgcaagcaggggcaggcgcttatcaacaagggcaaagcggacggtgtaaaccaaacgcagtntacgacgttgtaaaaagggacgccctcaaatcgccaacgagggcatcgccctgctctacagcgccgacgatcttgttgggaagctcactattaccaatgttgatgaggaaatcgcgtcgggcactttggcaagggtcgggtttttcgaccgtattgagacgggggacgaggttgtgcttcaggcggagaagatggctaagtctactgagccggctaatcctgaacttcgcgcgcttttga

SEQ ID NO: 60650 - protein, 613 aa, Unknown
  Obtained from environmental sample
  misc_feature (1)..(613): Xaa is any amino acid
MADENWYSAIETFMDCVRLNPAHAEGTAALAECYYELSEFDEALNWVRKAKLLARGNLSIANLEVFTLIALGRLDEASALVSDILVKEPYNREALFAAGELDIARNRPSEALLRYREAVRRYPDDRRLLISLALVSLSLGDGDTALRYINNALEQHPDDYRVFFYAAYIYSKNNKLADAITYAARALYYKPDHEPSNSLMAVLRYRSKQYEEAIRLSDMSIAKNRQNTGAWYLKGLSLIRLNRQQEAITVLSTALSVNEEEEFIRAILEETLISSTPLEDSRRARWASWHFAGAKNYRTRNLTDQALFEYRRGLRLNPFAQDRRDYAEALRVTGYPSRYLEELLFLKEQGMTDTPLNDAIEAYGSLLSNALFKQWNVNPVELAERHWKVAVFSLEGQSSFVHADAGEVAASVIKDLLNHDRNITPANLQLRQPSFSQAFRQARESGADYFMLVSVTENERDISIKGELFTSRTGSPAAAFYTYRTGTGRLRDASKGIAEQLSAALPFRGQAAYPQAGAGAYQQGQSGRCKPNAVYDVVKRDALKSPTRASPCSTAPTILLGSSLLPMLMRKSRRALWQGSGFSTVLRRGTRLCFRRRRWLSLLSRLILNFARF

SEQ ID NO: 60651 - DNA, 978 bp, Unknown
  Obtained from environmental sample
  misc_feature (1)..(978): n is a, c, g, or t
atgttcacctccaacgacactccggcggccgagttcaaactcgcaaaggatattaaggcggtgatcaatttggacgatatcagccacattgcctttttggaggagcacgcggggttgccggaactcgtctgcatacgctacaaccccggcacggcgcgaaccgggaactcaatcatcggcaatccggtggaggcgaagtacggtttcacgagggagcaggtgtttgagggatacaagatactcagggacaaaggcgtgaagcgcttcgggcttcacacgatggttgcgtccaacgaactgcactataaatattttgtcgataccgccttgatgctgttcgagcttgccgcggaggtatttaaagagcttggaataaagattgagttcgtaaatctgggcggcggtatcgggataccgtaccgtcccgaccagaaacccgtagatttggaagcggtctcggcggagatgaaggcggcttacgatagaatcgtcgtccccgccggcttgcatccgttaaagatatgtctagaaagcggaaggatgatgaccggcccgtatggatttttggtatcaagggtcttgcacgtcaaaacgacatacaagaattacgtaggattagacgcttgcatggcgaacctgatgaggccggccctttacggcgcgtatcaccatatcaccgttataggaaaagaaaacgagcctgcgaatcatacatacgacgtgaccggatcgttatgcgaaaataacgataagtttgccattgacagaagattacccaaaatagtcccgggcgacctggtggtaatacacgacgccggagcgcacggacacgcaatgggtttcaattacaacggaaaattgcgcagcgcggaattgcttaggcgtgaaaacggggaggttatagagatcagacgggcggaaacattagacgatcttttcgccacgttagattttgaaaaattaaaatcgtttgagtga

SEQ ID NO: 60652 - protein, 325 aa, Unknown
  Obtained from environmental sample
  DOMAIN (1)...(185): Pyridoxal-dependent decarboxylase, pyridoxal binding domain
  misc_feature (1)..(325): Xaa is any amino acid
MFTSNDTPAAEFKLAKDIKAVINLDDISHIAFLEEHAGLPELVCIRYNPGTARTGNSIIGNPVEAKYGFTREQVFEGYKILRDKGVKRFGLHTMVASNELHYKYFVDTALMLFELAAEVFKELGIKIEFVNLGGGIGIPYRPDQKPVDLEAVSAEMKAAYDRIVVPAGLHPLKICLESGRMMTGPYGFLVSRVLHVKTTYKNYVGLDACMANLMRPALYGAYHHITVIGKENEPANHTYDVTGSLCENNDKFAIDRRLPKIVPGDLVVIHDAGAHGHAMGFNYNGKLRSAELLRRENGEVIEIRRAETLDDLFATLDFEKLKSFE

SEQ ID NO: 60653 - DNA, 810 bp, Unknown
  Obtained from environmental sample
  misc_feature (1)..(810): n is a, c, g, or t
atgaaactgggcgcgttctctatcctgtttaatgatctatcacttgatgatgtacttgatctgtacataaaactgggactgactgccatagaaatcggttcggcagcatactctgcttccagccatatcaacatcaatgagttatatggccattctgataaaatcaagagctttaagaaaaagataaccgacaggggtattgttataagcgctttgggtgctgcaggaaacccaattcaccctaatcaggaaatagccaaagcacaccatgaagcttttgagaaaagcgttattatcgcatcggaaatgggagtcgatgtaattaatctgctttccggtgcacctggcggtggtccaggcgataaagtaccaaattggatcgtctcaccctggcctgaggatttttcaaaagcctacctatatcaatggaatgaagtgctaatcccttattggagcaaagctagtgaatttgccaaaaaatatggagtaaaattggcaattgaagcccatccaaatttttgtgtatataatgtggaaagtatgctgaaattgcgaaacgccgttggcgaaaatctcggctgtaactttgatcccagccactatatctggcagggtgttgacccctgcgttgctataagagaaattggtaaagcaatattccatgtacatgcgaaagatgtttttattaacgatcgcattgtcaagaaaaacggactgtttgatccaaaaccgtattccgagtttaagacagagcgtggaacttcagaacctgcggttatggcagcaacgagaaaatttggcgtgatatga

SEQ ID NO: 60654 - protein, 269 aa, Unknown
  Obtained from environmental sample
  DOMAIN (19)...(234): Xylose isomerase-like TIM barrel
  misc_feature (1)..(269): Xaa is any amino acid
MKLGAFSILFNDLSLDDVLDLYIKLGLTAIEIGSAAYSASSHININELYGHSDKIKSFKKKITDRGIVISALGAAGNPIHPNQEIAKAHHEAFEKSVIIASEMGVDVINLLSGAPGGGPGDKVPNWIVSPWPEDFSKAYLYQWNEVLIPYWSKASEFAKKYGVKLAIEAHPNFCVYNVESMLKLRNAVGENLGCNFDPSHYIWQGVDPCVAIREIGKAIFHVHAKDVFINDRIVKKNGLFDPKPYSEFKTERGTSEPAVMAATRKFGVI

SEQ ID NO: 60655 - DNA, 687 bp, Unknown
  Obtained from environmental sample
  misc_feature (1)..(687): n is a, c, g, or t
ttgtacaataaacccaaacaatctaatgaggaatttatgaccgaccaagaattgaaagacttagttgccagctttgccaaagataggaaggaagctgccgaagaagccgccgctaggcggaaagaagccgccgaagaagccgccgctaggcggaaagaagccgccgaagaagccgccgctaggcggaaagaagccgccgctagaagtaaagaaattttcgctatgcaggcggaaactgctagaatgataaaagaactatctaggcgaatgggtggtgtagatgagaatatcggttctcacgcggagcagtattttcaaaatgtattgatgggaaaactggttttcgccggacagaaatataacaaaatgatacctaacttggaatgctgcaaaaatggtgtttcgctgatagaatttgacatcgttttggtgaatggcaaatccatagctataatagagacaaagcataggatacatcctaagttcgtcaagcaattagtggaagagagattgcctaaattcagggagctttggccagaatactctaaacacaaaatctacctcggtatagcaggtttttcatttagtcaaaaagttttggaagaagccagaaaacatggaataggcataattaagcaggttggcgatggcgtggaagtagaaactaataatttgaaggtttattaa

SEQ ID NO: 60656 - protein, 228 aa, Unknown
  Obtained from environmental sample
  misc_feature (1)..(228): Xaa is any amino acid
MYNKPKQSNEEFMTDQELKDLVASFAKDRKEAAEEAAARRKEAAEEAAARRKEAAEEAAARRKEAAARSKEIFAMQAETARMIKELSRRMGGVDENIGSHAEQYFQNVLMGKLVFAGQKYNKMIPNLECCKNGVSLIEFDIVLVNGKSIAIIETKHRIHPKFVKQLVEERLPKFRELWPEYSKHKIYLGIAGFSFSQKVLEEARKHGIGIIKQVGDGVEVETNNLKVY

SEQ ID NO: 60657 - DNA, 714 bp, Unknown
  Obtained from environmental sample
  misc_feature (1)..(714): n is a, c, g, or t
atgatactcttcgatctgcacgtccacacgctcttcagccactgcggcatacacaccgcgctggagatactcgctcgcgccgatgaaatgggcatgaggggtatcgcgataaccgaccacggccccgccctccccggcggacgccttaacaatccgttttttgagcgcttcaagtccccctatccgaacgtcgagctgctgaagggcatggagtgcaacgtggtggacgaccaaggcaagatcgacctgccgccgcagttcaaaaagttcatggacgtggtcctgctgggcctccatcccaatacccccaccggccaaagcaaggagacctacaccgcgatgctgatcgccgcgatagagaaaaacccgtgcgtggacataataacccacccgaacgacccgaactatccggttgactacaaacgcctagcccaagccgccaaagccgccggcgtagcattagagttgaataattcaaaaatcctatacgccagggccgagaaaaaaagcgcggcggaattggtgatggcttgcaagcatgaagggtgcctgatggcggtaaacagcgatactcacgcgatacatgaattggggctggacgactccgtgaagccgattttgcattcgttggaattccccgttgatttggtcgtcaataggtatgaaaagaccactatggaattcatcaattccaggcgggagaataagaagtaa

SEQ ID NO: 60658 - protein, 237 aa, Unknown
  Obtained from environmental sample
  DOMAIN (4)...(195): PHP domain
  misc_feature (1)..(237): Xaa is any amino acid
MILFDLHVHTLFSHCGIHTALEILARADEMGMRGIAITDHGPALPGGRLNNPFFERFKSPYPNVELLKGMECNVVDDQGKIDLPPQFKKFMDVVLLGLHPNTPTGQSKETYTAMLIAAIEKNPCVDIITHPNDPNYPVDYKRLAQAAKAAGVALELNNSKILYARAEKKSAAELVMACKHEGCLMAVNSDTHAIHELGLDDSVKPILHSLEFPVDLVVNRYEKTTMEFINSRRENKK

SEQ ID NO: 60659 - DNA, 414 bp, Unknown
  Obtained from environmental sample
  misc_feature (1)..(414): n is a, c, g, or t
ttgaaacgatacgtattagacgcatgtgcgctattagccatattgggtggggaaaatggagccgaaaacataagaaatctacttaggaaagccgttaaccgccaagcatttttggtgatgcataaaataaattttcttgaagtgtattacagaatttatagaaactacggaaaaataacggcggataatttacttagaaaaatggaacaaaagccaatactaataaaagcggcaatatctgatgatgtatttagagaggccggaaggttaaaatctaaatataaattatcattggcggattcaatagctatttctgaaagcataataagcaaaggttcattggttacagcggatcaccgtgaaattgaaccggtagaaatggccgaaaaaatagatgttacatggtttagatga

SEQ ID NO: 60660 - protein, 137 aa, Unknown
  Obtained from environmental sample
  SIGNAL (1)...(20)
  DOMAIN (4)...(133): PIN domain
  misc_feature (1)..(137): Xaa is any amino acid
MKRYVLDACALLAILGGENGAENIRNLLRKAVNRQAFLVMHKINFLEVYYRIYRNYGKITADNLLRKMEQKPILIKAAISDDVFREAGRLKSKYKLSLADSIAISESIISKGSLVTADHREIEPVEMAEKIDVTWFR

SEQ ID NO: 60661 - DNA, 930 bp, Unknown
  Obtained from environmental sample
  misc_feature (1)..(930): n is a, c, g, or t
ttggctcgcgaacctggaacgcggcttgccggaagaggaagcgtagaagccgccaatgcctcccgtcttgcgagcgaagcgtggaacatgattacaactctcgctccaaccgcgaaagaaatgcgtctttatgaattgtataatttaaaagtttccggctatcaggcaatggaagccggcgaatggatactcgcgttctacatttttcaggaattgttgacatatactcccgatgatccggacacaaaaaatttccttgccgtcagcgagaaaaaatccaaggagaccgccttctttattgacgagatggaactgtcggtaggggacattttacacggcgcgatattttctcttcccagcggggacggaagggcggtgcttcgttttaccaatcttacaacatcggaagatgtcgcctatggtcttgggtttgaatacatggaatttgacgcaaatatgattccaagagcaaatgtaagatcgcgttatgcaaaacttacgccttttacattaaacggaaaaccgcaagtgcttattttaactcatgcgcttgatcgcctgaataaagataattcttttaagagcgaatggcttcttggcagttctgtaacaagcggaatctttttagatacaagttatgaagatttggttttaattaccgatgtccgaagagggcttcacaatctgcggattaatgagctttttgccgcctcaaaaaaacttgaggaagaggggtatattaatcagattttccaggcggaaattttaaaccggctcggctccgttatgtattttctgccaatgtcaatttttgtaattgttatcgcgtggcgataccgcgcaaaagaaaaaccgcgttatctttttgtccttcttcttcctgttttacctattgtttttaacggactcactttcctataccgctcgtaa

SEQ ID NO: 60662 - protein, 309 aa, Unknown
  Obtained from environmental sample
  misc_feature (1)..(309): Xaa is any amino acid
MAREPGTRLAGRGSVEAANASRLASEAWNMITTLAPTAKEMRLYELYNLKVSGYQAMEAGEWILAFYIFQELLTYTPDDPDTKNFLAVSEKKSKETAFFIDEMELSVGDILHGAIFSLPSGDGRAVLRFTNLTTSEDVAYGLGFEYMEFDANMIPRANVRSRYAKLTPFTLNGKPQVLILTHALDRLNKDNSFKSEWLLGSSVTSGIFLDTSYEDLVLITDVRRGLHNLRINELFAASKKLEEEGYINQIFQAEILNRLGSVMYFLPMSIFVIVIAWRYRAKEKPRYLFVLLLPVLPIVFNGLTFLYRS

SEQ ID NO: 60663 - DNA, 300 bp, Unknown
  Obtained from environmental sample
  misc_feature (1)..(300): n is a, c, g, or t
ttgaaagaaatcaagggccttaccgatttttacctcggcaacgcgcggctgatacgcgatgcgttacacagcctgggcatagaaaccacgggcggggacaattccccgtacatttgggcttatttcccggacagggacagttgggaagttttctcgcagatacttgaaaaatgccaggtagttacaacccccggggcgggattcggcccggcggggaacggctatatccgcttctccgccttcggccaccgcgccgacgtgcaagaggcctgccagaggctaaaagcaatgaacaattaa

SEQ ID NO: 60664 - protein, 99 aa, Unknown
  Obtained from environmental sample
  misc_feature (1)..(99): Xaa is any amino acid
MKEIKGLTDFYLGNARLIRDALHSLGIETTGGDNSPYIWAYFPDRDSWEVFSQILEKCQVVTTPGAGFGPAGNGYIRFSAFGHRADVQEACQRLKAMNN

SEQ ID NO: 60665 - DNA, 558 bp, Unknown
  Obtained from environmental sample
  misc_feature (1)..(558): n is a, c, g, or t
atgttgcgtgtaggggtcgcgggaattggtaagattagcgggatttaccttgacaatctgacggggatgttcggcaagcgggtaaagctgacggcggtatgcgacgttgtctttgaacgcgcggaaaaagccgcggcggattatcacgtgaaggcgtacagaagccttgacgaaatgctcagagccgatgtagacatagtgctgaacttaagcccgcccctgtatcattttgatattgccctcgcgtcaataaaggccggcaagcacgtctacaatgaaaagcccctgtgcgccaaacgcgaagaagcggacctgctgctcanaaccgcggctgaaagaaagctgaaggtaggctgcgcgccggacaccttccttggcgccggtcttcagacctgcagaaagctgattcgcggcggctggataggcaagccggtcgcggcgaccgcccttatgatgaccacggccccgagcactggcatcccgcgccggaatttttctacaaaccgggcggcggccctatgttcgatgtggggccctattacatcaccgctctggtga

SEQ ID NO: 60666 - protein, 185 aa, Unknown
  Obtained from environmental sample
  DOMAIN (2)...(121): Oxidoreductase family, NAD-binding Rossmann fold
  misc_feature (1)..(185): Xaa is any amino acid
MLRVGVAGIGKISGIYLDNLTGMFGKRVKLTAVCDVVFERAEKAAADYHVKAYRSLDEMLRADVDIVLNLSPPLYHFDIALASIKAGKHVYNEKPLCAKREEADLLLXTAAERKLKVGCAPDTFLGAGLQTCRKLIRGGWIGKPVAATALMMTTAPSTGIPRRNFSTNRAAALCSMWGPITSPLW

SEQ ID NO: 60667 - DNA, 540 bp, Unknown
  Obtained from environmental sample
  misc_feature (1)..(540): n is a, c, g, or t
atgttcgatgtggggccctattacatcaccgctctggtgagccttttgggtgttgtcgcccgcgtgtcaggcagcgccaaagtgagcagccccacgcgtatcattaccagtgaatcgcttaacggggcaataatcaaagttgaggttcccacccatgtcgccggaacccttgaatttgcgcgcggcgcggtgggtacaatcatcaccagttttgacgtttattcccacaccttaccctgcattgaaatttacggaacagaaggcaccctgcgcgttcccgatcccaacaccttcggcggcccggtctatcttaggcgtttccgtgaagaggaatggtcgcaaatacccctgattaataattatacggaagattcccgcggcttaggcatcaccgaaatggccgcggcgatagagcagggccgtccccaccgcgcctccgctgaactcgcttaccatgtgctggacattatgcacggcatacatgaagccgcggcggatgggaagtattataaagtaaagggactggggactagggactag

SEQ ID NO: 60668 - protein, 179 aa, Unknown
  Obtained from environmental sample
  misc_feature (1)..(179): Xaa is any amino acid
MFDVGPYYITALVSLLGVVARVSGSAKVSSPTRIITSESLNGAIIKVEVPTHVAGTLEFARGAVGTIITSFDVYSHTLPCIEIYGTEGTLRVPDPNTFGGPVYLRRFREEEWSQIPLINNYTEDSRGLGITEMAAAIEQGRPHRASAELAYHVLDIMHGIHEAAADGKYYKVKGLGTRD

SEQ ID NO: 60669 - DNA, 453 bp, Unknown
  Obtained from environmental sample
  misc_feature (1)..(453): n is a, c, g, or t
ttggtttataaggaggtaattgagaggagaaaccggagaatgaagaaatttttaaatgaatttaaacaattcgcccttaaaggcaatgtgttgaatctggcggttggcgtaatcatcggggctgcttttcaaggtgtggtcagttcccttacagaaaatattttgtcgccgataatcggtttactgaccaggcaaaatttcgattccctgatgctggaagtgtttggcataacccttaaatacggggctttcattaccagcattataaattttattattatggcttttgtggtttttctgcttgtccggataatgaaccgaatccttgctataggccatgaaaaacaaaacgatcttccggcaaaaaagaagtgcagctactgcttcaccgaaatagacagtaaagcgacacgctgccctgcatgcacctcccagttgataacgaggggatga

SEQ ID NO: 60670 - protein, 150 aa, Unknown
  Obtained from environmental sample
  DOMAIN (17)...(137): Large-conductance mechanosensitive channel, MscL
  misc_feature (1)..(150): Xaa is any amino acid
MVYKEVIERRNRRMKKFLNEFKQFALKGNVLNLAVGVIIGAAFQGVVSSLTENILSPIIGLLTRQNFDSLMLEVFGITLKYGAFITSIINFIIMAFVVFLLVRIMNRILAIGHEKQNDLPAKKKCSYCFTEIDSKATRCPACTSQLITRG

SEQ ID NO: 60671 - DNA, 1506 bp, Unknown
  Obtained from environmental sample
  misc_feature (1)..(1506): n is a, c, g, or t
ttgcgcgataatcacaaaagcgccggttataattatggcgatgaatcccctatcgtagctttcgcaaccattcccggcagcagcgcgcttacgttaatccgctgttccggcaagggtgcgatagaagcggtatcttccgtctttgcaccggacaaattaaaaaacgcgcccggtaataccgttattcacggctggatagttaaggcggacgaaaaaatcgacgaagttcttgtttcggttttccgcgccccaaaaagttatacgggcgaagacagccttgacatatcctgtcacggcggagcgagcgcgggaaaagcggtaatagacgcgttaaaatccgcgggctttcgggacgcgcttcccggcgaatttactttccgcgcttttgtaaacggcaaactagatcttacaaaagccgaatccgtcatggaactggtatccgcaaaaaccgaaactggccgccgtcacgccgtgtcgcgtctttccggctctttgcaaactgaaattgaggaaataaaaaatttggtggttcaggttctttccggcgctgaaatttaccttgactattcggaagatgaaatcggcgcggacattgacgaagatgccggaaaacttccctatcaaaacattgcgctggaagcgttatcgcgtcttaaaaaactgtctgcttcatggcggattgagcgcatttatcaggagggggtaacggtagtaatagccggccgccccaacgccggcaagtccagtctttttaacgccttgttgaaagaagaccgttctatcgttacggaaattcccggcactacccgcgactggatagaagcgtgggtttctatcgatggaattcccgtccgtcttgttgataccgcggggcttcgtgactccgccgaatccgtagaaaaaatcggggtagatcgaagccgcaaacttttgcgggaagcggacattgttctgtatttgatagacggcgcacagggtatcacaggcgaagacaaggattttattgaaggcggcgcgngaaacggcaatgcagtaaacaacaaaataaattcgatacatgagccttacaacagacaacttatcgtctggaacaaagctgatattgccccgctgcttgctgcgatgccgcttgcgccgccgcaaaacttcatcagcgtcagcgcgaaaacaggcgaaggttttactctgcttcactctgcgatttcatcagcaattcaaagactggcatcggcacagcaaacagagtctcagcaaacaacggcgcaagcatctctgcaagacgcgccgattaccgccgccgtcggtacggaaaggcaaaaaaatcttgtggacgccgcctgttccgcgatggaagaagctctcgggctggctcggcgcaatgagccgcttgatataatcgcgccgctgttgagggaagcggttaactcattgggagaaatcacgggagaggtatccaccgccgatatactggaagaaatgttcagccgtttctgcgtggggaagtag

SEQ ID NO: 60672 - protein, 501 aa, Unknown
  Obtained from environmental sample
  DOMAIN (235)...(367): GTPase of unknown function
  misc_feature (1)..(501): Xaa is any amino acid
MRDNHKSAGYNYGDESPIVAFATIPGSSALTLIRCSGKGAIEAVSSVFAPDKLKNAPGNTVIHGWIVKADEKIDEVLVSVFRAPKSYTGEDSLDISCHGGASAGKAVIDALKSAGFRDALPGEFTFRAFVNGKLDLTKAESVMELVSAKTETGRRHAVSRLSGSLQTEIEEIKNLVVQVLSGAEIYLDYSEDEIGADIDEDAGKLPYQNIALEALSRLKKLSASWRIERIYQEGVTVVIAGRPNAGKSSLFNALLKEDRSIVTEIPGTTRDWIEAWVSIDGIPVRLVDTAGLRDSAESVEKIGVDRSRKLLREADIVLYLIDGAQGITGEDKDFIEGGAXNGNAVNNKINSIHEPYNRQLIVWNKADIAPLLAAMPLAPPQNFISVSAKTGEGFTLLHSAISSAIQRLASAQQTESQQTTAQASLQDAPITAAVGTERQKNLVDAACSAMEEALGLARRNEPLDIIAPLLREAVNSLGEITGEVSTADILEEMFSRFCVGK

SEQ ID NO: 60673 - DNA, 378 bp, Unknown
  Obtained from environmental sample
  misc_feature (1)..(378): n is a, c, g, or t
gtgcgcgccgatatgcgatggccgcgctttgtgattactcctgtaattttggaaagagaagcgtctttgacagtaccgtccgcaccgactccttcaataataaagtccgtaaccgtgtccatgaaaattgtcaggtttttctgtttctcaagaatggaacgcgccgccgcgggatacgcgtgcttgtccgcctgcgctcttggagcctgtacagcgggaccgcgcgaacggttaagaacccggtactggatcattgtcgcgtccgtcagcttgcccatctctccgccgagagcgtccacttcccttacaaggttgccttttgaaaggccgccaatcgccgggttgcaggagagcgtccctatcctgtcggggttttga

SEQ ID NO: 60674 - protein, 125 aa, Unknown
  Obtained from environmental sample
  misc_feature (1)..(125): Xaa is any amino acid
MRADMRWPRFVITPVILEREASLTVPSAPTPSIIKSVTVSMKIVRFFCFSRMERAAAGYACLSACALGACTAGPRERLRTRYWIIVASVSLPISPPRASTSLTRLPFERPPIAGLQESVPILSGF

SEQ ID NO: 60675 - DNA, 1785 bp, Unknown
  Obtained from environmental sample
  misc_feature (1)..(1785): n is a, c, g, or t
ttggactatgattgcattgttataggcgggggtcacgcggggattgaagcgtcccttgcggtatcccggctcggtttttcaaccctcctcatcacccagaaccctgaccggataggcgcgctttcctgcaacccggctataggcgggctctccaagggcaatattgtccgcgagattgacgcgctcggcggcgaaatggcaaagctgaccgacgccacgatgatccagtaccgcgtgctgaaccgttccaggggccctgcggtacaggcgccacgggcgcaggccgacaagcaacagtaccagcaacttgcccgcgccgtccttgaaaaacaaaaaaaactttcaatatttatggataccgtaaccgatctgataattgaaaaagtgtctactgcgactcaagggagactcggaaaaatcgccggngtgcttacgagccgggggcaccggataagcgcccctgcggtgatccttgccgcgggaacttttatggaagggaaaatatttatcggcgaatatgacgcgccgaacgggcggcttggggaagaggcggctttggggcttggcgcgtccttgcgccgacttggttttccggtgggaagacttaaaaccggtactcctgcgcggcttgccggagacacgattgattattccgttatggaaaaacaggacagcgaggaaatgcgcccgttttcatttctcgccgccgccgacattgttaccggcagacccgccatgccctgctgggtcacgtacacaaacacaaaaacgcacgaaatcatcagggcaaatatcggacgctctccgttgtacggcggaaaaataataggtacgggagcgcgttattgcccttctatcgaggacaaggtaatgcgcttttcacacagggagcgtcatcatgtttttattgaaccggaaggactttctacaaacgagatgtacatgaacggcgcgtccagttccctgcctgaagacgtgcagagcgattttatccacagcatttcaggacttgagcaggcgcatattgtccgtcccggctatgcggtggaatatgattatatcgatcctcttgatctttttccgtcgctggagtcaaagcgcctgtcaggttttttcacggcggggcagaccaacggttcttccggttacgaggaagccgccgcccagggaataatcgcgggaatcaacgccgcgatgaaaatgcagggaaagccgccctttatcctcagccgcgccgaagcctacatcggcgtgcttgttgacgatcttaccacgcttggaacaaaggaaccgtaccgaatgttcacaagccgcgccgaacaccgccttatgctgcgccacgacacagccgacacaaggcttacccccagagggcgcgaagccggtcttgtagacgacgcccgctgggaacatttccttgaaaagacaaaaaaacttgacgagataaaagaactgcttgcccagcgaaaaaactcttcacccgaagcaagcgcgctttcaggcaagtcccttgccaattatcctgcggagttggtagaacgcgctctgttggatgaaaagtacgcgggctacatagaaaaggaactccgctttgccgcgaaagccgcaaaaatggacgcgattaaacttgatcccaacacggactattcggctatcaacggcctttccgccgaagcaaaagagaaacttcaatccgtaaaacctctcaacgtaggacaagccgcccgaatccccggagtaaggcagggggacatcgctatgttgattatactcgcaaggaaataa

SEQ ID NO: 60676 - protein, 594 aa, Unknown
  Obtained from environmental sample
  DOMAIN (4)...(405): Glucose inhibited division protein A
  misc_feature (1)..(594): Xaa is any amino acid
MDYDCIVIGGGHAGIEASLAVSRLGFSTLLITQNPDRIGALSCNPAIGGLSKGNIVREIDALGGEMAKLTDATMIQYRVLNRSRGPAVQAPRAQADKQQYQQLARAVLEKQKKLSIFMDTVTDLIIEKVSTATQGRLGKIAGVLTSRGHRISAPAVILAAGTFMEGKIFIGEYDAPNGRLGEEAALGLGASLRRLGFPVGRLKTGTPARLAGDTIDYSVMEKQDSEEMRPFSFLAAADIVTGRPAMPCWVTYTNTKTHEIIRANIGRSPLYGGKIIGTGARYCPSIEDKVMRFSHRERHHVFIEPEGLSTNEMYMNGASSSLPEDVQSDFIHSISGLEQAHIVRPGYAVEYDYIDPLDLFPSLESKRLSGFFTAGQTNGSSGYEEAAAQGIIAGINAAMKMQGKPPFILSRAEAYIGVLVDDLTTLGTKEPYRMFTSRAEHRLMLRHDTADTRLTPRGREAGLVDDARWEHFLEKTKKLDEIKELLAQRKNSSPEASALSGKSLANYPAELVERALLDEKYAGYIEKELRFAAKAAKMDAIKLDPNTDYSAINGLSAEAKEKLQSVKPLNVGQAARIPGVRQGDIAMLIILARK

SEQ ID NO: 60677 - DNA, 309 bp, Unknown
  Obtained from environmental sample
  misc_feature (1)..(309): n is a, c, g, or t
atgttcccagcgggcgtcgtctacaagaccggcttcgcgccctctgggggtaagccttgtgtcggctgtgtcgtggcgcagcataaggcggtgttcggcgcggcttgtgaacattcggtacggttcctttgttccaagcgtggtaagatcgtcaacaagcacgccgatgtaggcttcggcgcggctgaggataaagggcggctttccctgcattttcatcgcggcgttgattcccgcgattattccctgggcggcggcttcctcgtaaccggaagaaccgttggtctgccccgccgtgaaaaaacctga

SEQ ID NO: 60678 - protein, 102 aa, Unknown
  Obtained from environmental sample
  misc_feature (1)..(102): Xaa is any amino acid
MFPAGVVYKTGFAPSGGKPCVGCVVAQHKAVFGAACEHSVRFLCSKRGKIVNKHADVGFGAAEDKGRLSLHFHRGVDSRDYSLGGGFLVTGRTVGLPRREKT

SEQ ID NO: 60679 - DNA, 384 bp, Unknown
  Obtained from environmental sample
  misc_feature (1)..(384): n is a, c, g, or t
atgtacagcgccgcactgctgcgggcgggcggagtaagcgaagattctatccgcgccgtatgctcccacggttacggccttaccagcgtggacgccaagcccgaacatcaaatggaaaaaatcctctatgccgcggacgagcttacgggccttgtctgggcggtcgcgatcatacggccttcaaaaagcgttatggacatggaagtaaaatccgtgaaaaagaaattcaaaaccccggcttttgccgcgggctgttcccgcccggttatagaaaaaggcgcggaagttctgggatgggaactggacacccttatcgaaaaaacgatactcgccatgcgttcctgtgaagcccaagtgaacgccgcaatggcggatattaaatag

SEQ ID NO: 60680 - protein, 127 aa, Unknown
  Obtained from environmental sample
  misc_feature (1)..(127): Xaa is any amino acid
MYSAALLRAGGVSEDSIRAVCSHGYGLTSVDAKPEHQMEKILYAADELTGLVWAVAIIRPSKSVMDMEVKSVKKKFKTPAFAAGCSRPVIEKGAEVLGWELDTLIEKTILAMRSCEAQVNAAMADIK

SEQ ID NO: 60681 - DNA, 987 bp, Unknown
  Obtained from environmental sample
  misc_feature (1)..(987): n is a, c, g, or t
ttgccgcagcttcctcctcttgctcggataggtaaaatcttattagccgtcaaaaccgcagagtccataaaccggcggctggaacggctgatgccggtactgacgcctttgggtattacgctgggttttcttctgccgggcatgtttatatatttgcggccgtttgttccctggctcttcggccttatgactctttccggggcattgagactgaaggtttctgaattcggcaataccgtacgcggccctgttcccatattggtgttttttgtttctactcatgtactaatgccgtgctgcgccatgttcgttgcctcccatcttcttggcggcagcccggatgctgtcaccggttttgtcctgttgtttgccggtcccatagccgtttcaagctttatgtgggtaagtatttttcagggagataaagccctctgcctgaccctgattctgctggatactctgcttgcgccgctggtagtgccgggtactgtttcactgttaatgggcgcgaaagtggcaatggatatgagtggtattgccgtttcccttattttgatggtggtaatcccgacgattatcggcgttacggttaatgaaatcagccggggaaaaatccccatcttgatctgcccctatcttgatccggtctcaaaaatctgccttatgctggttattgccgccaatacctcaccggtcgcgaaaataattcagtttgataacccggaagtctggaaaatcgcgggaatgtgtattttcctttccgccggaggttttatagtatcaaaatttaccgccattactgttaggtgcaattcagaaggaagcgtaaccatgtttttttgcggcggactgcggaacatcagcgccgttaccaccatcgcggtaacctttttcccggaatcagccgccctgcccgccctgctgggcattgtgtttcaacagacgatttcggccattatggggaagctattcgcgccgaagctatag

SEQ ID NO: 60682 - protein, 328 aa, Unknown
  Obtained from environmental sample
  DOMAIN (57)...(235): Sodium Bile acid symporter family
  misc_feature (1)..(328): Xaa is any amino acid
MPQLPPLARIGKILLAVKTAESINRRLERLMPVLTPLGITLGFLLPGMFIYLRPFVPWLFGLMTLSGALRLKVSEFGNTVRGPVPILVFFVSTHVLMPCCAMFVASHLLGGSPDAVTGFVLLFAGPIAVSSFMWVSIFQGDKALCLTLILLDTLLAPLVVPGTVSLLMGAKVAMDMSGIAVSLILMVVIPTIIGVTVNEISRGKIPILICPYLDPVSKICLMLVIAANTSPVAKIIQFDNPEVWKIAGMCIFLSAGGFIVSKFTAITVRCNSEGSVTMFFCGGLRNISAVTTIAVTFFPESAALPALLGIVFQQTISAIMGKLFAPKL

SEQ ID NO: 60683 - DNA, 300 bp, Unknown
  Obtained from environmental sample
  misc_feature (1)..(300): n is a, c, g, or t
atgcttaaaccgtatgatttactcgaaaatatactgttggatattgaaaacggcatcaaaaacaatataaattcgtatattctttccaaaaaatacggtttttcggaaggtcatttacgcagactattcagctttgccttcaaacaatccattgccgcttatatacgttcccgcacattggcggctagcctgaatgatatactggaaaccaacgccaacattcttgatattgcggatgaatacagttttgaatatcaacagtcatacagtacaggcctttcaagcgcgaatttggcgtaa

SEQ ID NO: 60684 - protein, 99 aa, Unknown
  Obtained from environmental sample
  misc_feature (1)..(99): Xaa is any amino acid
MLKPYDLLENILLDIENGIKNNINSYILSKKYGFSEGHLRRLFSFAFKQSIAAYIRSRTLAASLNDILETNANILDIADEYSFEYQQSYSTGLSSANLA

SEQ ID NO: 60685 - DNA, 810 bp, Unknown
  Obtained from environmental sample
  misc_feature (1)..(810): n is a, c, g, or t
atggacttaaaggaacttcggaagcaaattgacgggattgatgacgatcttgtccgcctgtttcagcagagaatggatatttcagcagagatagcgcgttataaaaaagagaacaatctgcctgtgcatgacccggcgcgcgaacgggaaaaattatacgatctgtcttttaagacaaaccccgggcgcgaatcgtatattaccgctttatactatctgctttttgagttaagccgcgccgatcaggaacggattttaaatcaatcctgtgagcttacggaaaaaattcaaaatagcattaaaaataccgaatggatgtttccttcgcggacggttatcgcctgtcagggaacggaaggctcatactcccagcaggcggctgaaaaattgttcgaccttccaagcattatgtactgcaacacctttgaaagcgttttttccacgattgaccacggcttgtgccaatacgggcttttgccgcttgaaaacagcacggcaggctcgatcaatcaagtgtacgatttgatgatgcgttatccgtacagcatagtgcgcagtgtccgcttaaaaatcgaccacagccttctcgcaaaaaaaggcgtaaaaatttcggatataaaagaagttttttcccacgaacaggcaatcgcccagtgcgcgggttatcttaaaacgcttaactgcaagataaccgcctgcgaaaacacagccattgccgcaaagatggtagccgaatccggcagaaccgacattgcggctctttcttccgcgaagtgcgcaggcctgtacgatcttgcatcgcctcgctga

SEQ ID NO: 60686 - protein, 269 aa, Unknown
  Obtained from environmental sample
  DOMAIN (7)...(85): Chorismate mutase type II
  misc_feature (1)..(269): Xaa is any amino acid
MDLKELRKQIDGIDDDLVRLFQQRMDISAEIARYKKENNLPVHDPAREREKLYDLSFKTNPGRESYITALYYLLFELSRADQERILNQSCELTEKIQNSIKNTEWMFPSRTVIACQGTEGSYSQQAAEKLFDLPSIMYCNTFESVFSTIDHGLCQYGLLPLENSTAGSINQVYDLMMRYPYSIVRSVRLKIDHSLLAKKGVKISDIKEVFSHEQAIAQCAGYLKTLNCKITACENTAIAAKMVAESGRTDIAALSSAKCAGLYDLASPR

SEQ ID NO: 60687 - DNA, 390 bp, Unknown
  Obtained from environmental sample
  misc_feature (1)..(390): n is a, c, g, or t
ttgcggctctttcttccgcgaagtgcgcaggcctgtacgatcttgcatcgcctcgctgactcggtacaggatcgcggcagtaactttacgcgttttatctgcgtttcaaaatcgctcgcgatctatccgggagcggacaagaccagtcttatgatgacaattccgcacaaacccggctctctctaccacgtgttgtcgcgtttttacatacacggaattaaccttattaaacttgaaagccgccctattccggacagcgattttgagtttatgttttattttgacattgaaacgccggtttactctcccgctcttatgcagacaatacgtgaattaagcgaattaagcgacagattttattatcttggcagttattcggaagtagtgtga

SEQ ID NO: 60688 - protein, 129 aa, Unknown
  Obtained from environmental sample
  misc_feature (1)..(129): Xaa is any amino acid
MRLFLPRSAQACTILHRLADSVQDRGSNFTRFICVSKSLAIYPGADKTSLMMTIPHKPGSLYHVLSRFYIHGINLIKLESRPIPDSDFEFMFYFDIETPVYSPALMQTIRELSELSDRFYYLGSYSEVV

SEQ ID NO: 60689 - DNA, 840 bp, Unknown
  Obtained from environmental sample
  misc_feature (1)..(840): n is a, c, g, or t
atgagccgcgtcctgggtcatgcggaaaataaaaaattcgcgggcgccgaagatctgctgcgggcaaatgaacgctggtgcgtgagcgcctgcggcaagttcctgaaaggcggctttcccgtatggacactgggccagggcgttctctcggcgcttgttatacaggccagacagaccttgctgcctgtgttacgcgatcaagaaacggttcccccgccgcgttttctccgcggaatattcggcggcaaagtttttctccattcattgcagggacgcaaaaatgacgccctggttatggagaaggctctggaagaaatggggctgtatccctcagaaaaaaaagattacgacattatgtgccttgaccgcgctccctcatcctttaattcaaccgcccctgttaatctggttatacgaaagcccgcgccgcaggacatggacgagcttgccgccctgcacgccggttacgaacaggaagaggttttgcccgtcgcgtcggagtttcgccccgccgcaagccggctgaatattgagcgtatcttcgcggaagagcagatgctcgtggccgaacttgagggccgcctagtagggaaaatcaataccaatgccctaagttttacgcgctgtcagattggaggcgtgtatgttcatcccgactaccgtggccttggaatagcgggcagaatgacatttgaatttgcggaaagccttaggtcccagggcagaggcgtatccctctttgtccaaaaaacaaatatcgcggcccgcagggtttatcagcgcgtgggctttgaaatacagggcgattaccggatcgactatttttcatataataattaa

SEQ ID NO: 60690 - protein, 279 aa, Unknown
  Obtained from environmental sample
  DOMAIN (187)...(272): FR47-like protein
  misc_feature (1)..(279): Xaa is any amino acid
MSRVLGHAENKKFAGAEDLLRANERWCVSACGKFLKGGFPVWTLGQGVLSALVIQARQTLLPVLRDQETVPPPRFLRGIFGGKVFLHSLQGRKNDALVMEKALEEMGLYPSEKKDYDIMCLDRAPSSFNSTAPVNLVIRKPAPQDMDELAALHAGYEQEEVLPVASEFRPAASRLNIERIFAEEQMLVAELEGRLVGKINTNALSFTRCQIGGVYVHPDYRGLGIAGRMTFEFAESLRSQGRGVSLFVQKTNIAARRVYQRVGFEIQGDYRIDYFSYNN

SEQ ID NO: 60691 - DNA, 774 bp, Unknown
  Obtained from environmental sample
  misc_feature (1)..(774): n is a, c, g, or t
ttgatgatgaacggggctacgatttgggcgggcagcgtttccagggcggcgaaacaggccttactcgccggaaatgatataatccttttttcaaaaacgcccagcctttttgatcccgtgtggaatttactttcaagctccatgaaagatgataacgaattccgccttcgcgtccgggatgccgcaaggcggactctggagacaaaacttcgttaccttcggggcagccaagctgttactttcatcccggatataaagaaggttgaagaaggcctgcccgatcctgaaggcagcgctttctttttggagcttgcggcgcgcagcgttaccattgtgaaaccatcaaaggaggcggcgtttggaacgcagtcagagcatggcgtttttcccttaaagcctgaagtcgccggaaaagtcctgctgaccggccagtaccttgattttttcaaagtgggcagagccgccttccccggcgcaatttcctactggtactccgaaatcttcagtatagacgatctcatgacttttgccagagccgccgacacggttgtcttctgcctttcggataccgaaggcttaagaatattgaggcgtcttgaagcgttaaaaaaaaggataattgttctgtcagtgctgaaccccgtctaccttgaaaacatcccctggattgacggggctgtggcggtttacagcgactcttttgaatcgcttgcggcgggcttttcggctatcgttggaagaatccccgccgggggaagactcccttatgaatga

SEQ ID NO: 60692 - protein, 257 aa, Unknown
  Obtained from environmental sample
  misc_feature (1)..(257): Xaa is any amino acid
MMMNGATIWAGSVSRAAKQALLAGNDIILFSKTPSLFDPVWNLLSSSMKDDNEFRLRVRDAARRTLETKLRYLRGSQAVTFIPDIKKVEEGLPDPEGSAFFLELAARSVTIVKPSKEAAFGTQSEHGVFPLKPEVAGKVLLTGQYLDFFKVGRAAFPGAISYWYSEIFSIDDLMTFARAADTVVFCLSDTEGLRILRRLEALKKRIIVLSVLNPVYLENIPWIDGAVAVYSDSFESLAAGFSAIVGRIPAGGRLPYE

SEQ ID NO: 60693 - DNA, 858 bp, Unknown
  Obtained from environmental sample
  misc_feature (1)..(858): n is a, c, g, or t
atgaggattttcccagtattattaatttttctggcaagttcaatcttttccctgagtttttttgatgacaggcctccggaggagcttgccgttgcgctggaaagagcgatgagcgatgatgaggcgcttgctcaggtgttcatgctcggttgggtgggggcggaaccttcgcccctgatcatggactggatacatgaccgcaatataggcggcgtgaaaatttttggctggaatacgggtgatacggtcaggctggcaaggacggtaggcgtcttgcaggaggcaagccttaaaggaaaattcaatatcccgctgcttgtggcgaccgatcaggagggggggtggattcgccatgtaaagggaaataccagcataacgccgggaaatatggcgatcggcgcttcaggttatccgcgtgacgcctatcttgccggttattacatcggcaaagagttagccctgctgggaatcaacatgaactttgccccaacggttgatcttttcaccaaccgagattcatggctgataagcacgcgcgcctttgggagcgatcctgtgaaagtggggatcttcggcgcggcgtatatgagaggccagcaggctgtggggattatccctacggcaaaacattttccgggccacggcgacactcagcttgattcccacggcgtgcttcccagcattaatgtcacatttgaaactctgtgggacagggaactggtgccataccggatgcttgtcaaagaagggatacccgcggtgatgagcggccaccttgcctttccaaaaatcgaggcgaacggcgctccggcgtcgctctcctcatggttcttaaaagacgtgctccgcgggagatag

SEQ ID NO: 60694 - protein, 285 aa, Unknown
  Obtained from environmental sample
  SIGNAL (1)...(17)
  DOMAIN (95)...(284): Glycosyl hydrolase family 3 N terminal domain
  misc_feature (1)..(285): Xaa is any amino acid
MRIFPVLLIFLASSIFSLSFFDDRPPEELAVALERAMSDDEALAQVFMLGWVGAEPSPLIMDWIHDRNIGGVKIFGWNTGDTVRLARTVGVLQEASLKGKFNIPLLVATDQEGGWIRHVKGNTSITPGNMAIGASGYPRDAYLAGYYIGKELALLGINMNFAPTVDLFTNRDSWLISTRAFGSDPVKVGIFGAAYMRGQQAVGIIPTAKHFPGHGDTQLDSHGVLPSINVTFETLWDRELVPYRMLVKEGIPAVMSGHLAFPKIEANGAPASLSSWFLKDVLRGR

SEQ ID NO: 60695 - DNA, 666 bp, Unknown
  Obtained from environmental sample
  misc_feature (1)..(666): n is a, c, g, or t
ttgtttaccgccgttcttgcaagcggacagacgagacgcgccccggcggtaatttttgcaacaggcgcaaagcaccgcctcctgggcattccgggtgaaaaggaattttcagggcgcggtgtttcctggtgcgcgacctgcgacggggcgtttttcaaaggaaaaaaaattatcgcggttggagggggagacgccgcctgcgacggggcgcaatacctgtcacgtttaagcggtcagctgatccttgtacaccgccgcgaccgtttccgcgctcagaaggcgctcgcggatcgtgttatgcgaaataaaaatattgaggtcagattcaacactgttattaaggaaataaagggcgataaaaagatcagctcggcggttcttgaatgtgaaggcagggtttatgaagaaccggccgacgcggtttttatttttgccggaatgatcccccagtcgtctcttgcaggggtcgctggcttgagagtggaaatggatgacggcggctgcattctcagcgatcaaaaaatggccacctccgtgccgggcttgtttgtagcgggcgatgtccgatccggctcattcaggcaggtgatagtcgcggcaggggagggcgcggtcgccgctcataatgcagccgcatatattgagcaattaggaatgaggaattag

SEQ ID NO: 60696 - protein, 221 aa, Unknown
  Obtained from environmental sample
  DOMAIN (56)...(193): Pyridine nucleotide-disulphide oxidoreductase
  misc_feature (1)..(221): Xaa is any amino acid
MFTAVLASGQTRRAPAVIFATGAKHRLLGIPGEKEFSGRGVSWCATCDGAFFKGKKIIAVGGGDAACDGAQYLSRLSGQLILVHRRDRFRAQKALADRVMRNKNIEVRFNTVIKEIKGDKKISSAVLECEGRVYEEPADAVFIFAGMIPQSSLAGVAGLRVEMDDGGCILSDQKMATSVPGLFVAGDVRSGSFRQVIVAAGEGAVAAHNAAAYIEQLGMRN

SEQ ID NO: 60697 - DNA, 876 bp, Unknown
  Obtained from environmental sample
  misc_feature (1)..(876): n is a, c, g, or t
ttgaaaaacaacagtatattaagtatgttgaaaataaccatgccgttaaatatcactcctattacaaaccaccgtgaaagagaaaagggcgttatcgtgtacccggtgtactcgcgccgttcagagggattgtctatcgggattaatttattccccgataaaaaggtctgccctttcgattgcccctattgcgaagtgtttcccttctcaagcaaagcggctttttctcttgaacaattagaaaacgatttacaaaaagccatttcagaggcgcaaaaacaaaacactattattaaagacatttgtttttcaggcaacggagagcctaccctctctcccgctttcccctctgctctgaaactggcagaagacatttgcgcaaaagcggcttcctcggcgcggcttgttatcattacaaacggggcgggactgttacagccgcaaattttttcgctcttaaaagacgccgctttactgcctaccacagacatttggttaaaagcggacgcgggaacagaaaactggtacaataaaataaaccgctcctctatttcttatgaaaaactgatcgcggtaataaaagaatttgcgtcctgttcccccgtaacaatacagacaatgctctgcgccataaacggcgaacaaccgccggaaacggaaaggcaagcatgggaatcgcttgtatgcgaattggcgcaaggagagggcaaaacaagcggtattcgcaaagtacagctttatggcaaagcccgtcccgcgccggaagacccgctggcgtcgcagctttcggaagattatcttgaagaacgcgctgaatctctgcgcagtgtgtttacagatagaggcatatctatacctgtagacatttatctataa

SEQ ID NO: 60698 - protein, 291 aa, Unknown
  Obtained from environmental sample
  DOMAIN (51)...(223): Radical SAM superfamily
  misc_feature (1)..(291): Xaa is any amino acid
MKNNSILSMLKITMPLNITPITNHREREKGVIVYPVYSRRSEGLSIGINLFPDKKVCPFDCPYCEVFPFSSKAAFSLEQLENDLQKAISEAQKQNTIIKDICFSGNGEPTLSPAFPSALKLAEDICAKAASSARLVIITNGAGLLQPQIFSLLKDAALLPTTDIWLKADAGTENWYNKINRSSISYEKLIAVIKEFASCSPVTIQTMLCAINGEQPPETERQAWESLVCELAQGEGKTSGIRKVQLYGKARPAPEDPLASQLSEDYLEERAESLRSVFTDRGISIPVDIYL

SEQ ID NO: 60699 - DNA, 855 bp, Unknown
  Obtained from environmental sample
  misc_feature (1)..(855): n is a, c, g, or t
atggataaaacagcctcgcaggcgcaaatgctcgctaatcgtttacaaaaacggtttcgtcatcttaaaaaatgggcgcaaagaacgggcgttggcgcattcaggctttacgaccgcgacattcccgaaataccgcttgttttggatttttacggcgatgtttcactagcgggagaagccgcgatttcaggcgctctttacaagcggccttatgaaaaagacgaagaagatgaaacacaatggctgtccgcaatgagaaacgcagtctccgccgcgcttggaataaacattgagcggattttcctaaaacagcggcaaaggcaaaggggcgatgctcagtatgagaaaaccggagatacgcggtttgaaaaaatagtgagcgagggagatcttgtttttaaggttaacctttccgactatctggacaccggcctctttcccgacaggcggctcttgcgcgtaatggttaaagacgaagccaaagaaaagaaagtgttgaatctcttttcctataccgcctctttttcggtttatgccgcagccggaggcgccgtatcaacagattctgtcgatctttccaacacttacctgaactgggcgcgtgaaaatttttcgctgaacggattttcagcccaaattttacaaatttgggattacttttcgaacaaagaacaacgagaggagatccacaaccttatccgcgccgacgtacttgattttctcgaaaaagccaccgtttcaaaaaagaaatgggatattattgttttagaccccccatcattttccaattcaaagaaaatgacaaacgatttcgacttacagcgcgatttaacggaattacttggtaaatgttaa

SEQ ID NO: 60700 - protein, 284 aa, Unknown
  Obtained from environmental sample
  misc_feature (1)..(284): Xaa is any amino acid
MDKTASQAQMLANRLQKRFRHLKKWAQRTGVGAFRLYDRDIPEIPLVLDFYGDVSLAGEAAISGALYKRPYEKDEEDETQWLSAMRNAVSAALGINIERIFLKQRQRQRGDAQYEKTGDTRFEKIVSEGDLVFKVNLSDYLDTGLFPDRRLLRVMVKDEAKEKKVLNLFSYTASFSVYAAAGGAVSTDSVDLSNTYLNWARENFSLNGFSAQILQIWDYFSNKEQREEIHNLIRADVLDFLEKATVSKKKWDIIVLDPPSFSNSKKMTNDFDLQRDLTELLGKC

SEQ ID NO: 60701 - DNA, 1017 bp, Unknown
  Obtained from environmental sample
  misc_feature (1)..(1017): n is a, c, g, or t
ttgaccagtgagagacagcaggatgacacataccgtaccggtaccagggaaagagaaaatgaactgaacatacaggttaccgatctggggctgacggtgcgttacggctttaataaggctacggtactggttaccagcctttctaccggcaaacccgtggaaaatgccaaagttacgctgcttcctcccagccgggttaaaggcggggaagatgtttccactattatgtcgagtcttggctttgctcagaccgataaagacggtcttgcggtagtgtatcttagcgcttcggcgctacgggacaatacgacaaataatcaaacttggaggggctacgatacgcccttcgtacttgccgaaaaagacgaagaccgggccatatttgatccctattcgcataacaactggcgtttcggcgttcaatccgatataccccagcgagccgaagaaataacgccccttgcctttttgttttccgaccggggcctctacaagcccggcgaggttcttaccttccggggcgtcgaccgttccaaagtgctgggaatgtacaccatttaccggggggattataccgttatccttgaaggggactatcacaacgcggttaccattagtactgtatcgggcgcaaccaccgaatcaggaagtttttacggcagcatcaacattcccgatgataccgctccgggcccctgccggctgatatacaaacgcggcgacggcaagaccatcgccaatgtgcctgtaactgtagcttactttgaacggttgaaatttcaagcgtccctttccgcgccggcggcggcaataataagcggcgatgacattaacctgaaattgcaggcgacttatctttccggcggcagtctggccggcgcttcatgggaaagcgcgtggtacgatgaaatgtcggtctttcagccaaaaacgcctgaaaccaaaggctatgtgttcgggcccccgccgcgtatgggacagcaagcgcagcatcgcttccggaagcgggggttttag

SEQ ID NO: 60702 - protein, 338 aa, Unknown
  Obtained from environmental sample
  DOMAIN (23)...(324): Alpha-2-macroglobulin family N-terminal region
  misc_feature (1)..(338): Xaa is any amino acid
MTSERQQDDTYRTGTRERENELNIQVTDLGLTVRYGFNKATVLVTSLSTGKPVENAKVTLLPPSRVKGGEDVSTIMSSLGFAQTDKDGLAVVYLSASALRDNTTNNQTWRGYDTPFVLAEKDEDRAIFDPYSHNNWRFGVQSDIPQRAEEITPLAFLFSDRGLYKPGEVLTFRGVDRSKVLGMYTIYRGDYTVILEGDYHNAVTISTVSGATTESGSFYGSINIPDDTAPGPCRLIYKRGDGKTIANVPVTVAYFERLKFQASLSAPAAAIISGDDINLKLQATYLSGGSLAGASWESAWYDEMSVFQPKTPETKGYVFGPPPRMGQQAQHRFRKRGF

SEQ ID NO: 60703 - DNA, 489 bp, Unknown
  Obtained from environmental sample
  misc_feature (1)..(489): n is a, c, g, or t
gtggcaagaggtggaaaaatgtcagaatctaaccaattagtaacctttcagcttggggacgagttgtacggaatagacatcatggatgttaaagaaatagtacgtgttcaggatgtcagggctattccgaacgccccaatgtacgtagagggaatttttcaccttcgtagcgaaataattcccataatcaaccttcataagcggtttcatcttaaaagaacagcgatttcggaggaagatgagcttatgtcaggctttgtcataatcgatatcgacgggatgaaacttggagtcattattgataaggtttccagggttgtaacaatagagaaagaagaaatccagcctcctccccaaatggtgagcggtataggagccgaatatatacagggtgtggtacggcaggaaggcgggtatctcataattttggatattagggatctctttaatccaaaagaactgcaaaaaattgccgctctgcgaaggtaa

SEQ ID NO: 60704 - protein, 162 aa, Unknown
  Obtained from environmental sample
  DOMAIN (12)...(153): CheW-like domain
  misc_feature (1)..(162): Xaa is any amino acid
MARGGKMSESNQLVTFQLGDELYGIDIMDVKEIVRVQDVRAIPNAPMYVEGIFHLRSEIIPIINLHKRFHLKRTAISEEDELMSGFVIIDIDGMKLGVIIDKVSRVVTIEKEEIQPPPQMVSGIGAEYIQGVVRQEGGYLIILDIRDLFNPKELQKIAALRR

SEQ ID NO: 60705 - DNA, 369 bp, Unknown
  Obtained from environmental sample
  misc_feature (1)..(369): n is a, c, g, or t
atggcttatcttgaggggggcttcccgcttagatgccttcagcggttatcccttccgagcgtggctacccggcgcttgcccttggcaggacaaccggcacaccagaggctcgtccatttcggtcctctcgtactaaaaacagctcctctcaaccatcccgcgcccatggcagatagggaccgaactgtctcgcgacgttctgaacccagctcacgtaccgctttaattggcgaacagccaaacccttgggacctgcttcagccccaggatgcgatgagccgacatcgaggtgccaaaccttcccgtcgatgtgaactcttggggaagattagcctgttatccccggagtaccttttatccgttaagtga

SEQ ID NO: 60706 - protein, 122 aa, Unknown
  Obtained from environmental sample
  misc_feature (1)..(122): Xaa is any amino acid
MAYLEGGFPLRCLQRLSLPSVATRRLPLAGQPAHQRLVHFGPLVLKTAPLNHPAPMADRDRTVSRRSEPSSRTALIGEQPNPWDLLQPQDAMSRHRGAKPSRRCELLGKISLLSPEYLLSVK

SEQ ID NO: 60707 - DNA, 303 bp, Unknown
  Obtained from environmental sample
  misc_feature (1)..(303): n is a, c, g, or t
gtgccaaaccttcccgtcgatgtgaactcttggggaagattagcctgttatccccggagtaccttttatccgttaagtgacggcgcttccacccgctaccgccagatcactaagacctactttcgtacctgctcggcctgtcagcctcgcagtcaagcccccttgtgcctttacactcgtgcgccgatttccaaccggcgcgaggggaccttcgcgcacctccgttactctttgggaggcgaccgccccagtcaaactgcctgcctaccgctgtccggagcccagcttcatgggccccgttag

SEQ ID NO: 60708 - protein, 100 aa, Unknown
  Obtained from environmental sample
  misc_feature (1)..(100): Xaa is any amino acid
MPNLPVDVNSWGRLACYPRSTFYPLSDGASTRYRQITKTYFRTCSACQPRSQAPLCLYTRAPISNRREGTFAHLRYSLGGDRPSQTACLPLSGAQLHGPR

SEQ ID NO: 60709 - DNA, 420 bp, Unknown
  Obtained from environmental sample
  misc_feature (1)..(420): n is a, c, g, or t
ttgactacgcccgcttcgcctcgccttagctcagctcgctgtcacagctcgcctgtggtcgtttcccccgaccccattagctcgccgcttcgaccgggacaaccgtcgcccggccgggtttcgcctcatgcgtcatcccttgaaaccaagaacggtactggaataataaccagtttcccatcggctacgactttcgtcctcgccttaggggccgacttaccctgggcagatgacctttacccaggaatccttaggctttcggcggaggggaatctcacccctcttttcgtctacttatacctgcattctctcttccaccccctccagcataccttacagtacgccttcgtcggtccgtggaatgctcccctaccaaccgtaccttgcggtacgattccgcggcttcggttgcatgcttag

SEQ ID NO: 60710 - protein, 139 aa, Unknown
  Obtained from environmental sample
  misc_feature (1)..(139): Xaa is any amino acid
MTTPASPRLSSARCHSSPVVVSPDPISSPLRPGQPSPGRVSPHASSLETKNGTGIITSFPSATTFVLALGADLPWADDLYPGILRLSAEGNLTPLFVYLYLHSLFHPLQHTLQYAFVGPWNAPLPTVPCGTIPRLRLHA

SEQ ID NO: 60711 - DNA, 1056 bp, Unknown
  Obtained from environmental sample
  misc_feature (1)..(1056): n is a, c, g, or t
atggtacaaaaagtaacactccaaattgccggcaaagaccttgttcttgaaaccggcagaatcgcaagacaggcaaacggcgcggttttcgcgcagtacgcgggatcagccgttatcgcgactgtctgctcatcttcggaaccggtggaggggctggattacgttccccttacggttgattacaatgaaaaatactatgctgcgggaaagatccccggaggcttcatcaagcgggaaagccggcccaaggacaaggaaatcctcgtcagccgccttatcgaccgcccaatgcgcccgcttttcgagaaagctttcggcagggagatacagcttatccctaccacgctctcgaccgatcaggtaaacccgccggacatgctggcgataatcgccgcgtccgcggcggtgcatatttcggacattccctttaacggccccattgcaggggtgcgtgtctgccaggtggacggcgagttggtggtcaatcctacttatgaacagattgaaaaatccacaatggaaattgtcgtcgccggaacaaaagacggcataacaatggttgagggcggggcaaaagaggtcagtgaggatctgatgatacaggccctggacaaagctcataatatgatcaaggagttatgcgcttttcaggaaaagctccgtgagcttgccggcaagcctaaactttcgctgactgtccctacccatgttcttgaaaacagcgacgctatccgcagcgcggcatacccgaaacttgaaaaagcctgtttcctcgctaccaagcaggaacgccatgacggcattagagctatacaagcggaatttgcagcgcagtacgcggcccagcttgaggatgaaaaacagaaaaaacttttcaacgccctgttcgaggatatgcagtataacatcctccgttcttcgatacttaacagcggccgccgtgttgacggacgcggtaccgaggacatacgcaatattacctgcgaggtggaaatactcgccagaacacacggatcggcgctctttacccgcggtgaaaacaagctctggttgtaa

SEQ ID NO: 60712 - protein, 351 aa, Unknown
  Obtained from environmental sample
  DOMAIN (145)...(209): 3' exoribonuclease family, domain 2
  misc_feature (1)..(351): Xaa is any amino acid
MVQKVTLQIAGKDLVLETGRIARQANGAVFAQYAGSAVIATVCSSSEPVEGLDYVPLTVDYNEKYYAAGKIPGGFIKRESRPKDKEILVSRLIDRPMRPLFEKAFGREIQLIPTTLSTDQVNPPDMLAIIAASAAVHISDIPFNGPIAGVRVCQVDGELVVNPTYEQIEKSTMEIVVAGTKDGITMVEGGAKEVSEDLMIQALDKAHNMIKELCAFQEKLRELAGKPKLSLTVPTHVLENSDAIRSAAYPKLEKACFLATKQERHDGIRAIQAEFAAQYAAQLEDEKQKKLFNALFEDMQYNILRSSILNSGRRVDGRGTEDIRNITCEVEILARTHGSALFTRGENKLWL

SEQ ID NO: 60713 - DNA, 492 bp, Unknown
  Obtained from environmental sample
  misc_feature (1)..(492): n is a, c, g, or t
atgagctttgtccagggcctgtatcatcagatcctcactgacctcttttgccccgccctcaaccattgttatgccgtcttttgttccggcgacgacaatttccattgtggatttttcaatctgttcataagtaggattgaccaccaactcgccgtccacctggcagacacgcacccctgcaatggggccgttaaagggaatgtccgaaatatgcaccgccgcggacgcggcgattatcgccagcatgtccggcgggtttacctgatcggtcgagagcgtggtagggataagctgtatctccctgccgaaagctttctcgaaaagcgggcgcattgggcggtcgataaggcggctgacgaggatttccttgtccttgggccggctttcccgcttgatgaagcctccggggatctttcccgcagcatagtatttttcattgtaatcaaccgtaaggggaacgtaatccagcccctccaccggttccgaagatga

SEQ ID NO: 60714 - protein, 163 aa, Unknown
  Obtained from environmental sample
  misc_feature (1)..(163): Xaa is any amino acid
MSFVQGLYHQILTDLFCPALNHCYAVFCSGDDNFHCGFFNLFISRIDHQLAVHLADTHPCNGAVKGNVRNMHRRGRGDYRQHVRRVYLIGRERGRDKLYLPAESFLEKRAHWAVDKAADEDFLVLGPAFPLDEASGDLSRSIVFFIVINRKGNVIQPLHRFRR

SEQ ID NO: 60715 - DNA, 1152 bp, Unknown
  Obtained from environmental sample
  misc_feature (1)..(1152): n is a, c, g, or t
gtgtttgacgagcaggtgtttgacgacatcgaaggcgacaagcgggaacattttatgctccattacaatttcccaccatattcggtgggcgaagtcggcaggctgggaacaggccgccgcgagataggccacggaaatctggcccgccgttcgctggaagccgtggttccctcaaaagaggaattcccctacacagtgcgtgtggtttcagagataatggagtcaaacggctcctcgtcaatggcctcggtttgcggcgggactctttcaatgctccacgccggagtgcctttgaaaaaacctgtggcgggtatcgcgatggggcttatcacagaaggcgcgggaaaagcgggtgaccgttacgccgtgttatctgacattctgggcgaggaagaccacctgggcgacatggactttaaggtcgccggcaccgaggacggcataaccggttttcagatggatataaaaatcgccggtgtcagcccggaaattatgcgtaaggctttggatcaggccaaacgcggcaggatgcacatcctctcgattatgaacaagacgatcagccgcccggctgaagagatcagcgaatacgcgcccaagatcgttaccctgcgtattgatatcgacaaaataggcaccctcataggccccggcggcaagaacataaaggccctgtgcgagcagtacagcgtaaagatcaatactgaagacgacggcactgtaacaatctttggcaaaaataccaaagacgcggaagaagccaaaatcgccgttatgggcgttacatcagacccggaaatgggcagggtgtacaacggcactgtaaaacggattatggatttcggcgcttttgtggagattctgcccggcagggaagggctggttcatatcagcaaactttcccgccagcgcatagccaatgtcaccgacgtgctgaaggaagggcaggagattcccgttaagcttaccgaaattgataaaatgggcaggcttaacctttcgtatattgacgccatcgacccggatggcgccgattccagcggtgctaacagcggctctcacggatcaagcgctcatagcggcggtcattcagaaaaccgtcacgacaacaggggatttaataaatccggcagggatcgtccccggcattaa

SEQ ID NO: 60716 - protein, 383 aa, Unknown
  Obtained from environmental sample
  DOMAIN (2)...(97): 3' exoribonuclease family, domain 1
  misc_feature (1)..(383): Xaa is any amino acid
MFDEQVFDDIEGDKREHFMLHYNFPPYSVGEVGRLGTGRREIGHGNLARRSLEAVVPSKEEFPYTVRVVSEIMESNGSSSMASVCGGTLSMLHAGVPLKKPVAGIAMGLITEGAGKAGDRYAVLSDILGEEDHLGDMDFKVAGTEDGITGFQMDIKIAGVSPEIMRKALDQAKRGRMHILSIMNKTISRPAEEISEYAPKIVTLRIDIDKIGTLIGPGGKNIKALCEQYSVKINTEDDGTVTIFGKNTKDAEEAKIAVMGVTSDPEMGRVYNGTVKRIMDFGAFVEILPGREGLVHISKLSRQRIANVTDVLKEGQEIPVKLTEIDKMGRLNLSYIDAIDPDGADSSGANSGSHGSSAHSGGHSENRHDNRGFNKSGRDRPRH

SEQ ID NO: 60717 - DNA, 507 bp, Unknown
  Obtained from environmental sample
  misc_feature (1)..(507): n is a, c, g, or t
atggcgaaaaaactaacgcagatacaaactatgatttacgaaattcgcggacagaaagttatgcttgatattgatcttgctgtattgtatcaagtggaaacaaaaaatcttaatagaacagtaaaaagacataaaaaacgttttccggctgattttatgtttcagcttacaaaaaaagaatttgaaaacttgaggtgccaatttggcacctcaagttggggtgggttaaggtatttgccttacgcatttaccgaacaagggatagcgatgctttcgggacttttgaatagcgatattgcaataaaagtaaatatcaatattatgcggacttttgtacagttaagacattatgtgcttgataaatcaggtacaaatgaacaaatagcggaacttcgcaaactgcttatgctctacatcgaaaaaaatgataaaagagtgaatgaaataattattgctctcaataaccttattgaaaaaccgccgaagactaaaagaatcggtttttaa

SEQ ID NO: 60718 - protein, 168 aa, Unknown
  Obtained from environmental sample
  misc_feature (1)..(168): Xaa is any amino acid
MAKKLTQIQTMIYEIRGQKVMLDIDLAVLYQVETKNLNRTVKRHKKRFPADFMFQLTKKEFENLRCQFGTSSWGGLRYLPYAFTEQGIAMLSGLLNSDIAIKVNINIMRTFVQLRHYVLDKSGTNEQIAELRKLLMLYIEKNDKRVNEIIIALNNLIEKPPKTKRIGF

SEQ ID NO: 60719 - DNA, 807 bp, Unknown
  Obtained from environmental sample
  misc_feature (1)..(807): n is a, c, g, or t
atgaaaactacggagcggatacgattttgtcgggggcgcagccgatctatgtgcctctgcgtccgccctttgttcactttgacgcaattgaatttggaagccgcttttaaacagcgccccaaagctttgatactttgcaatcctgccaacccctgcggcaaagtatttactaaagacgaattaacagtaatcgccgatcttgcgaaaaaatatgacgcatatatcattaccgatgaagtgtatgagcatattgtttacgctccccatacccatacctacattgcgtccctgcccgatatgttcgagaggacgatttcctgcagttcgctttcaaaaacttattcgattacaggctggcggttgggatatatcatcgcttcggaagaaattattgaagtggcaaaaaaggtacacgattttttgacagtgggcgcggcggctcctctgcaggaagcggcggttgtgggactgcgttttcccgccgcatactacgaaaaactgttacgtgaatataccgagagacggcagctttttttgaaagggttagacgatctcggcatacagcacacaaatcctgaaggcgcatattatgtaatgcttgatatttccgaatacggctataagagcgatttggatttttgcgaaaagttagctgaaaaggtaggcgtaggagcggttcccggttccagttttttccgagaagacgtaaacaacttgatacgtttccattttgcaaagaagaacgatactctttatgaagcgttgaatagattggaaaaaatgagggagagaatgcgaagaaattaa

SEQ ID NO: 60720 - protein, 268 aa, Unknown
  Obtained from environmental sample
  DOMAIN (1)...(258): Aminotransferase class I and II
  misc_feature (1)..(268): Xaa is any amino acid
MKTTERIRFCRGRSRSMCLCVRPLFTLTQLNLEAAFKQRPKALILCNPANPCGKVFTKDELTVIADLAKKYDAYIITDEVYEHIVYAPHTHTYIASLPDMFERTISCSSLSKTYSITGWRLGYIIASEEIIEVAKKVHDFLTVGAAAPLQEAAVVGLRFPAAYYEKLLREYTERRQLFLKGLDDLGIQHTNPEGAYYVMLDISEYGYKSDLDFCEKLAEKVGVGAVPGSSFFREDVNNLIRFHFAKKNDTLYEALNRLEKMRERMRRN

SEQ ID NO: 60721 - DNA, 471 bp, Unknown
  Obtained from environmental sample
  misc_feature (1)..(471): n is a, c, g, or t
atgcataagttatcagacaggacggcggggtttaccgattcggttattcgcagaatgacccgtatttcgctcaaacacggggcggtcaacctttcgcaggggttcccagatttcgacccgccaaaggaaattttagaccgattggctgaaattgcgcatacgggaccgcatcaatattccattacatggggcgctcaaaatttccgtgaggctctttccgataaacagtcaaaattgatgggcaggcaaattgaccctcagcgtgaaatcgttgtaacttgcggcagtaccgaagcgatgatggcggcgatgatgactgtcgcaaatcccggcgacaaggtgatagtgttctcgccgttttatgaaaactacggagcggatacgattttgtcgggggcgcagccgatctatgtgcctctgcgtccgccctttgttcactttgacgcaattgaatttggaagccgcttttaa

SEQ ID NO: 60722 - protein, 156 aa, Unknown
  Obtained from environmental sample
  misc_feature (1)..(156): Xaa is any amino acid
MHKLSDRTAGFTDSVIRRMTRISLKHGAVNLSQGFPDFDPPKEILDRLAEIAHTGPHQYSITWGAQNFREALSDKQSKLMGRQIDPQREIVVTCGSTEAMMAAMMTVANPGDKVIVFSPFYENYGADTILSGAQPIYVPLRPPFVHFDAIEFGSRF

SEQ ID NO: 60723 - DNA, 684 bp, Unknown
  Obtained from environmental sample
  misc_feature (1)..(684): n is a, c, g, or t
ttggaaacctccgctattccggtattagtactctttggtccgacagcgtcaggtaaaacaggcatactccttcaacttttcaactctcaatccaacttacaagccgaggttatttccgccgattccatgcaagtctacagaggcatgaacatcgggacagccaagccttccgctgatgaaagagcgaaacttccccaccatttaatcgatatccgagacccttcggaacaatttaacgcaggcgattttgtccgtcttgccgatgaagcttgcgctgaaattgcctctcgaggaaaactccctgtggtgtcgggggggacgggtttttacttaaaaaactttattttaggattgagcgaagcaccccccggcgacaaaataatccgtgaacaattaaagcgtgaattaagcgaaaaaggcgctgcgtctctaatggaagaacttgcctcctgcgacaacgtcagcgcaaatcgtattcacataaatgacgagtaccgtcttcttcgcgctctggaagtttaccgctcctgcggcaagcccctatcatcgtttgaagtcaacgtcgataaaaaccgtcccaaattcaattttcttatcatcggtctttcgcgcccaagagaagaattataccgccgcataaacttacgctgcgctgatatgtcaaacaaggtctgccgccagtaa

SEQ ID NO: 60724 - protein, 227 aa, Unknown
  Obtained from environmental sample
  SIGNAL (1)...(18)
  DOMAIN (43)...(227): IPP transferase
  misc_feature (1)..(227): Xaa is any amino acid
METSAIPVLVLFGPTASGKTGILLQLFNSQSNLQAEVISADSMQVYRGMNIGTAKPSADERAKLPHHLIDIRDPSEQFNAGDFVRLADEACAEIASRGKLPVVSGGTGFYLKNFILGLSEAPPGDKIIREQLKRELSEKGAASLMEELASCDNVSANRIHINDEYRLLRALEVYRSCGKPLSSFEVNVDKNRPKFNFLIIGLSRPREELYRRINLRCADMSNKVCRQ

SEQ ID NO: 60725 - DNA, 2235 bp, Unknown
  Obtained from environmental sample
  misc_feature (1)..(2235): n is a, c, g, or t
atggctagtaataaaaaaccttcgatatactctgatcgcgcaaacattggaagcgcaaaagatctggatgaatacggcgtatgggtaaagagcgaacctcaagttcttagtgattccgacggtgtatcttccgatcttagtatttcttcctcgggaaaatcatccagcagcgatgaatcattaacttttgacgacgcggtatttgatgttagtgaagcctcggcgcaatcccaaaccgaaaatgttgaattccctgatgacgacatagacattgatcttgaagacgatcctttaacttccaaagaagatttagccgatctcagtatgccttccgacgacagtctcggcgttacatctgaaaacgaagatatcgaaatagaagacacttcttttgatgaatttgaagttcctccgcaagaagaagaggaagcaaccgacaaagaaattgatgatttcagcgacgacagtttagacatagatgatattgacagcggagcggacaacgatgaatttgacacagaggatttaagcgtcccaactgtaaaagcaatcgaaaacaacattgacgccgtatccgacgatttagacgccgcagcgggcgatagtaatgtttcaacccaccttcttaaacaaatcgccacagagctttcgtcaatcagaaacgaacttacagaacttaaaaaagaatttgccaatatccgatctgctactcccgcgggagaagaaaaaaccgacgaaggcggcggattcttctccgatgacgaggatgaaactctttctcttaccggcgatgaacttaacaacatattaagttcaggcggcgctatggaagagggcgtaccggaaaccattgatgatgaagatgacgaaacaatttcgcttacgggcgatgaaatggacaacatccttaactcggcggattttactgaagagtcgggaaccgaggaaacgccggtagatgattcttcccttgatgttgataatattgatatcgacattgatacaaacgaaacaacagaagagcagactgaaactgacactgcgtcagatgacgccgctcttgccacagacgactttgccgacgtttcgttagacgatacagcctcaactgacactgcggcggacgacgctcttgctacagacgactttgccgacgtttcattagacgataccgcgttaactgacactgcggcggacgacgctcttgctacagacgactttgccgacgtttcattagacgatactgcgtcaaccgacattgtggcggacgacgctgctcttgccacagacgactttgcggatgtttcgttagacgatacagcgtcaactgacgctgcggcggacgacgacgctcttgccacagacgactttgcggacgtttcgttagacgatacagcgttaactgacactgcggcagacgacgacgctcttgctacagacgactttgccgatgtttcgttagacgatacagcgttaactgacactgcggcagacgacgacgctcttgctacagacgactttgccgatgtttcgttagacgatacagcgttaactgacactgcggcagacgacgctgatcttgcttcagatgactttgccgacgtttcgttagacgatacagcgtcaactgacattgcggcagacgacgacgctcttgctacggacgattttgcggatatttcctctactgaccttgcgtcagaggaaacaacagaagaacagattgaaactgacattacggcagacgacgctgatcttgcttcagatgactttgccggcatttcattagacgataccgcactggacgctgaccttgctacagatgattttgccgacatttcatcttctgacgacgctttgtcagaagacgctctttcagccgatgctttatcggacgacgctctctcaactgacgatctgtcggatgatgctctttcggcagatgctttatcggacgacgctctttcaactgacgatttgtcggatgacacttcttcaactgaccttgcgtcagacgacgctgatcttgcctcagatgactttgccgatattacactagacgacaccgcgctgggcactgaccttgccgcggatgatttttccgatatttcgtcaactgacgatgcttcttctactgacctcgcgtcagatgacctagcgttagatgacattggagcagatgctccggcggcagatgacgattccgcacaggatcccgacctttgcaatggatga

SEQ ID NO: 60726 - protein, 744 aa, Unknown
  Obtained from environmental sample
  misc_feature (1)..(744): Xaa is any amino acid
MASNKKPSIYSDRANIGSAKDLDEYGVWVKSEPQVLSDSDGVSSDLSISSSGKSSSSDESLTFDDAVFDVSEASAQSQTENVEFPDDDIDIDLEDDPLTSKEDLADLSMPSDDSLGVTSENEDIEIEDTSFDEFEVPPQEEEEATDKEIDDFSDDSLDIDDIDSGADNDEFDTEDLSVPTVKAIENNIDAVSDDLDAAAGDSNVSTHLLKQIATELSSIRNELTELKKEFANIRSATPAGEEKTDEGGGFFSDDEDETLSLTGDELNNILSSGGAMEEGVPETIDDEDDETISLTGDEMDNILNSADFTEESGTEETPVDDSSLDVDNIDIDIDTNETTEEQTETDTASDDAALATDDFADVSLDDTASTDTAADDALATDDFADVSLDDTALTDTAADDALATDDFADVSLDDTASTDIVADDAALATDDFADVSLDDTASTDAAADDDALATDDFADVSLDDTALTDTAADDDALATDDFADVSLDDTALTDTAADDDALATDDFADVSLDDTALTDTAADDADLASDDFADVSLDDTASTDIAADDDALATDDFADISSTDLASEETTEEQIETDITADDADLASDDFAGISLDDTALDADLATDDFADISSSDDALSEDALSADALSDDALSTDDLSDDALSADALSDDALSTDDLSDDTSSTDLASDDADLASDDFADITLDDTALGTDLAADDFSDISSTDDASSTDLASDDLALDDIGADAPAADDDSAQDPDLCNG

SEQ ID NO: 60727 - DNA, 2319 bp, Unknown
  Obtained from environmental sample
  misc_feature (1)..(2319): n is a, c, g, or t
ttgataattccggctcgtcaattaccgcgtctgacaaatcaagcgagtcattttcaagatactcgctgttttcaggagtttctgttatgggtactgcgccttcttcgcgcaatttgtccaattcattgctttcttgagcattggcgattgtttcagtatcttcttgcgaaatgtcggcaaaatcatccattgcaaaggtcgggatcctgtgcggaatcgtcatctgccgccggagcatctgctccaatgtcatctaacgctaggtcatctgacgcgaggtcagtagaagaagcatcgtcagttgacgaaatatcggaaaaatcatccgcggcaaggtcagtgcccagcgcggtgtcgtctagtgtaatatcggcaaagtcatctgaggcaagatcagcgtcgtctgacgcaaggtcagttgaagaagtgtcatccgacaaatcgtcagttgaaagagcgtcgtccgataaagcatctgccgaaagagcatcatccgacagatcgtcagttgagagagcgtcgtccgataaagcatcggctgaaagagcgtcttctgacaaagcgtcgtcagaagatgaaatgtcggcaaaatcatctgtagcaaggtcagcgtccagtgcggtatcgtctaatgaaatgccggcaaagtcatctgaagcaagatcagcgtcgtctgccgtaatgtcagtttcaatctgttcttctgttgtttcctctgacgcaaggtcagtagaggaaatatccgcaaaatcgtccgtagcaagagcgtcgtcgtctgccgcaatgtcagttgacgctgtatcgtctaacgaaacgtcggcaaagtcatctgaagcaagatcagcgtcgtctgccgcagtgtcagttaacgctgtatcgtctaacgaaacatcggcaaagtcgtctgtagcaagagcgtcgtcgtctgccgcagtgtcagttaacgctgtatcgtctaacgaaacatcggcaaagtcgtctgtagcaagagcgtcgtcgtctgccgcagtgtcagttaacgctgtatcgtctaacgaaacgtccgcaaagtcgtctgtggcaagagcgtcgtcgtccgccgcagcgtcagttgacgctgtatcgtctaacgaaacatccgcaaagtcgtctgtggcaagagcagcgtcgtccgccacaatgtcggttgacgcagtatcgtctaatgaaacgtcggcaaagtcgtctgtagcaagagcgtcgtccgccgcagtgtcagttaacgcggtatcgtctaatgaaacgtcggcaaagtcgtctgtagcaagagcgtcgtccgccgcagtgtcagttgaggctgtatcgtctaacgaaacgtcggcaaagtcgtctgtggcaagagcggcgtcatctgacgcagtgtcagtttcagtctgctcttctgttgtttcgtttgtatcaatgtcgatatcaatattatcaacatcaagggaagaatcatctaccggcgtttcctcggttcccgactcttcagtaaaatccgccgagttaaggatgttgtccatttcatcgcccgtaagcgaaattgtttcgtcatcttcatcatcaatggtttccggtacgccctcttccatagcgccgcctgaacttaatatgttgttaagttcatcgccggtaagagaaagagtttcatcctcgtcatcggagaagaatccgccgccttcgtcggttttttcttctcccgcgggagtagcagatcggatattggcaaattcttttttaagttctgtaagttcgtttctgattgacgaaagctctgtggcgatttgtttaagaaggtgggttgaaacattactatcgcccgctgcggcgtctaaatcgtcggatacggcgtcaatgttgttttcgattgcttttacagttgggacgcttaaatcctctgtgtcaaattcatcgttgtccgctccgctgtcaatatcatctatgtctaaactgtcgtcgctgaaatcatcaatttctttgtcggttgcttcctcttcttcttgcggaggaacttcaaattcatcaaaagaagtgtcttctatttcgatatcttcgttttcagatgtaacgccgagactgtcgtcggaaggcatactgagatcggctaaatcttctttggaagttaaaggatcgtcttcaagatcaatgtctatgtcgtcatcagggaattcaacattttcggtttgggattgcgccgaggcttcactaacatcaaataccgcgtcgtcaaaagttaatgattcatcgctgctggatgattttcccgaggaagaaatactaagatcggaagatacaccgtcggaatcactaagaacttga

SEQ ID NO: 60728 - protein, 772 aa, Unknown
  Obtained from environmental sample
  misc_feature (1)..(772): Xaa is any amino acid
MIIPARQLPRLTNQASHFQDTRCFQEFLLWVLRLLRAICPIHCFLEHWRLFQYLLAKCRQNHPLQRSGSCAESSSAAGASAPMSSNARSSDARSVEEASSVDEISEKSSAARSVPSAVSSSVISAKSSEARSASSDARSVEEVSSDKSSVERASSDKASAERASSDRSSVERASSDKASAERASSDKASSEDEMSAKSSVARSASSAVSSNEMPAKSSEARSASSAVMSVSICSSVVSSDARSVEEISAKSSVARASSSAAMSVDAVSSNETSAKSSEARSASSAAVSVNAVSSNETSAKSSVARASSSAAVSVNAVSSNETSAKSSVARASSSAAVSVNAVSSNETSAKSSVARASSSAAASVDAVSSNETSAKSSVARAASSATMSVDAVSSNETSAKSSVARASSAAVSVNAVSSNETSAKSSVARASSAAVSVEAVSSNETSAKSSVARAASSDAVSVSVCSSVVSFVSMSISILSTSREESSTGVSSVPDSSVKSAELRMLSISSPVSEIVSSSSSSMVSGTPSSIAPPELNMLLSSSPVRERVSSSSSEKNPPPSSVFSSPAGVADRILANSFLSSVSSFLIDESSVAICLRRWVETLLSPAAASKSSDTASMLFSIAFTVGTLKSSVSNSSLSAPLSISSMSKLSSLKSSISLSVASSSSCGGTSNSSKEVSSISISSFSDVTPRLSSEGILRSAKSSLEVKGSSSRSMSMSSSGNSTFSVWDCAEASLTSNTASSKVNDSSLLDDFPEEEILRSEDTPSESLRT

SEQ ID NO: 60729 - DNA, 702 bp, Unknown
  Obtained from environmental sample
  misc_feature (1)..(702): n is a, c, g, or t
atgacattggagcagatgctccggcggcagatgacgattccgcacaggatcccgacctttgcaatggatgattttgccgacatttcgcaagaagatactgaaacaatcgccaatgctcaagaaagcaatgaattggacaaattgcgcgaagaaggcgcagtacccataacagaaactcctgaaaacagcgagtatcttgaaaatgactcgcttgatttgtcagacgcggtaattgacgagccggaattatcaactgaccatattaaagacgacatagcggaaccttctttggacgaagaagattttgacatggattcttttgataatttatcaattgattccgataatctggacgatttttcttctcttgacgatacagcggaacagccggaagaagaagcgcccgctccgcagcctgccgcaaaagctcctccgcccgttcaggaagtttcacagccgatgcctcaacaacccgcgcctcaagccgcttccgcttccgcatctgcaggaggaggcggacagccgaccgacggtaaaactccgtttgtccttccttcaggtttaaggtcagagcttagaaatattttaagctacatggatcagcttcttgaatcattaccggaagaaaaaatcgaagaattcgcaaaatcagaatacttcgattccctacagaaactctttaaggatttggggctggtataa

SEQ ID NO: 60730 - protein, 233 aa, Unknown
  Obtained from environmental sample
  misc_feature (1)..(233): Xaa is any amino acid
MTLEQMLRRQMTIPHRIPTFAMDDFADISQEDTETIANAQESNELDKLREEGAVPITETPENSEYLENDSLDLSDAVIDEPELSTDHIKDDIAEPSLDEEDFDMDSFDNLSIDSDNLDDFSSLDDTAEQPEEEAPAPQPAAKAPPPVQEVSQPMPQQPAPQAASASASAGGGGQPTDGKTPFVLPSGLRSELRNILSYMDQLLESLPEEKIEEFAKSEYFDSLQKLFKDLGLV

SEQ ID NO: 60731 - DNA, 948 bp, Unknown
  Obtained from environmental sample
  misc_feature (1)..(948): n is a, c, g, or t
ttgaaaaacaccctgatgctgttgaatatcccctacgcgtgcgaggacttaaacggttttttttacgggggtccggtggacgatcttatgtccgtcctccggctcgccgcctacccgaaagacagcgccgcctacgcgcagatgctgcgctcgccttttgccggcctttccatgcaggggcttgcgctatgcgctcccttagtcgcagcgagcgcgggtaccggcaaggccgccgttcctttcggcgacgagccgctatcccggctttccgaagatgacaggatcaagtacacgcgcgggaagcgcatttatcaaaaaattcttgacatagcgcaaaaagaaagcatcagttccctggtgagcgaattgtggtatggggaaggctatcgctatgaaaccgaatggaatcccagaacggccgcttaccgggaattgtacgattaccttttccatcttgcggccctggccgatgaaaaaaatcagggtctcgcggaattcaccgattacatacaaagcctgtacaatgccggtgaacggttaagcgatattgaaatcccgctggaacgcccgagcgcggtgcgccttatcaccatacataaaagcaaggggcttgaattcccggtggtcttcctctgttgctgcgataaaaaaggcaaacccgattccagcggcgatttgtactataccgatgattcgggcctgacgttcacgccccctctgccgcgggaatacagtgataacggatatgttaaacgcagttacttttgggaacgctctcaggcgcttaggaaggacaaaagaacggcggaactgcgccgccttctctatgtcggcatgacacgggcggaaaacgaattgttcctttcaggctgccttggcatcagcaaggtcgttggcccggaaaacggaggccaagactctgatgttgaaaaattttcacggatataa

SEQ ID NO: 60732 - protein, 315 aa, Unknown
  Obtained from environmental sample
  misc_feature (1)..(315): Xaa is any amino acid
MKNTLMLLNIPYACEDLNGFFYGGPVDDLMSVLRLAAYPKDSAAYAQMLRSPFAGLSMQGLALCAPLVAASAGTGKAAVPFGDEPLSRLSEDDRIKYTRGKRIYQKILDIAQKESISSLVSELWYGEGYRYETEWNPRTAAYRELYDYLFHLAALADEKNQGLAEFTDYIQSLYNAGERLSDIEIPLERPSAVRLITIHKSKGLEFPVVFLCCCDKKGKPDSSGDLYYTDDSGLTFTPPLPREYSDNGYVKRSYFWERSQALRKDKRTAELRRLLYVGMTRAENELFLSGCLGISKVVGPENGGQDSDVEKFSRI

SEQ ID NO: 60733 - DNA, 1797 bp, Unknown
  Obtained from environmental sample
  misc_feature (1)..(1797): n is a, c, g, or t
ttgatgatttgccaggccagaatccaaactcttgattcctacagcgccgccattgtcaaacaggcggcaaatcgttatggaatcagcccggagttttcaattgatgaggaacgctgtctccggcttgcccatgatgaggcaatgtctttttttatttcaaaacgcggccacccggcaatacaaaggctttaccccaataaaagtccggtatccatcgcaaatgatatttttgcttccggtttgtttaattacacccatatcgacatacagcccaatccggagaaggattttaccagacaatgcgatacaatttgcagtgaatgggaaaaacatagcgggcagataatcagcatactgcaaaaaattaacgaagcaaacacaaaagatgagaagctccttcctgatcttgcgcttgttataagcccatttaccctgggcaaagttatttttccggatgtatgtgaactcggcgaatattttgaacagcttgcggcaatcccccacgattcaattatcaaatggacggattcacacccgctgcaaacaacgttaacaaatgtcatgaattttcttttatctttgatttctcttaatttactaaaaggcaaaaggcagaataatcccgtaaaagaattgataaaagaattacgtgttatatttaagggattttcgtcaatattggttttttgtatacaggctgggctgacctgttcaatactaaaactgttatccgatcttcaacattgttaccttgacaggaaacgggttgaaggtgttttaacatataccgatgtcgcccgcctcgcgaagaccattcttatagagcagaaagacatccggcaaagcgaaaaagaatcgtttaaagcggttatgatagatgaatttcaggataacaacgaattgcaaaaagacctgctttttcttatagctgagaaaacggatattgccaataccacggtgccgtcggcgaaagacctttcccccgggaaacttttttttgtgggcgatgaaaaacagtccgtgtaccttttccgcggggctgatgtttccgtgtttcgtaaattaaaaagcgaactgggcagctcggatcttccccttaaaacaaactatcgttccgcgcctgttctgatcggcgcgtttaatactcttttcggaggttataaatttgacccggaaggaaaagcgccagagtcggcgcctacagcgaagggagaaaaagcccccgccatattcgcacctcccgacggtctgccgccgtttgaagcgtctttttccccgctgaacgccaacaaaaaaaacggagggaaaataaccctatgtatattggacaaacaagcatcatcggaagacgatccatccgatgattcagaagagcgtttgacacccgaggaaaacgaggcgcgttatgtcgcatggcgaatcggagaactgctgaaagacaaaaacgagacaggcgaatttaaataccggcccggcgatatagccattctttttcgtacccgcagtccacagtatctgtttgaaaaacaccctgatgctgttgaatatcccctacgcgtgcgaggacttaaacggttttttttacgggggtccggtggacgatcttatgtccgtcctccggctcgccgcctacccgaaagacagcgccgcctacgcgcagatgctgcgctcgccttttgccggcctttccatgcaggggcttgcgctatgcgctcccttagtcgcagcgagcgcgggtaccggcaaggccgccgttcctttcggcgacgagccgctatcccggctttccgaagatga

SEQ ID NO: 60734 - protein, 598 aa, Unknown
  Obtained from environmental sample
  DOMAIN (65)...(596): UvrD/REP helicase
  misc_feature (1)..(598): Xaa is any amino acid
MMICQARIQTLDSYSAAIVKQAANRYGISPEFSIDEERCLRLAHDEAMSFFISKRGHPAIQRLYPNKSPVSIANDIFASGLFNYTHIDIQPNPEKDFTRQCDTICSEWEKHSGQIISILQKINEANTKDEKLLPDLALVISPFTLGKVIFPDVCELGEYFEQLAAIPHDSIIKWTDSHPLQTTLTNVMNFLLSLISLNLLKGKRQNNPVKELIKELRVIFKGFSSILVFCIQAGLTCSILKLLSDLQHCYLDRKRVEGVLTYTDVARLAKTILIEQKDIRQSEKESFKAVMIDEFQDNNELQKDLLFLIAEKTDIANTTVPSAKDLSPGKLFFVGDEKQSVYLFRGADVSVFRKLKSELGSSDLPLKTNYRSAPVLIGAFNTLFGGYKFDPEGKAPESAPTAKGEKAPAIFAPPDGLPPFEASFSPLNANKKNGGKITLCILDKQASSEDDPSDDSEERLTPEENEARYVAWRIGELLKDKNETGEFKYRPGDIAILFRTRSPQYLFEKHPDAVEYPLRVRGLKRFFLRGSGGRSYVRPPARRLPERQRRLRADAALAFCRPFHAGACAMRSLSRSERGYRQGRRSFRRRAAIPAFRR

SEQ ID NO: 60735 - DNA, 393 bp, Unknown
  Obtained from environmental sample
  misc_feature (1)..(393): n is a, c, g, or t
atgaacggccttatctacgccacccgcatcctcggttatgtcaatgccccggccctgatgcagcgcattgtggcggagcttaccgaagcaaaggttgacgtaaacatatacgccagcaggcgcgacgcgttcacggcgatcctcaatgatgccggaatagagtatgccgtgccggaaggagcgttctacctgttctgcaaggtaccctcgaaaaaaggcggcggttcaggcgacgatttggaatttgtaaaccacttaaaaaattacttgattctgggcgttcccggatcaggtttcggcaaacccggctggctgcgtttcgcgtactgcgtggatgaaaaaaacatccgcgccagcgcagaggccttcaagcgagcgatggaagaatggtaa

SEQ ID NO: 60736 - protein, 130 aa, Unknown
  Obtained from environmental sample
  misc_feature (1)..(130): Xaa is any amino acid
MNGLIYATRILGYVNAPALMQRIVAELTEAKVDVNIYASRRDAFTAILNDAGIEYAVPEGAFYLFCKVPSKKGGGSGDDLEFVNHLKNYLILGVPGSGFGKPGWLRFAYCVDEKNIRASAEAFKRAMEEW

SEQ ID NO: 60737 - DNA, 1200 bp, Unknown
  Obtained from environmental sample
  misc_feature (1)..(1200): n is a, c, g, or t
atgacagaatacattgaaccaaaagtactaaaaggtttcagggattttcttccgcaggcggaaattgtccgacgcggacttgttgaaaagatagagtcaagtttccgctctttcggccttgtgccgattgacaccccagcgcttgaatattcggaaattttgcttggcaagggcggcggagagacggaaaagcaaatttaccgttttaaggacaatggagagcgagatgtcgcccttcgatttgacttgacagtccccttcgcgcgttttacggcaatgcacagcgcggaacttaccttccccttcaaacgttatcacataggaaaagtttggcggggcgaaaacacacagcgcggacgctaccgcgaatttatgcagtgcgattttgatataatcgggagcgacagccccgcagcggattttgaaattattctgatgatccgcaacacgcttatggatctgggactcaacgtggatataaaaatcaaccacaggggcctgttcaaccgcttcctctcgcatatagggcagttggaaaattccgttgaaatactccgcactgtagacaaaatttccaaagtcggcatggatgaaacaatgaaaacccttgccggtattgccggggacgcgaacgggaaaaagatacttgaatatatcaacgcgggagcggaggaaaaaacctcctcctttgaacagacgctgaatcgcataacgcagctttcaggtgggccttctcccgaatcggaacgcttacgcctgctccaccggtttatgaaagatacaggggagacattttcccttgatccttcaattacgcgggggcttgattactataccggcgttgtgtttgaaacattcctgaacgatttacccgacatcggctccgtctgttccggcgggcgttacgacaaccttgccggtctgtactccaaagataaaaactcaataagcggggtgggcgcgtccataggcattgaccgccttattgccggtcttgagaaccttaacaaactgcccccttcaagcggatttgccgcggtcgccattagttgcctaaggcaggaagacgcggggttataccaggcccttgccgctcagttccggcgcgccggcatcccctgcgaggtttttacggacgcatccgcggacagagccgcgggcgcggacgacggcaaaaaccttgtcaaacaatttgtttag

SEQ ID NO: 60738 - protein, 399 aa, Unknown
  Obtained from environmental sample
  DOMAIN (23)...(184): tRNA synthetase class II core domain (G, H, P, S and T)
  misc_feature (1)..(399): Xaa is any amino acid
MTEYIEPKVLKGFRDFLPQAEIVRRGLVEKIESSFRSFGLVPIDTPALEYSEILLGKGGGETEKQIYRFKDNGERDVALRFDLTVPFARFTAMHSAELTFPFKRYHIGKVWRGENTQRGRYREFMQCDFDIIGSDSPAADFEIILMIRNTLMDLGLNVDIKINHRGLFNRFLSHIGQLENSVEILRTVDKISKVGMDETMKTLAGIAGDANGKKILEYINAGAEEKTSSFEQTLNRITQLSGGPSPESERLRLLHRFMKDTGETFSLDPSITRGLDYYTGVVFETFLNDLPDIGSVCSGGRYDNLAGLYSKDKNSISGVGASIGIDRLIAGLENLNKLPPSSGFAAVAISCLRQEDAGLYQALAAQFRRAGIPCEVFTDASADRAAGADDGKNLVKQFV

SEQ ID NO: 60739 - DNA, 1011 bp, Unknown
  Obtained from environmental sample
  misc_feature (1)..(1011): n is a, c, g, or t
atgtcggatatcttaaacaaggtttccattatctttttatccgaaagcaaaaaaatagccgaggatactatggcggaaggcgtgcgattaattgccgacatagctgaaattgacaggctgattctttgccgcaatcacatagctgccgacaaattgcacgcgtccgaagtctaccgctgggacagaggttccggaggcagtactgatgtgaccggtatttttgttgatgtgccttacgatcttttaattccggattgggaagaatatttgtcaaaaggaaaacacctaaacggtccgtcaaaaactatgtctgaaagcgcgtctttggcgcttctatcatttaaagtattgtcagccgccgtaatacctatacatgtcaacaatgttttttggggcttcgcgcttttcgccgatatgaaaagtgaacgttattttaaagatgatataattgaaatgctgcgctcggcgtcttttttattcgctaacgctttcatccgcgccgaagtggattatgacgcgcttaccggcattcacaacagacgtttctttgatgaaaacatgaagcgcgtcataagttctttatcccgttcaggcagtttattaagtatgctgatgatcgacattgacttttttaagcgttacaacgatacatacggtcatttggaaggcgataaaagccttaaaattgtcgccgaaactctttccaagagcataacaaggtcggatgattttgttgtcagatacgggggagaagaatttgccattgtccttcccaataccgacgagaacggcgcgtgtataatcgctgagaaacttcttgccaatataatggaatgcaatataccccatgaacaaaacgacgcggcggcctgccttacaatttccatcggagccacaacaggcaaagtgtcgcatacgcatatcccggaagattttgtaaaaaaagccgacgagatgctgtataaatcaaagcaaaacggccgtaatcaatatttctttgatcccatttga

SEQ ID NO: 60740 - protein, 336 aa, Unknown
  Obtained from environmental sample
  DOMAIN (165)...(330): GGDEF domain
  misc_feature (1)..(336): Xaa is any amino acid
MSDILNKVSIIFLSESKKIAEDTMAEGVRLIADIAEIDRLILCRNHIAADKLHASEVYRWDRGSGGSTDVTGIFVDVPYDLLIPDWEEYLSKGKHLNGPSKTMSESASLALLSFKVLSAAVIPIHVNNVFWGFALFADMKSERYFKDDIIEMLRSASFLFANAFIRAEVDYDALTGIHNRRFFDENMKRVISSLSRSGSLLSMLMIDIDFFKRYNDTYGHLEGDKSLKIVAETLSKSITRSDDFVVRYGGEEFAIVLPNTDENGACIIAEKLLANIMECNIPHEQNDAAACLTISIGATTGKVSHTHIPEDFVKKADEMLYKSKQNGRNQYFFDPI

SEQ ID NO: 60741 - DNA, 738 bp, Unknown
  Obtained from environmental sample
  misc_feature (1)..(738): n is a, c, g, or t
atggcgatagtggacgccgacgtgcagatgaacgcgcccaagggactgacaagcgcaagcggcatagacgctgtaacccacgcgctggaagcctacgcctctgtcatggcgacggactacaccgacggtcttgcgatacaagcgctcaaggtaattttcgagtggctgcccatcgcgtacaacgaaggcgcggcgaatcctgtcgcgcgcgaaaagatggcgaacgccgcgacgattgcgggcatggctttcgccaacgcgttcctcggcgtatgccactcgatggcgcacaagctcggcgcgttccatcatctgccccacggcatcgccaacgccctgatgatcagcgaagtgcttcgctacaacgcctgcgaagttcctccgaagatggggtcattccctcaatatgatcatcccaagacattatcccgctacgcgcaaattgcggacgcgctttctctcggcggtaaaaacgatgaggaaaaacttaataacctcatcgccgctgtggaaaaactgaaagatcagatcggtattaagaagacaatcaaagattacggcatagatgaaaaagatttccttgcccgccttgacgacatgagcgaacaggcctttgatgatcaatgtacaggggcgaatccccggtatcctttaattgaggaaatcaagaagatgtatttgaatgtttattatggtaaccaaataacagcgccccgtttaggggcgttgactgaataa

SEQ ID NO: 60742 - protein, 245 aa, Unknown
  Obtained from environmental sample
  DOMAIN (1)...(222): Iron-containing alcohol dehydrogenase
  misc_feature (1)..(245): Xaa is any amino acid
MAIVDADVQMNAPKGLTSASGIDAVTHALEAYASVMATDYTDGLAIQALKVIFEWLPIAYNEGAANPVAREKMANAATIAGMAFANAFLGVCHSMAHKLGAFHHLPHGIANALMISEVLRYNACEVPPKMGSFPQYDHPKTLSRYAQIADALSLGGKNDEEKLNNLIAAVEKLKDQIGIKKTIKDYGIDEKDFLARLDDMSEQAFDDQCTGANPRYPLIEEIKKMYLNVYYGNQITAPRLGALTE

SEQ ID NO: 60743 - DNA, 429 bp, Unknown
  Obtained from environmental sample
  misc_feature (1)..(429): n is a, c, g, or t
ttgtgcaaaagaccgttaagtttttcaattaaaaataccaatgatatgggaattgataattatgaacaagatgaagatatttatgaaatcctgtatctaattcatgaaatcagggatgaaaaaccttactttaaaatactcgttgacaagaaagatattaactcagttgtatgcctgcgtccccgtatgaataacccgcgcattgtcaggcaggacgggtattttttcctgttcggcattcattttgaaaaaaagaattgcgctaaaatcaaccccgattggatagacgacagggaattccttattccgcatgacgcaaagcaaaaaatactgaaagagcttaatatgctgaatattaacgaggcttttgtctatcccgattacgagcatatttcaactgatattaggaataggtacagaaaacaataa

SEQ ID NO: 60744 - protein, 142 aa, Unknown
  Obtained from environmental sample
  misc_feature (1)..(142): Xaa is any amino acid
MCKRPLSFSIKNTNDMGIDNYEQDEDIYEILYLIHEIRDEKPYFKILVDKKDINSVVCLRPRMNNPRIVRQDGYFFLFGIHFEKKNCAKINPDWIDDREFLIPHDAKQKILKELNMLNINEAFVYPDYEHISTDIRNRYRKQ

SEQ ID NO: 60745 - DNA, 828 bp, Unknown
  Obtained from environmental sample
  misc_feature (1)..(828): n is a, c, g, or t
atgaaaaaaggatcaattttcatctttatattatacaccttcctgtatgtttcaggtagtgttcacggagtcggggagaaaactctttctctgggcggagagcagtcgtggaaatacgcgaattacaggttcggtattaccgaagttaagtccgtaaggccgtatcctgtgcttgttctttcttccgccgaccagcctgccgctgtttattcctcggcagtcggagtgtcgggaaatttattgccgctgaaaacgaccgcgccggatttgtccctttcctttgacgaaatacacgcggctttgttttacgacggcgcgggacattattccgttacctcttcgtccaatgttgaggcggtggaacgccgttttgccagagccggaacgggagcggcgcttttcgacgccgacaacccggcaggcgatcctctcgttgtaaaaccgcaaacctcggacgctcttttttcttccggcacccgcattagggattttacaattgaattctggctttatccgcttaaccttgaaaacggcgaacatatattgtcatgggccgcttcggagcttgtgaacaagaattattccattcagcgaattatttgcagcgcgtctaaaaaccgccttcaatggtcttttgataacttttttatgtccccaaaaaattcattaccaatgaaaattgaattttcaggcgacacttatttggttccaaaaaaatggagccaccaccttgtacgttttgactcggtaacaggaatgatgaatacatgtagacggcaagagcgagacgattgtatacgcgacgtctacaggacacgaaagcagtga

SEQ ID NO: 60746 - protein, 275 aa, Unknown
  Obtained from environmental sample
  SIGNAL (1)...(23)
  misc_feature (1)..(275): Xaa is any amino acid
MKKGSIFIFILYTFLYVSGSVHGVGEKTLSLGGEQSWKYANYRFGITEVKSVRPYPVLVLSSADQPAAVYSSAVGVSGNLLPLKTTAPDLSLSFDEIHAALFYDGAGHYSVTSSSNVEAVERRFARAGTGAALFDADNPAGDPLVVKPQTSDALFSSGTRIRDFTIEFWLYPLNLENGEHILSWAASELVNKNYSIQRIICSASKNRLQWSFDNFFMSPKNSLPMKIEFSGDTYLVPKKWSHHLVRFDSVTGMMNTCRRQERDDCIRDVYRTRKQ

SEQ ID NO: 60747 - DNA, 687 bp, Unknown
  Obtained from environmental sample
  misc_feature (1)..(687): n is a, c, g, or t
atgaactgcgcttcaggcagatgcggcaaacgcgctctatgccgtgtttcgaggcagcgggttcacctccgcctccgcgatggtgtttgtcacctacagcccgaacacgataaggcgggtactgtgacgaataaaaagaaaaagaacgaaattaccatacattcaagcgcggcggaatatctcacttatgttgccgccgcaggcggtgataagcgttcctatgaaatgcgctatgaagctgagaatatctggctgacgcaaaaaatgatggcggcgctgtatgacgtgagcgtacccgcaatcaaccagcatttaaaaagagtgtatgatgaccgggagttggaacggggggcaactattaagaaatacttaatagttcaaaacgagggcggaagaaatgtttccagggaagtggagcattataatctccaagccattatcgcagtaggcttcaaaattaacaacgaccatgccgtgcgtttccgcaaatgggcggggcaaattgtaaaggattacactattcagggatgtacggaagcgaagatgcaactgactccgcgatggtcaacttcgggcaggtgtttcgtgcctatagcccgaacattcagaaaggttttttttgcgtggcggaacgctgattcgatggcaaggattgccggttgcgaggcagagcggcagaacgactaa

SEQ ID NO: 60748 - protein, 228 aa, Unknown
  Obtained from environmental sample
  misc_feature (1)..(228): Xaa is any amino acid
MNCASGRCGKRALCRVSRQRVHLRLRDGVCHLQPEHDKAGTVTNKKKKNEITIHSSAAEYLTYVAAAGGDKRSYEMRYEAENIWLTQKMMAALYDVSVPAINQHLKRVYDDRELERGATIKKYLIVQNEGGRNVSREVEHYNLQAIIAVGFKINNDHAVRFRKWAGQIVKDYTIQGCTEAKMQLTPRWSTSGRCFVPIARTFRKVFFAWRNADSMARIAGCEAERQND

SEQ ID NO: 60749 - DNA, 1086 bp, Unknown
  Obtained from environmental sample
  misc_feature (1)..(1086): n is a, c, g, or t
ttgctcgaaggcagcgccaaaggcgtgtccgacgagattatcgggacgtcgcgtatcaacaataacagcagtctgctgctcgacgccggtaagatgaagactatgagcgaagagatcggcaaagataagagctgggcgtttgacggcgcctatatgctggtacggacgaataaagaggcgggcggggagtacaaagccagcaactttatgcttgtggggccggacgggacgcagtataagttcgcggaagccgggtacgctacgcctattggggtgtcggatcttacggcggggactattcttgcggagggcggggatagggctaaagtggcagatgggacagaggcgttgaataacgcggctaactttgatgcggcgggcgatacggtgacgataggcgcggcgcttacggagaaaggtgttactcaggtgggaacagggagtgagttggttgccggttcaagcgttacgctgggtaataacaagttcattactgttgccggcggcgataccgacattctagctacgataaaaaatgtcggcggggttattcaacttattgatggcgatggcacaccgagactaatggccacaatagaagtcggtaaaagtgttactttagacgacggcacggtgctgaaaaacaacggcggaggaaatgtcagcattgagagcggaagcttagttcttgacgatgtgttaaaagtgggaagtggaactggtgatgatgccacagctataaccattgccgcgcagagtactttggattcgactggaggagcaggcgaggagacctcgtgccgctcgtgccgctcgtgccgctcgtgccgtttcattctcgcgcgcaacggcaacatcctaagcgcgggcgcgtatgtgggcaccgggcggcgcaaagcggaaatcacaaaaggattgggcgcgcgccatcaggccgccgcgaatatcaccactgtaaccaaggccatcgccattacggtatccgagacaaacggcatgatctcggttttccagaacgggcacaccgtgttcaccatcgatcccgttatgcgcaatctccgcatccgcgagggcagcccaagctga

SEQ ID NO: 60750 - protein, 361 aa, Unknown
  Obtained from environmental sample
  DOMAIN (223)...(343): Domain of unknown function DUF147
  misc_feature (1)..(361): Xaa is any amino acid
MLEGSAKGVSDEIIGTSRINNNSSLLLDAGKMKTMSEEIGKDKSWAFDGAYMLVRTNKEAGGEYKASNFMLVGPDGTQYKFAEAGYATPIGVSDLTAGTILAEGGDRAKVADGTEALNNAANFDAAGDTVTIGAALTEKGVTQVGTGSELVAGSSVTLGNNKFITVAGGDTDILATIKNVGGVIQLIDGDGTPRLMATIEVGKSVTLDDGTVLKNNGGGNVSIESGSLVLDDVLKVGSGTGDDATAITIAAQSTLDSTGGAGEETSCRSCRSCRSCRFILARNGNILSAGAYVGTGRRKAEITKGLGARHQAAANITTVTKAIAITVSETNGMISVFQNGHTVFTIDPVMRNLRIREGSPS

SEQ ID NO: 60751 - DNA, 543 bp, Unknown
  Obtained from environmental sample
  misc_feature (1)..(543): n is a, c, g, or t
gtgcaaggtattctttctattattcccgacgctgagatagtagattattatgtaaatagttgggacgagcccgccctagcaaaaacacaggcgatgatttggtatgactcgggcgtttatgcgattttttccgcggcgggaaacagcgggaatggaactattgcgcaggcgaaggaataccgcgccatgggcaagaatgtttgggcgataggcgtggattccgatcaatatgaagacgggctttataactcaaaagattccgccgttcttacatcaatgcttaagcgcgtggaaaacagcgttatttatgctttaaatgaggttaaaaataaaacttttaaaccaagcgtcatagtttttgatttgaaagccgatggcgtcggctattccgcaatgaatcccgctctaggcaaaaatattatcgacagattggaacttattaaaacgcaggtctcaaacggaaatattaaggtcgcggcgactcttgcggattcaatgcggctgccgggtttcccgaaaaatttaagggcaattgacgactaa

SEQ ID NO: 60752 - protein, 180 aa, Unknown
  Obtained from environmental sample
  misc_feature (1)..(180): Xaa is any amino acid
MQGILSIIPDAEIVDYYVNSWDEPALAKTQAMIWYDSGVYAIFSAAGNSGNGTIAQAKEYRAMGKNVWAIGVDSDQYEDGLYNSKDSAVLTSMLKRVENSVIYALNEVKNKTFKPSVIVFDLKADGVGYSAMNPALGKNIIDRLELIKTQVSNGNIKVAATLADSMRLPGFPKNLRAIDD

SEQ ID NO: 60753 - DNA, 975 bp, Unknown
  Obtained from environmental sample
  misc_feature (1)..(975): n is a, c, g, or t
ttgacgactaaatttaatagaatagaagataaggttcttgaaatttttacaggctcgaatgccgtaatctccgctttagttgtgtttcttggtttttttgtcgctactttacttattgttttaatcggaaaaaatccgcttgttatgtatcagtctctgctgcaggttgtcagcgggtttgatttaacacgcggcgcatggaatgtgcgatatataggagaatggatagtaatttccatgccgcttattttatgcggtttaagcatggggttttccgtccgcgcaggattattcaacatcggggcggaaggtcagtacatcgccggattaacggcggctcagctaatagccgtaggttttgtgcgcataacaggcgaacgtgttcctattcatttttcaatcgctgtgttaggcgcaatattttttggggcgttgtggggcggcattgccggtttattaaaagccaggtataaagtatcggaagtggtcgcaacaatcatgatgaactatatcgctttttttatacacaggcttgtaacgttaaacattcccggcagtaatacttttaaaactccaaattttaccgttaactctaccctatcaaatccgtttttgtcggcaattacaaacagatcgggcctgaataacggtctttggtttaccattactgctgtcattatttattggctcattatggaaaagagcgcgtttggcttttctcttaaagccgttgggtttaacagggaatctgctctgtatgccggtatacgcgtaaaaaccaatatcacgactgcaatggcaatttccggcgcttttgcgggtcttgccggcgcggttgtttcgctgggaatgttcaattacgggcgcatattaacatcttttgacaattacggttttgacggtattgctgtcgcccttaccggaattgttccgcattggggatggcgattatgggactgctttttggaatgttaa

SEQ ID NO: 60754 - protein, 324 aa, Unknown
  Obtained from environmental sample
  DOMAIN (71)...(322): Branched-chain amino acid transport system / permease component
  misc_feature (1)..(324): Xaa is any amino acid
MTTKFNRIEDKVLEIFTGSNAVISALVVFLGFFVATLLIVLIGKNPLVMYQSLLQVVSGFDLTRGAWNVRYIGEWIVISMPLILCGLSMGFSVRAGLFNIGAEGQYIAGLTAAQLIAVGFVRITGERVPIHFSIAVLGAIFFGALWGGIAGLLKARYKVSEVVATIMMNYIAFFIHRLVTLNIPGSNTFKTPNFTVNSTLSNPFLSAITNRSGLNNGLWFTITAVIIYWLIMEKSAFGFSLKAVGFNRESALYAGIRVKTNITTAMAISGAFAGLAGAVVSLGMFNYGRILTSFDNYGFDGIAVALTGIVPHWGWRLWDCFLEC

SEQ ID NO: 60755 - DNA, 582 bp, Unknown
  Obtained from environmental sample
  misc_feature (1)..(582): n is a, c, g, or t
ttgacgcgcttaaatcncccggtggtgtggctcatgtccattacgctgggcctgtgcgtcaccgttgagataagcagttccaactggggggttatgtacttcaaggatatctataaaatcaacccgaatacggacggggcgtcgtttctttcggctttttttctgttgtttaccgtttcacggctggtctgcggcctgtttgtggaaaaaataggctatatgcgcgcccttctgttctcggctttcattgtcctggccgtctttatcgcgggtttccttcttggggaaaaaggcatctacttgctgccctcgttgggtttttttgtcgcccaattctggcccacgctgatggcagtggcgattgtcagctttggcggggacgctcccgttttctccagcgcgatgatcgctattagcggccttctcaacgccgtcatacagttcattatcggcctgaccaataaatttttcggccccgcctggggctaccgcagcgccatcgtatacaccctgcttttgattgtggccctggtgatgctgtaccggaaactggggagtcgggaatcgagagttgggagttga

SEQ ID NO: 60756 - protein, 193 aa, Unknown
  Obtained from environmental sample
  misc_feature (1)..(193): Xaa is any amino acid
MTRLNXPVVWLMSITLGLCVTVEISSSNWGVMYFKDIYKINPNTDGASFLSAFFLLFTVSRLVCGLFVEKIGYMRALLFSAFIVLAVFIAGFLLGEKGIYLLPSLGFFVAQFWPTLMAVAIVSFGGDAPVFSSAMIAISGLLNAVIQFIIGLTNKFFGPAWGYRSAIVYTLLLIVALVMLYRKLGSRESRVGS

SEQ ID NO: 60757 - DNA, 711 bp, Unknown
  Obtained from environmental sample
  misc_feature (1)..(711): n is a, c, g, or t
gtgaggaatnttcagcgcgccctgttgttcattctgctgttcggaaccatgctgatagtcggaataacagaaaacatcaaaggcgtttcctatcccttaataaaagaacaattcggcgtttcatgggaacaacagggcctgatggtgtcaatgttatcaatagcttatgtcggctttagcgtcatcgcgggtatttttctggggcgctttgggataaagccgtctttcctctttgggttttccgccctctgcgtcggtcttttttcgatatttttcatgccgggattttttcttaccgccgccgctttgtttgtggtatttgccggcttcggtttttttgaagtggggctcaacgcgcttgcgacaagactctttataacaaaggcggctctgttgatgaatctgctccattcgttttacgggataggggcgatgatcgggccgaaagccgcaggacttattgccggcaatgccagcttcgggtggcgttatgtgtatcttttttccctgccgctggcgcttatattttttatcccggcgatctttatccgctttccggaagaaagccacaggatggacgctgttgccggacagtctttggctgacgggattagtccgttgaaaacccctcgtaaaagtttctttgacgcgcttaaatcncccggtggtgtggctcatgtccattacgctgggcctgtgcgtcaccgttga

SEQ ID NO: 60758 - protein, 236 aa, Unknown
  Obtained from environmental sample
  SIGNAL (1)...(21)
  misc_feature (1)..(236): Xaa is any amino acid
MRNXQRALLFILLFGTMLIVGITENIKGVSYPLIKEQFGVSWEQQGLMVSMLSIAYVGFSVIAGIFLGRFGIKPSFLFGFSALCVGLFSIFFMPGFFLTAAALFVVFAGFGFFEVGLNALATRLFITKAALLMNLLHSFYGIGAMIGPKAAGLIAGNASFGWRYVYLFSLPLALIFFIPAIFIRFPEESHRMDAVAGQSLADGISPLKTPRKSFFDALKSPGGVAHVHYAGPVRHR

SEQ ID NO: 60759 - DNA, 846 bp, Unknown
  Obtained from environmental sample
  misc_feature (1)..(846): n is a, c, g, or t
ttgatggcgggnagggacttattatcatatctttgccatgcgcgccgtccaagggaagcggacttgcaggtgaggcttgcggaattgcactaccgcttgccgcggctgactcataaatacatcgatctttcacggcagcggggcgggcgctacggtacaaggggcgcgggcgaaaccaaactggaaaccgaccgccgcgagatccaaaaacgcatacacaaactggaaaaagaaattgaggatgtcgccaaacagcggcaggtgcagcggcggcagcgggaacgccaggggacgccggtctgcgccattgtcggctataccaatgcgggcaaatccagccttttcaatgccctcagcggatccgccgtactggtagaaaacaaactttttgctacattagacgcaacaacccgccgttttgaaccaacgccaggcatgggagcgctgttaaccgacacggtgggctttatcaggcggctgccccataacctgattaaggcattcagatcaacccttgaagaagccgcccacgcgagtctgctgatccatgttcttgacgcggctgatcccaatatcgaaagctgtttcgggacaactgtttccgtcctgcaggaactgggtgcgggggaaatcccggttattaccgtattgaataaaactgaccttttgaccgacgaggccaagacagacgcggcgcatttagacgcggcgcatatagatacggcgcaactagatgcgctgcttatccgttatccgcaaagccttggtctttcggcaaaaaccggcaaggggctggatgaattaaaacaacggattgctgaaaaattaagcgggagcgttatgtga

SEQ ID NO: 60760 - protein, 281 aa, Unknown
  Obtained from environmental sample
  DOMAIN (99)...(221): GTPase of unknown function
  misc_feature (1)..(281): Xaa is any amino acid
MMAGRDLLSYLCHARRPREADLQVRLAELHYRLPRLTHKYIDLSRQRGGRYGTRGAGETKLETDRREIQKRIHKLEKEIEDVAKQRQVQRRQRERQGTPVCAIVGYTNAGKSSLFNALSGSAVLVENKLFATLDATTRRFEPTPGMGALLTDTVGFIRRLPHNLIKAFRSTLEEAAHASLLIHVLDAADPNIESCFGTTVSVLQELGAGEIPVITVLNKTDLLTDEAKTDAAHLDAAHIDTAQLDALLIRYPQSLGLSAKTGKGLDELKQRIAEKLSGSVM

SEQ ID NO: 60761 - DNA, 1548 bp, Unknown
  Obtained from environmental sample
  misc_feature (1)..(1548): n is a, c, g, or t
atgaacgttttgaatggctacattacagacaaagattttttaaccaaaaacaacattgacatgcaaaggctgcaacaggctgccaaacgcatttaccccaaagacgtggcactgatgacttcgatagccgaggtcgaaaagttacataaagagccagagtcagacgccaccaagggacgctaccaagcggtcaaccgcctcgcactggagatcttgtacgcggacgtgcttaggaacatggcccccgtgatcaggaatggcgtcgtttatcgctcagaagaccaaggcgaaacttggacgcgcatgaccgagtacatgcacgcaggtggcagcgcccaggtgaaccagaccgagggcggctattatgggcgcataatctttgaccccaacaacgacaaagtgctttactgccccgacaccaacacgaccgtttcaatggatggcggcaaaatatttgccgtgactgggtgggacggccctggaaaaacccacgttgaccaccgcaccgtctgggttgacccattgaactcgaaccacatcctgagtgccaacgatggggccgccagcgagacctgggacggcggaaaaacttggaccgaaaaatacacaatcagggcccagcagttctacaacatttcagtggacagcgaacagccgtacaacgtcatgggcgggacacaggacaatggggcatggttagggccctcccagaacaggaatcaatatggcatataccccactgactggctgtacttgccatcgggtgacgggttctatgtagtccgcgattggtggaacccagaatatgtctattacgaaagccaatttggaggttccagccgcatgaacgtcagcaatggcgaaacacagtcgctggccaagcgcaccacgccggaggaagcggcgaagggcgtgccgccccagcgctaccagtgggcggcccccatcgttctgtcgccacacaacccagggatcgtctatatatgctcccaattcgtccacaggtcgctgagtcgaggcaatacgggcacctttgtgaccatcagcccggacttgtcaaaaaacaacgccgagcgcatcgaactttccaaaaagaccaacctgcagtacgccactatctacacctttgctgagtcccctaagaagcctggattattctgggcggggactgacgacggcaatgtgcagctttcaaccaacaatggcgtcacttggacaaatatcacagaccagttctatgattcaaaaggcgcgcccaaaaaagacgctaaggggactgtgatcccatacgacagatgggtaaagcgggtggtgccaagcagacatgacgaaaacacttgctatgtggcgttcagcggctataggactcataccgaagacaaaacttatctgtatgtgacaaaagaccttggcaaaacctgggaggacatctctaggggaatgaaccttcccatctatgacgtagaggaagaccctgcgaatccagatgttctttatcttggcacggaatgtgggatttaccttacatacgacagggggaaaaactga

SEQ ID NO: 60762 - protein, 515 aa, Unknown
  Obtained from environmental sample
  misc_feature (1)..(515): Xaa is any amino acid
MNVLNGYITDKDFLTKNNIDMQRLQQAAKRIYPKDVALMTSIAEVEKLHKEPESDATKGRYQAVNRLALEILYADVLRNMAPVIRNGVVYRSEDQGETWTRMTEYMHAGGSAQVNQTEGGYYGRIIFDPNNDKVLYCPDTNTTVSMDGGKIFAVTGWDGPGKTHVDHRTVWVDPLNSNHILSANDGAASETWDGGKTWTEKYTIRAQQFYNISVDSEQPYNVMGGTQDNGAWLGPSQNRNQYGIYPTDWLYLPSGDGFYVVRDWWNPEYVYYESQFGGSSRMNVSNGETQSLAKRTTPEEAAKGVPPQRYQWAAPIVLSPHNPGIVYICSQFVHRSLSRGNTGTFVTISPDLSKNNAERIELSKKTNLQYATIYTFAESPKKPGLFWAGTDDGNVQLSTNNGVTWTNITDQFYDSKGAPKKDAKGTVIPYDRWVKRVVPSRHDENTCYVAFSGYRTHTEDKTYLYVTKDLGKTWEDISRGMNLPIYDVEEDPANPDVLYLGTECGIYLTYDRGKN

SEQ ID NO: 60763 - DNA, 777 bp, Unknown
  Obtained from environmental sample
  misc_feature (1)..(777): n is a, c, g, or t
atgtcgatgatcaaaacagccgggttatacaagaccttccacggctcgcgtggcagagggccgcttgaggtgttaaaggacgtgtccctcaccgtagagcagaaagaagtcgtctgtataatcgggccttccggcgccggaaagtcaacataccttcgcaccctgaaccggctggaaacgattgacgaagggcagatatttatagaagacaaactcctctttgactgccacaagggaacaaaccgcgtcaaaatgaaccatgacgaacacaacaggacactgcttgaagtgggcatggtgttccagcgtttcaatctttttccccacaggacggcccttgaaaacgtgatgcttgcccctgtccatgttcgcaaactttccgttgaagaagcgcgggaaagggccaaaaatatccttgagcgcgtcggtcttgccgataaattcgacgtgttcccctcccagctttcaggcggccagcagcagcgtgtcgctattgcccgcgcccttgcgatggagccgaggatcatgctctttgacgagcctaccagcgctcttgacccggagcttgtcggcgaggtgttagctgtaatgaaacagcttgccgtcgccggaatgaccatgctggtggtatctcacgagatgggctttgcccgcgaggttgccgacagggtggtattcatgttcgagggtaaaatcctggaagtcgccccgcccaaagtcatgttcaacaacccgtcaaacgagcgcacccgccagttcctgcagagcgttttgtaa

SEQ ID NO: 60764 - protein, 258 aa, Unknown
  Obtained from environmental sample
  DOMAIN (21)...(234): RecF/RecN/SMC N terminal domain
  misc_feature (1)..(258): Xaa is any amino acid
MSMIKTAGLYKTFHGSRGRGPLEVLKDVSLTVEQKEVVCIIGPSGAGKSTYLRTLNRLETIDEGQIFIEDKLLFDCHKGTNRVKMNHDEHNRTLLEVGMVFQRFNLFPHRTALENVMLAPVHVRKLSVEEARERAKNILERVGLADKFDVFPSQLSGGQQQRVAIARALAMEPRIMLFDEPTSALDPELVGEVLAVMKQLAVAGMTMLVVSHEMGFAREVADRVVFMFEGKILEVAPPKVMFNNPSNERTRQFLQSVL

SEQ ID NO: 60765 - DNA, 627 bp, Unknown
  Obtained from environmental sample
  misc_feature (1)..(627): n is a, c, g, or t
atggtcattccggcgacggcaagctgtttcattacagctaacacctcgccgacaagctccgggtcaagagcgctggtaggctcgtcaaagagcatgatcctcggctccatcgcaagggcgcgggcaatagcgacacgctgctgctggccgcctgaaagctgggaggggaacacgtcgaatttatcggcaagaccgacgcgctcaaggatatttttggccctttcccgcgcttcttcaacggaaagtttgcgaacatggacaggggcaagcatcacgttttcaagggccgtcctgtggggaaaaagattgaaacgctggaacaccatgcccacttcaagcagtgtcctgttgtgttcgtcatggttcattttgacgcggtttgttcccttgtggcagtcaaagaggagtttgtcttctataaatatctgcccttcgtcaatcgtttccagccggttcagggtgcgaaggtatgttgactttccggcgccggaaggcccgattatacagacgacttctttctgctctacggtgagggacacgtcctttaacacctcaagcggccctctgccacgcgagccgtggaaggtcttgtataacccggctgttttgatcatcgacatggtttag

SEQ ID NO: 60766 - protein, 208 aa, Unknown
  Obtained from environmental sample
  SIGNAL (1)...(20)
  DOMAIN (27)...(65): Protein of unknown function (DUF1602)
  misc_feature (1)..(208): Xaa is any amino acid
MVIPATASCFITANTSPTSSGSRALVGSSKSMILGSIARARAIATRCCWPPESWEGNTSNLSARPTRSRIFLALSRASSTESLRTWTGASITFSRAVLWGKRLKRWNTMPTSSSVLLCSSWFILTRFVPLWQSKRSLSSINICPSSIVSSRFRVRRYVDFPAPEGPIIQTTSFCSTVRDTSFNTSSGPLPREPWKVLYNPAVLIIDMV

SEQ ID NO: 60767 - DNA, 621 bp, Unknown
  Obtained from environmental sample
  misc_feature (1)..(621): n is a, c, g, or t
ttgntaaagggtgccagggttaccatttcattgacagtgctggctgtcggcgctggactggtattgagcctgttcctcgcgctggggaagatgtctaaaaacgtcatcctcaacaagctttcctccgggtatgttttctttttccggggaactccccttttgatgcagttgttttttgtctattatgccctgcccatgatcgctccggctctgaccattaacaaccgtttccttgccgcttttatcgcctttaccatgaacagcgcggcgtattgcgctgaaataatcagggcggcgattcaaagcatcgacaagggacagttcgaagcgtcccgcgcgctggggctgtcttacggccagaccatgcggctggtgatcatcccccagtcaatacggcggcttatcccgcctgtcggcaacgagttcatcatgatgcttaaagacgcgtcgctggtttcgatgattgcgttagttgacattacaaaggcaacaaggaacattgagggttctacccgatccgcgctggtttatatcccggcaatgatcctttatttgatcattaccgccgttttttccttttttttccacaagctggaaaaaaaatactcgttatacgaatga

SEQ ID NO: 60768 - protein, 206 aa, Unknown
  Obtained from environmental sample
  SIGNAL (1)...(26)
  DOMAIN (1)...(204): Binding-protein-dependent transport system inner membrane component
  misc_feature (1)..(206): Xaa is any amino acid
MXKGARVTISLTVLAVGAGLVLSLFLALGKMSKNVILNKLSSGYVFFFRGTPLLMQLFFVYYALPMIAPALTINNRFLAAFIAFTMNSAAYCAEIIRAAIQSIDKGQFEASRALGLSYGQTMRLVIIPQSIRRLIPPVGNEFIMMLKDASLVSMIALVDITKATRNIEGSTRSALVYIPAMILYLIITAVFSFFFHKLEKKYSLYE

SEQ ID NO: 60769 - DNA, 717 bp, Unknown
  Obtained from environmental sample
  misc_feature (1)..(717): n is a, c, g, or t
ttgacaattaacccgggggttctgaaaatagggatggaaatcgggtatcccccaatggagtactttgacgctgacggcgaaactccaatcggctttgatgtggagatgggcaaggcaatcgcggcaaaaatgggccttgagtatgagttcgttgataccgcatgggacggaattttcgccggggttgacacaaataaatacgactgcatcatgtcttcggtgaccatcaacgaggcaaggatgaatgcgcataatttcagtaagccgtacatccgcaatacattggcaatagtgctgcccaaggattccgcccttaatgtaagctcgccgcaggatcttgccggccttcgcgtatcctatcaggaagaaacaacgtcagatttttttatggaagatctcgcgaaacagggcatgcagtttaccccctatgagtatgataaggtgatgtactgttttgacgagctcaaactgggcagggtggatgtaattgtcaccgatcttcttgtcgcctatgaatatgtcaacagaccggacagccccttcaaaattgtctgggagggcggcgaagaggagtttggcatctgcatgaggaagggaaatgatcccctgaccgaggccattaacaaggcccttgatgaactttttgaagacggtactatgttaaaaatatcgcaggacatttttggcatggatcttgtttcggcagtacgaaaataa

SEQ ID NO: 60770 - protein, 238 aa, Unknown
  Obtained from environmental sample
  DOMAIN (8)...(230): Bacterial extracellular solute-binding proteins, family 3
  misc_feature (1)..(238): Xaa is any amino acid
MTINPGVLKIGMEIGYPPMEYFDADGETPIGFDVEMGKAIAAKMGLEYEFVDTAWDGIFAGVDTNKYDCIMSSVTINEARMNAHNFSKPYIRNTLAIVLPKDSALNVSSPQDLAGLRVSYQEETTSDFFMEDLAKQGMQFTPYEYDKVMYCFDELKLGRVDVIVTDLLVAYEYVNRPDSPFKIVWEGGEEEFGICMRKGNDPLTEAINKALDELFEDGTMLKISQDIFGMDLVSAVRK

SEQ ID NO: 60771 - DNA, 417 bp, Unknown
  Obtained from environmental sample
  misc_feature (1)..(417): n is a, c, g, or t
atggtcaaaatcatcgccgcccaggtgcgtatcgccattggtggactttacctcaaagacgccttcgcccagttccagaatggaaacatcgaatgtgccgccgccaagatcgtagacggcgattgttttctctttcttttgatctttattaaagccaaacgccagagacgcggcggtcggctcattgatgatccgctttacctcaagaccagcgattttgcccgcgtctttggtcgcctggcgctgggcgtcgttgaagtacgccggcacggtgattaccgcttcggaaacggtttcgcccagatagtcttcggcggtttttttcatcttttgcaaaacaaaggcggaaatttcctggggggaatatttttttccatcaatgtccaccctcacatcgtcgccctgtccgacacatga

SEQ ID NO: 60772 - protein, 138 aa, Unknown
  Obtained from environmental sample
  misc_feature (1)..(138): Xaa is any amino acid
MVKIIAAQVRIAIGGLYLKDAFAQFQNGNIECAAAKIVDGDCFLFLLIFIKAKRQRRGGRLIDDPLYLKTSDFARVFGRLALGVVEVRRHGDYRFGNGFAQIVFGGFFHLLQNKGGNFLGGIFFSINVHPHIVALSDT

SEQ ID NO: 60773 - DNA, 1464 bp, Unknown
  Obtained from environmental sample
  misc_feature (1)..(1464): n is a, c, g, or t
gtgagggtggacattgatggaaaaaaatattccccccaggaaatttccgcctttgttttgcaaaagatgaaaaaaaccgccgaagactatctgggcgaaaccgtttccgaagcggtaatcaccgtgccggcgtacttcaacgacgcccagcgccaggcgaccaaagacgcgggcaaaatcgctggtcttgaggtaaagcggatcatcaatgagccgaccgccgcgtctctggcgtttggctttaataaagatcaaaagaaagagaaaacaatcgccgtctacgatcttggcggcggcacattcgatgtttccattctggaactgggcgaaggcgtctttgaggtaaagtccaccaatggcgatacgcacctgggcggcgatgattttgaccatcgcataatggagtggctgattgccgaattcaagaaggacaccggcatcgatctgggcaaggaccgtatggcgttgcagcgtttgcgcgaattttcggaaaaagcaaaaatcgagttgtcagcaatgcaaactaccgagatcaacattccctttatcaccgccgatcaggccggccccaaacatctgcaaaagaccctgacacgggcaaaattcgagcaaatggtagaagatctgctggaacgctccaaggatccctgcagaaaagccctttccgacgcgggccttacagccgatcaaattgacgaggtaatccttgtcggcggttccacccgcattccgattgtgcagcaaattgtcaaagatctctttaagaaagaacccaacaaaggcgtgaatcccgacgaggcggtggcggtaggggcggccattcagggcggtatactgggcggcgacgttaaggacgtgctgctgttggacgtaacgccgctttcgctgggcatcgagaccctgggcggcgtgatgacgcggctcattccccggaacacgaccattcccaccagaaaaagccagatcttctccaccgccgctgacgggcagaccgcggtttccatccaggtgcttcagggagagcgggaaatggccgcgcagaaccgcacactgggccgctttgaccttgtcggcataccgcctgcgccgcgcggggttcctcagatagaagtaaccttcgacattgacgctaacggcatagtccacgtttccgcgaaagaccttggcacgggcaaggagcagaagatccgtatcgaaagctcttccggcctttcggacaacgaaattgaccgcatggtaaaggaagcggaactgcacgcggaggaagacaaaagggaaagggaaagagccgaggtcagaaacgacgctgacaacatgatctactccaccgagaaaaacattaaagaacttggggacaagatttccggcgcggataaatccaaggttgaagaagcgatagccgatcttcgcaaggctcttgagggaggcgatatcgaaaacatcaaatccaaaccgaggcattaa

SEQ ID NO: 60774 - protein, 487 aa, Unknown
  Obtained from environmental sample
  DOMAIN (2)...(487): Hsp70 protein
  misc_feature (1)..(487): Xaa is any amino acid
MRVDIDGKKYSPQEISAFVLQKMKKTAEDYLGETVSEAVITVPAYFNDAQRQATKDAGKIAGLEVKRIINEPTAASLAFGFNKDQKKEKTIAVYDLGGGTFDVSILELGEGVFEVKSTNGDTHLGGDDFDHRIMEWLIAEFKKDTGIDLGKDRMALQRLREFSEKAKIELSAMQTTEINIPFITADQAGPKHLQKTLTRAKFEQMVEDLLERSKDPCRKALSDAGLTADQIDEVILVGGSTRIPIVQQIVKDLFKKEPNKGVNPDEAVAVGAAIQGGILGGDVKDVLLLDVTPLSLGIETLGGVMTRLIPRNTTIPTRKSQIFSTAADGQTAVSIQVLQGEREMAAQNRTLGRFDLVGIPPAPRGVPQIEVTFDIDANGIVHVSAKDLGTGKEQKIRIESSSGLSDNEIDRMVKEAELHAEEDKRERERAEVRNDADNMIYSTEKNIKELGDKISGADKSKVEEAIADLRKALEGGDIENIKSKPRH

SEQ ID NO: 60775 - DNA, 951 bp, Unknown
  Obtained from environmental sample
  misc_feature (1)..(951): n is a, c, g, or t
atgcctcggtttggatttgatgttttcgatatcgcctccctcaagagccttgcgaagatcggctatcgcttcttcaaccttggatttatccgcgccggaaatcttgtccccaagttctttaatgtttttctcggtggagtagatcatgttgtcagcgtcgtttctgacctcggctctttccctttcccttttgtcttcctccgcgtgcagttccgcttcctttaccatgcggtcaatttcgttgtccgaaaggccggaagagctttcgatacggatcttctgctccttgcccgtgccaaggtctttcgcggaaacgtggactatgccgttagcgtcaatgtcgaaggttacttctatctgaggaaccccgcgcggcgcaggcggtatgccgacaaggtcaaagcggcccagtgtgcggttctgcgcggccatttcccgctctccctgaagcacctggatggaaaccgcggtctgcccgtcagcggcggtggagaagatctggctttttctggtgggaatggtcgtgttccggggaatgagccgcgtcatcacgccgcccagggtctcgatgcccagcgaaagcggcgttacgtccaacagcagcacgtccttaacgtcgccgcccagtataccgccctgaatggccgcccctaccgccaccgcctcgtcgggattcacgcctttgttgggttctttcttaaagagatctttgacaatttgctgcacaatcggaatgcgggtggaaccgccgacaaggattacctcgtcaatttgatcggctgtaaggcccgcgtcggaaagggcttttctgcagggatccttggagcgttccagcagatcttctaccatttgctcgaattttgcccgtgtcagggtcttttgcagatgtttggggccggcctgatcggcggtgataaagggaatgttgatctcggtagtttgcattgctga

SEQ ID NO: 60776 - protein, 316 aa, Unknown
  Obtained from environmental sample
  misc_feature (1)..(316): Xaa is any amino acid
MPRFGFDVFDIASLKSLAKIGYRFFNLGFIRAGNLVPKFFNVFLGGVDHVVSVVSDLGSFPFPFVFLRVQFRFLYHAVNFVVRKAGRAFDTDLLLLARAKVFRGNVDYAVSVNVEGYFYLRNPARRRRYADKVKAAQCAVLRGHFPLSLKHLDGNRGLPVSGGGEDLAFSGGNGRVPGNEPRHHAAQGLDAQRKRRYVQQQHVLNVAAQYTALNGRPYRHRLVGIHAFVGFFLKEIFDNLLHNRNAGGTADKDYLVNLIGCKARVGKGFSAGILGAFQQIFYHLLEFCPCQGLLQMFGAGLIGGDKGNVDLGSLHC

SEQ ID NO: 60777 - DNA, 783 bp, Unknown
  Obtained from environmental sample
  misc_feature (1)..(783): n is a, c, g, or t
atggcaaaacgcgattactacgaagttctcggggtacagaaaagctcatcaaaagacgagataaaaaaagcttatcgcaagcttgccattcaataccatcccgacaagaatccgggagacaaggctgcggaagaaaagtttaaggaagctaccgaagcatacgaagttctcgcggacgacaagaagaagcaggcctacgaccaattcggctttgctggcgtggaaggcatgggcggcccaacgccccatgacttttcccaggcgtttcatggcttcgaggacatctttggcgatttttcaggcatttttgactcgatttttggcgggggtacaaggcgctcaggcagcggccatgggggcgcaaggcagggcgtaaacctccgctacgatatcgaaatatcttttaaggacgcggtcttcggcacaaaggttgaaatacagtacaataaaaacgactcctgcccggtttgcaacggttcaggagcggcaagcgggacaggaagaaaagtctgccccacctgtaagggcgcggggcagatacgccagagcgcgggctttttctccatggcttcgccatgcccgtcgtgtggcggccagggcgagattattgagaagccctgcccggaatgcgccggttcaggcacacaaaagaaacgccagaagataatggttaccattccgccgggtgtggaaaacggcaagcgggtagtaattcccaggcagggcgactcggggatagccggcggccctaccgggcgacctgtatgtgtttataaggattaa

SEQ ID NO: 60778 - protein, 260 aa, Unknown
  Obtained from environmental sample
  DOMAIN (141)...(221): DnaJ central domain (4 repeats)
  misc_feature (1)..(260): Xaa is any amino acid
MAKRDYYEVLGVQKSSSKDEIKKAYRKLAIQYHPDKNPGDKAAEEKFKEATEAYEVLADDKKKQAYDQFGFAGVEGMGGPTPHDFSQAFHGFEDIFGDFSGIFDSIFGGGTRRSGSGHGGARQGVNLRYDIEISFKDAVFGTKVEIQYNKNDSCPVCNGSGAASGTGRKVCPTCKGAGQIRQSAGFFSMASPCPSCGGQGEIIEKPCPECAGSGTQKKRQKIMVTIPPGVENGKRVVIPRQGDSGIAGGPTGRPVCVYKD

SEQ ID NO: 60779 - DNA, 360 bp, Unknown
  Obtained from environmental sample
  misc_feature (1)..(360): n is a, c, g, or t
gtgtttataaggattaaaccccacgaatactttgaacgtcagggctacgacctttactgcgcggtccccatttcaataagccaggccgccctgggcgcagatatccaggtaatcaccctagacaacaagacgattaaggtaaaagtacccgcgggtatccagaacggcaaaatgctccgaatacgcgacgagggagttccctctggaggccgccggggcaacctctacatcaaacttattgtgaaaattcccgacaaactctcccgccggggccgggaactgcttgaagaactggcaaaaaccgaaggccaaaacgacaatcccaagcccattctcctttcggaacttggggagcaataa

SEQ ID NO: 60780 - protein, 119 aa, Unknown
  Obtained from environmental sample
  DOMAIN (2)...(99): DnaJ C terminal region
  misc_feature (1)..(119): Xaa is any amino acid
MFIRIKPHEYFERQGYDLYCAVPISISQAALGADIQVITLDNKTIKVKVPAGIQNGKMLRIRDEGVPSGGRRGNLYIKLIVKIPDKLSRRGRELLEELAKTEGQNDNPKPILLSELGEQ

SEQ ID NO: 60781 - DNA, 1113 bp, Unknown
  Obtained from environmental sample
  misc_feature (1)..(1113): n is a, c, g, or t
gtgaggcatacgctgatggataacgctattataaaatccgccctggcctttttttattcttatttgccggtattaattaccgccgcgcttctgctgggcatttccgcgttctgctcgggatgttacacccttaaacagggaacaacgatgctgggttacctgggcagggcagttccccttgaagaactggacaatggaaatgaagacaacacttcagaagataacaggcgctttgttcaaaaggtggaagatatacgaggtttcgcgatgcgggagcttggcctaaagaaaagtaaaaactacacccgctatgtggagcttgacagagattacctggcagcggttgtttccgcttccgcgaaggattcgtttacccgctacgaatggtggttcccggttaccggcaaggttccctacaagggctttttcaatgtcgccgacgcgaggaaagagcgggcaaagctggaaaagaaaggccttgatgtgtggattcgtggagtcgacgcgttcagtaccctgggctggttccgtgatcctctctactcctatatgcgcggttattccgtgggcagccttgccgatctcattattcacgaacttgtacacgctacggtttttataaaggggcaggtaaaatttaatgaggaactcgcagaatttatcgggagcgagggcgcaaaactgtatgttgaatcgcggtatggagcggattcaaaagaataccgtgaatcgttttcatccgacgacgagtataaaaattacgtcgcgtttatccaggagttaatcgcggagcttgaaaggctttattcaagagaaattgacagggaaacaaaattaacagaaaaagaaaaaataatttccgccgcgaaggagcggtttaacgcggaatacgaaacccgtttttcaagcgacaactaccgcgggtttttaactttaccggtaaacaacgcgtatctggaactttaccgcatttaccacgcgcaggataatttttattccgatttatatgaacgttcgggaaaaaatcttcccgcttttgccgccgccgcaaagaccataacaaaaaaaggcgaccctaaagtacagttggaaaaagctcttctgaaaaattaa

SEQ ID NO: 60782 - protein, 370 aa, Unknown
  Obtained from environmental sample
  misc_feature (1)..(370): Xaa is any amino acid
MRHTLMDNAIIKSALAFFYSYLPVLITAALLLGISAFCSGCYTLKQGTTMLGYLGRAVPLEELDNGNEDNTSEDNRRFVQKVEDIRGFAMRELGLKKSKNYTRYVELDRDYLAAVVSASAKDSFTRYEWWFPVTGKVPYKGFFNVADARKERAKLEKKGLDVWIRGVDAFSTLGWFRDPLYSYMRGYSVGSLADLIIHELVHATVFIKGQVKFNEELAEFIGSEGAKLYVESRYGADSKEYRESFSSDDEYKNYVAFIQELIAELERLYSREIDRETKLTEKEKIISAAKERFNAEYETRFSSDNYRGFLTLPVNNAYLELYRIYHAQDNFYSDLYERSGKNLPAFAAAAKTITKKGDPKVQLEKALLKN

SEQ ID NO: 60783 - DNA, 1050 bp, Unknown
  Obtained from environmental sample
  misc_feature (1)..(1050): n is a, c, g, or t
gtggtaattatgataacacttgaagaaatggcaattcccctggaaggggaaaaccccgcaggtgaaagcatggaatacgattctctctacctggagatggattccctggcaataagcgtaccggacagtcaaatgggagaatcgaaaatcgaaggccgcgggccggattggaaaaagttaaaagaaaactgtcaaaagctctggagcaaaacccgggatttgcgggttgcttcatatttggcagttgcggaaactgcggacggcggccttgaggattgcgcggcggcttttaaactgattctttttctggtacgggatatgtgggacgccatgtacccaaagcttgaaattgatgacgaaaatgatcctaccgaacggcttaacattctaaccatgctctccccggaacccggagctattaacgatcctgttatgtttatatcaaaattcaggactatcaggctggttcccgtcctgccatacaccctaagggatcacctgatttcaatcaacgaatttgaggcggcggacggtcaaaccttcaatccgagccttatctcaggcgaactcatgcggattccgcgggaagaagtggagaaacaagccgccctgtccggggaactcaaggaaaccgtcgaagccatctgctcggccgcgaacgaaaaaatgcaaagcggttacagcctggcaatgggttccctgattggggagatcaacaaactctgcaagttttacgcgcaatactcaggcggttcaagcggagaaacggaaaacattgaagacggatcttcaattaccgccgacgctgttccgacatctggcggctttaaccttgcttctttcattccgggcacccgttccgacgccctgctcctgctccgcaaaggagccgaatactttcagcgccaggaacccaacagccctatcccgttcctcgtaaacagggcgctgcgtttctcggagatgagttttattgacttgctggaagacatagtcccggacgcgttgtcccacggcaaaacaatactggggattaaggataacgggtaa

SEQ ID NO: 60784 - protein, 349 aa, Unknown
  Obtained from environmental sample
  DOMAIN (56)...(116): ImpA-related N-terminal
  misc_feature (1)..(349): Xaa is any amino acid
MVIMITLEEMAIPLEGENPAGESMEYDSLYLEMDSLAISVPDSQMGESKIEGRGPDWKKLKENCQKLWSKTRDLRVASYLAVAETADGGLEDCAAAFKLILFLVRDMWDAMYPKLEIDDENDPTERLNILTMLSPEPGAINDPVMFISKFRTIRLVPVLPYTLRDHLISINEFEAADGQTFNPSLISGELMRIPREEVEKQAALSGELKETVEAICSAANEKMQSGYSLAMGSLIGEINKLCKFYAQYSGGSSGETENIEDGSSITADAVPTSGGFNLASFIPGTRSDALLLLRKGAEYFQRQEPNSPIPFLVNRALRFSEMSFIDLLEDIVPDALSHGKTILGIKDNG

SEQ ID NO: 60785 - DNA, 912 bp, Unknown
  Obtained from environmental sample
  misc_feature (1)..(912): n is a, c, g, or t
atgactttaaacgccccgacagttttccaagaacaaatccgtacagtctcgataatgcacgagacttttgcgcgtttaacaacaaccagcctttcggcccagcttcgaagcatggttcacgtacacgtcgcgtcggtagatcagcttacctacgaagaatttatccgttctatacctacgccgacaacccttgcgattatcaatatggatcccttaaagggaaacgccattttggaaatagaccccgcgattaccttttccataatcgaccgtcttttcggaggcacgggcgaaggcacaaagtctcagcatgaattgaccgatatcgagcagtccgtaatggaaggaattatcgtccgtattttaggcaatatgcgcgaagcgtggacgacggtaatcgacctgcgcccccgtctggggcaaattgacaccaatccgcagttcgcgcaaatcgttccgcctacggaaatggtcgttcttgtaacattggaaaccaaagtaggagacgtggaaggcatgatgaacttctgtatcccctaccttaccatagagccgattatcagcaaattgtccgcccagttctggtattcttcggtacggcgcaacgcgactaccgagaacctcaatgttctaaaggagaagctgacaacggtcgatgttaatataacagccgaaatcggaaagataaacgttcctgtaagggacgttctttccttgcagataggggatgtaatacggctctacaatacacgtatcggcgatccctattcactgaatatcggctcaaggaaaaagtttctgtgccgtcccggcgtacttggaaagaaaatggcggtgcagataacgcagaagattgccgagcttggacaagaagaatttgaagagctcgtatctgaaggagatgaattatga

SEQ ID NO: 60786 - protein, 303 aa, Unknown
  Obtained from environmental sample
  DOMAIN (211)...(288): Surface presentation of antigens (SPOA) protein
  misc_feature (1)..(303): Xaa is any amino acid
MTLNAPTVFQEQIRTVSIMHETFARLTTTSLSAQLRSMVHVHVASVDQLTYEEFIRSIPTPTTLAIINMDPLKGNAILEIDPAITFSIIDRLFGGTGEGTKSQHELTDIEQSVMEGIIVRILGNMREAWTTVIDLRPRLGQIDTNPQFAQIVPPTEMVVLVTLETKVGDVEGMMNFCIPYLTIEPIISKLSAQFWYSSVRRNATTENLNVLKEKLTTVDVNITAEIGKINVPVRDVLSLQIGDVIRLYNTRIGDPYSLNIGSRKKFLCRPGVLGKKMAVQITQKIAELGQEEFEELVSEGDEL

SEQ ID NO: 60787 - DNA, 843 bp, Unknown
  Obtained from environmental sample
  misc_feature (1)..(843): n is a, c, g, or t
atgatagtacaatatcataaaatcgcatttttggcaggttttgcacttgctatgtcattcatattttcgtgctcgtcagacggcggcggcggtggtggcgataccccaagcagttcctcgcttgctgtgttgttgtcttcgtcaagtttaatgccgagtagttctagcttgtaccctagcagttccagttcgtaccctagcagttctagctcgcccagcgaatacactggcggttcttgcaatgcggcggattacggctctgttaatatcaatggtcagatttggatgaaaaagaattggggttgctatgcctctggcagtaaatgctatggcaatgaccccgccaactgcgatacctacggcaggttgtatgattggtcaacagcgatgggcatagattcaagatacaatagcgaagtatggggcggaagcgatgtaaagcatcaaggcatttgccccagtggttggcatatccctagcaatgcggactgggataaactgatgcgttatgtagatggcacaaacggtacgtcaagtccttacgacagccccacggcaggcaagtatttgaaagcaaaagacggctggtataattgcggtccttcaggttctggcaagagttattcgtgcgaggatacgcatggattttcggctctgcctggcggctacggcagttccggtggcagtttcgtcagtgtcggcagcagcggcctctggtggagtgcctccgagggcgatagctacagcgcctaccgccggggtatgctctacctccacgagtacgcttactggggcagcagcagtaaggacggcttgttctctgtccgttgtctgcaggactga

SEQ ID NO: 60788 - protein, 280 aa, Unknown
  Obtained from environmental sample
  SIGNAL (1)...(26)
  misc_feature (1)..(280): Xaa is any amino acid
MIVQYHKIAFLAGFALAMSFIFSCSSDGGGGGGDTPSSSSLAVLLSSSSLMPSSSSLYPSSSSSYPSSSSSPSEYTGGSCNAADYGSVNINGQIWMKKNWGCYASGSKCYGNDPANCDTYGRLYDWSTAMGIDSRYNSEVWGGSDVKHQGICPSGWHIPSNADWDKLMRYVDGTNGTSSPYDSPTAGKYLKAKDGWYNCGPSGSGKSYSCEDTHGFSALPGGYGSSGGSFVSVGSSGLWWSASEGDSYSAYRRGMLYLHEYAYWGSSSKDGLFSVRCLQD

SEQ ID NO: 60789 - DNA, 1407 bp, Unknown
  Obtained from environmental sample
  misc_feature (1)..(1407): n is a, c, g, or t
atgtgggacaatcgggaaaattctatattcccccaaccaatgtcatcaaaaaaaaacattcaatatatctgtgaggaatgcggaagcatattttcgcataaggtttcaaaatgcccagaatgcggagtttcgggtttgtttgtggtagagacagaaattgaaaaggaaagcaggggcataggggttgcatctatgccacaagggacggcatcagtacctatgccaatatctgaggtgccaaccaaacattcaaagagattaaccacagccaatcaggaattcgacagaactcttggcggcggaatggcggcgggttccttgatattgataggcggagaccccggcattgggaaatcaactcttgttttgcaaactctttcaacaatggcggcggctggctgcaaaacactttatgtgagcggcgaagaaagcgcggcgcaggttaagctaagggcggaaaggcttggagcggcaggtagcgatatgatgctgttttgcgaaacatcgcttggcaaaattttggaatgcgcggcgcaaataaagccgcaagtaatggttatagattccattcaaacggtgtacagcgaagacttgcccggcacgccgggtagcgtttcgcaacttagggaatgtgcgctaaagctgatgatttacgcaaagaacagcggaaccatcactatgctggttgggcacgttacaaaagacggtcaaatagcaggacctagaattttggagcacatggtggacaccgttgcatactttgaaggcgacaaaaaagggcaatacagaattttgagaactgttaaaaaccgctttggcgcaacagacgaaataggtgtttttgaaatgacttcgcttgggcttattccagtgcaaaatccctcaaaagtatttttgcaagaaggggagctttctcccggcagcgcagttagctgcaccatagaaggcagccgtgcaatgctgtttgaaattcaggctttggttggcaaaacaagctatgctatgccccaaagagtttctgccggagtagaggcaaaaaaattgacaattatactcgctcttttggagagatttgcaaaacttcaagtgagcaattccgatgtttttgtatctgttgttggcggtttaaaattagatgaccccggcatagatttacctcttgctcttgcaatagttggcaatgcgcgcaacataagtttgccgcctcatagcattgtcataggcgaacttggtctctctggcgaaattcgcccagtgagttctttggatttgcgaattaaagaagctcaccgccttggctttgaaaaaattgtggtacctgcaaacggtaaaattccaaatgtaaagggaatagagataataaaattttccaagctggaacaagcagttcagtggctgtgttcttaa

SEQ ID NO: 60790 - protein, 468 aa, Unknown
  Obtained from environmental sample
  misc_feature (1)..(468): Xaa is any amino acid
MWDNRENSIFPQPMSSKKNIQYICEECGSIFSHKVSKCPECGVSGLFVVETEIEKESRGIGVASMPQGTASVPMPISEVPTKHSKRLTTANQEFDRTLGGGMAAGSLILIGGDPGIGKSTLVLQTLSTMAAAGCKTLYVSGEESAAQVKLRAERLGAAGSDMMLFCETSLGKILECAAQIKPQVMVIDSIQTVYSEDLPGTPGSVSQLRECALKLMIYAKNSGTITMLVGHVTKDGQIAGPRILEHMVDTVAYFEGDKKGQYRILRTVKNRFGATDEIGVFEMTSLGLIPVQNPSKVFLQEGELSPGSAVSCTIEGSRAMLFEIQALVGKTSYAMPQRVSAGVEAKKLTIILALLERFAKLQVSNSDVFVSVVGGLKLDDPGIDLPLALAIVGNARNISLPPHSIVIGELGLSGEIRPVSSLDLRIKEAHRLGFEKIVVPANGKIPNVKGIEIIKFSKLEQAVQWLCS

SEQ ID NO: 60791 - DNA, 540 bp, Unknown
  Obtained from environmental sample
  misc_feature (1)..(540): n is a, c, g, or t
atggctatagtcgcaaaaaaaatacaggaaagcaaaaccaaagctattggggaactgaaagaatctttcagcgcatcgcaggactttattttcaccgattaccgcgggttaaccgtggagcagattaccaatctgcggaaaaacctccgcgccaagcaggttgagtacaaggtggtgaagaacaattttgcccgcatcgcttttcagcagctttccgcacccgatgttgcgtcctaccttgtcggcccgaccgctgtggcaattgccccgaaggactcaagcgaggttgcgaaaatactctttgaatttgccaaagaagtgccaaacttaaaggtcaaaggcgcccttgtcgggagtacggtgtacaatgcctcccagacagaggcgtattccaaactgcccggcaggctggagcttatttccatgcttatgtcggttatgaacggcccggcgcgcaaccttaccgccgcgttaaacgatattccgtcgcgcttggtgcggactgtcaaggctatcgccgacaaaaaagcaggcgcataa

SEQ ID NO: 60792 - protein, 179 aa, Unknown
  Obtained from environmental sample
  DOMAIN (7)...(105): Ribosomal protein L10
  misc_feature (1)..(179): Xaa is any amino acid
MAIVAKKIQESKTKAIGELKESFSASQDFIFTDYRGLTVEQITNLRKNLRAKQVEYKVVKNNFARIAFQQLSAPDVASYLVGPTAVAIAPKDSSEVAKILFEFAKEVPNLKVKGALVGSTVYNASQTEAYSKLPGRLELISMLMSVMNGPARNLTAALNDIPSRLVRTVKAIADKKAGA

SEQ ID NO: 60793 - DNA, 552 bp, Unknown
  Obtained from environmental sample
  misc_feature (1)..(552): n is a, c, g, or t
atggaattaaaccgcggctcccccggaaccgcggtgcgtgagaaaacattctattatatcccgtggcttaatcgccttctccattattggatttctacggtaccgcccgccgcggtaatcgcgtctttaatcttcgcggcttcttccttggaaacattttccttgaggggcttgggtacgccttcaacaaggtctttggcttctttaaggccaaggttggtgatcgttctgacttccttgataaccgcgattttcttggattcctcgaaagccttaagaacaacggtaaactcggttttttcctcagccgccgcgggagccgccccgccgccaccgccgccgaccgctaccgccacaggggccgctgcggacacgccgaatttctcttccatcattttaaccagttctgaaacttccagaacggtcatgaagcaatcgctccagaatttcttcttttgtggctgccatattatctcttcctaccaatgtgttacgcgactcatacgagttgcgcttattaaaaccgacaggaacggcagcttgaacttataa

SEQ ID NO: 60794 - protein, 183 aa, Unknown
  Obtained from environmental sample
  misc_feature (1)..(183): Xaa is any amino acid
MELNRGSPGTAVREKTFYYIPWLNRLLHYWISTVPPAAVIASLIFAASSLETFSLRGLGTPSTRSLASLRPRLVIVLTSLITAIFLDSSKALRTTVNSVFSSAAAGAAPPPPPPTATATGAAADTPNFSSIILTSSETSRTVMKQSLQNFFFCGCHIISSYQCVTRLIRVALIKTDRNGSLNL

SEQ ID NO: 60795 - DNA, 345 bp, Unknown
  Obtained from environmental sample
  misc_feature (1)..(345): n is a, c, g, or t
atgaccgttctggaagtttcagaactggttaaaatgatggaagagaaattcggcgtgtccgcagcggcccctgtggcggtagcggtcggcggcggtggcggcggggcggctcccgcggcggctgaggaaaaaaccgagtttaccgttgttcttaaggctttcgaggaatccaagaaaatcgcggttatcaaggaagtcagaacgatcaccaaccttggccttaaagaagccaaagaccttgttgaaggcgtacccaagcccctcaaggaaaatgtttccaaggaagaagccgcgaagattaaagacgcgattaccgcggcgggcggtaccgtagaaatccaataa

SEQ ID NO: 60796 - protein, 114 aa, Unknown
  Obtained from environmental sample
  DOMAIN (46)...(114): Ribosomal protein L7/L12 C-terminal domain
  misc_feature (1)..(114): Xaa is any amino acid
MTVLEVSELVKMMEEKFGVSAAAPVAVAVGGGGGGAAPAAAEEKTEFTVVLKAFEESKKIAVIKEVRTITNLGLKEAKDLVEGVPKPLKENVSKEEAAKIKDAITAAGGTVEIQ

SEQ ID NO: 60797 - DNA, 2712 bp, Unknown
  Obtained from environmental sample
  misc_feature (1)..(2712): n is a, c, g, or t
atgtcgaagggaaagaatgccagcaagcgcatctatatagggaatgacattcaagatgttatggatctgccggatctgatcgatattcagcttagttcctacgagcgttttttacaacgggataaaacaaggggccgcgagaaagtggccttgcaggggctggaagaagttttccagtcgacctttcccattgacagccccaatggcgacatgaagctcacttatgaatactacacgcttgacgaggacgccgtcaaattctccgaactggactgcaagcagaaaggcattacctacgcgattccccttaaagcgagggttaacctgatcttccagcagacgggcgagatcaggcagaaagacatatacatgggcgacattccgatcatgagcgagcgggggactttcatcatcaacggcgcggagcgcgtggttgtttcacagctccaccgttctcccggcgttatcttcagccatgagaaagggattttttcctcccgtatcataccttaccggggcagttggctggaatttgaaattgaccagaaacgcgagcttatctacgcgaaggttgacaggaaaaaacgcatacttggcacgatcttcctgcgcgcccttggctttgacagccgcgaggaaattatcaaggctttctatgttaccgagaccctcaaagtcaaggacgaccgcgagttcagggacaatttatcaggacaggttcttgccgccgctgtttggataaaagataccgccgcgggccggaaaagcggaaaacaaaccgatacccacgaagggatgaaaaaactgttcaaggcgggtgagaagcttcatccccacaatgttgacgagcttctctcaaacaacgtcaagtcaatcgaagtcataaaattccttgaccttgaggacccctctgacgagaagtcctataattattctttgaagtcggatattctcctcaattgcttcgagcgggaagagataaaatataccaaagagggcaatgaagagcctacaaaagaagaagccctcatggcggtattcgccgtactgatgcanggagaaaccatatccatagacgccccggagaaagagcttacgggaatgttttttaccagccgccgctatgatttgggcagggtgggccgctacaaactcaataaaaaatttaactttaatcctcccttggaagactataccctgaccaaagaagatattatcgccacgatgaaatttcttatcaaggtttatgtgggcgctgaaaactttgacgatattgaccatctgggcaaccggcgggtgcgttctgtcggcgagctgatggctgttgccatgaagaccgctttcagccgcatggagcgtatcgccaaagagcgaatgagtttgaaagaaaccgacacgattaaaccgcaggatttaatttccattaagccgatagtcgcggcaatcaaggaattctttggttccagccagctttcgcagtttatggatcaggtaaatccccttgcggaactgacccacaaacggcggctcaatgctttgggccccggcggtctttcccgcgaacgggccggctttgaagtccgcgatgtccattacacccactacggcagaatgtgccccattgaaacgccggaaggcccgaatatcggcctgattgtatcgctggcaaattacacccgtgtcaacgaatacggctttttggaaactccttaccgcaaggtgaacaagggtatcgccaccagagatattgagtacctttccgccatggacgaagaccgctattttatagcccaggcttcggcaaaactgaaagacaacggctcctttgcggatgatcaaatttcatgccgcaaacagggcgattatgccacccgtctgccgggcgatattgaatacatggatgtttcacccaagcagattatttcggtttccgcttcactcatcccgtttctggagcatgatgacgctaaccgcgccctcatgggttccaacatgcagcggcaggctgtgcctctggttttcacggaagcgccaagggtcggcactggaatggagggcaagtgcgcctacgattcgggggttctttgcaaagcccggcggggcggaacggtgataaacgttagttcccaggaagtttgcattgatccggacgataaaaactataccgttcctgaaacaaacgccgatggcattgacgtgtatcgcctggttaagtaccagaggacaaaccaggacacctgttacaaccagcggccaatagtcaagcttggagacaagattgtcaaagggcaggtcatcgctgacgggcctgccacaaaaaacggcgaattggctttgggcaggaatatcctggtgggttttttgccctggaacggttacaactacgaggattcaattttaatttcccagagggtggtaaaggatgatatgttcacctctatccatataaaagaattttctaccgaggtaagggaaaccaagcttgggccggaaaagataacacgggacgttcccaatacttccgaaaaaagcctggataacctggacgcggaggggattatccgcgtgggggcaaaagtccgctccgatgatatccttgtgggcaaggtaaccccaaaaagcgaaaccgaaacaacccccgaatttaagctccttaactcgatattcggcgaaaaggccaaagaagtgagggactcatctcggccgatctga

SEQ ID NO: 60798 - protein, 903 aa, Unknown
  Obtained from environmental sample
  DOMAIN (151)...(434): RNA polymerase Rpb2, domain 2
  misc_feature (1)..(903): Xaa is any amino acid
MSKGKNASKRIYIGNDIQDVMDLPDLIDIQLSSYERFLQRDKTRGREKVALQGLEEVFQSTFPIDSPNGDMKLTYEYYTLDEDAVKFSELDCKQKGITYAIPLKARVNLIFQQTGEIRQKDIYMGDIPIMSERGTFIINGAERVVVSQLHRSPGVIFSHEKGIFSSRIIPYRGSWLEFEIDQKRELIYAKVDRKKRILGTIFLRALGFDSREEIIKAFYVTETLKVKDDREFRDNLSGQVLAAAVWIKDTAAGRKSGKQTDTHEGMKKLFKAGEKLHPHNVDELLSNNVKSIEVIKFLDLEDPSDEKSYNYSLKSDILLNCFEREEIKYTKEGNEEPTKEEALMAVFAVLMXGETISIDAPEKELTGMFFTSRRYDLGRVGRYKLNKKFNFNPPLEDYTLTKEDIIATMKFLIKVYVGAENFDDIDHLGNRRVRSVGELMAVAMKTAFSRMERIAKERMSLKETDTIKPQDLISIKPIVAAIKEFFGSSQLSQFMDQVNPLAELTHKRRLNALGPGGLSRERAGFEVRDVHYTHYGRMCPIETPEGPNIGLIVSLANYTRVNEYGFLETPYRKVNKGIATRDIEYLSAMDEDRYFIAQASAKLKDNGSFADDQISCRKQGDYATRLPGDIEYMDVSPKQIISVSASLIPFLEHDDANRALMGSNMQRQAVPLVFTEAPRVGTGMEGKCAYDSGVLCKARRGGTVINVSSQEVCIDPDDKNYTVPETNADGIDVYRLVKYQRTNQDTCYNQRPIVKLGDKIVKGQVIADGPATKNGELALGRNILVGFLPWNGYNYEDSILISQRVVKDDMFTSIHIKEFSTEVRETKLGPEKITRDVPNTSEKSLDNLDAEGIIRVGAKVRSDDILVGKVTPKSETETTPEFKLLNSIFGEKAKEVRDSSRPI

SEQ ID NO: 60799 - DNA, 426 bp, Unknown
  Obtained from environmental sample
  misc_feature (1)..(426): n is a, c, g, or t
ttgatcatccgcaaaggagccgttgtctttcagttttgccgaagcctgggctataaaatagcggtcttcgtccatggcggaaaggtactcaatatctctggtggcgatacccttgttcaccttgcggtaaggagtttccaaaaagccgtattcgttgacacgggtgtaatttgccagcgatacaatcaggccgatattcgggccttccggcgtttcaatggggcacattctgccgtagtgggtgtaatggacatcgcggacttcaaagccggcccgttcgcgggaaagaccgccggggcccaaagcattgagccgccgtttgtgggtcagttccgcaaggggatttacctgatccataaactgcgaaagctggctggaaccaaagaattccttgattgccgcgactatcggcttaatggaaattaa

SEQ ID NO: 60800 - protein, 141 aa, Unknown
  Obtained from environmental sample
  misc_feature (1)..(141): Xaa is any amino acid
MIIRKGAVVFQFCRSLGYKIAVFVHGGKVLNISGGDTLVHLAVRSFQKAVFVDTGVICQRYNQADIRAFRRFNGAHSAVVGVMDIADFKAGPFAGKTAGAQSIEPPFVGQFRKGIYLIHKLRKLAGTKEFLDCRDYRLNGN

SEQ ID NO: 60801 - DNA, 1059 bp, Unknown
  Obtained from environmental sample
  misc_feature (1)..(1059): n is a, c, g, or t
gtgcggatgtattccggctcttttaatgtgggctccacggtctacaacataggcaagaaaaagcgggaacgcgccaaccggattctgcgtatgcattccaacaggcatgagcctatggacacgctttcggcaggggacattggcgttattatcggccttaaactggcccagactggcgacacccttggcagtgaaggctggcctctgctcctggaaaaaatgcagttccctgagcctgttatctccgtttccatggaacccaggaacctttcggaacaggagaagctaaaagaggttcttgccctgctttccaaagaagatcctacttttatcgcgaaggaaaatgaggaaacaggccagctcattatctccggcatgggagaacttcaccttgacgtgcttgttacccgaatcctgaaggagtttaacctgggggcaaaggtaggcgctccgcaggttacctaccgcgagtccatcagcgttccggtagaaaggacggagagcttttcaaaggtaatcgccggaaaggaaaacgcagcgtctttaaccataaaagtcgaaccgctgaagcggggttccggaaacaagtacgcctgggcggccaaatccagagacattcccgaagagatccaggatgcggtggagcgcggcgtaaacgcctcgttccagtccggcatagcccttggctacccctgcatcgacattggcgttacgattaccggcgttgaatattccgagctaacaggtaccgaaatggcctttgaagcctgtgcttctttgggttttgacgaggcctgtaaaaacgcctctccggtacttctggagccgattatgtctgtgagcatggtgtcccccaaggaatcggtgggagacgtaatcagcctgatgacccagcgtggcggacaggtgttaagcatggaatccaaagccagcggggacgaagtaaaagcccaggctccgatggcaaagatgttcggctttatgacggctctccgcagcgtgagccagggccgtgcggtttttacgatggaattttcgcatttcgagaggaaggggtaa

SEQ ID NO: 60802 - protein, 352 aa, Unknown
  Obtained from environmental sample
  DOMAIN (1)...(63): Elongation factor Tu domain 2
  misc_feature (1)..(352): Xaa is any amino acid
MRMYSGSFNVGSTVYNIGKKKRERANRILRMHSNRHEPMDTLSAGDIGVIIGLKLAQTGDTLGSEGWPLLLEKMQFPEPVISVSMEPRNLSEQEKLKEVLALLSKEDPTFIAKENEETGQLIISGMGELHLDVLVTRILKEFNLGAKVGAPQVTYRESISVPVERTESFSKVIAGKENAASLTIKVEPLKRGSGNKYAWAAKSRDIPEEIQDAVERGVNASFQSGIALGYPCIDIGVTITGVEYSELTGTEMAFEACASLGFDEACKNASPVLLEPIMSVSMVSPKESVGDVISLMTQRGGQVLSMESKASGDEVKAQAPMAKMFGFMTALRSVSQGRAVFTMEFSHFERKG

SEQ ID NO: 60803 - DNA, 342 bp, Unknown
  Obtained from environmental sample
  misc_feature (1)..(342): n is a, c, g, or t
atgctggtaccaataaacgacatcaaggttaaacgaaggatcagaaaggaaatgggcgacatcgcggctcttgctgacagcatgaaacatttcggacagatcaacccgattctaataacaaaaaaaaatgtccttatcgccgggtgcaggcggcttgaagctgcccgtagtctggggtggagcagcataaacgcggtagtggccgaaattcccgacgagctttcaaaactggaatacgagctggaagaaaacatccaacgcagggattttcccagactgaaacccacgacgcggtcaaaagaatacaacacctgcgcaatccttcccgattccgccgaataa

SEQ ID NO: 60804 - protein, 113 aa, Unknown
  Obtained from environmental sample
  DOMAIN (1)...(85): ParB-like nuclease domain
  misc_feature (1)..(113): Xaa is any amino acid
MLVPINDIKVKRRIRKEMGDIAALADSMKHFGQINPILITKKNVLIAGCRRLEAARSLGWSSINAVVAEIPDELSKLEYELEENIQRRDFPRLKPTTRSKEYNTCAILPDSAE

SEQ ID NO: 60805 - DNA, 648 bp, Unknown
  Obtained from environmental sample
  misc_feature (1)..(648): n is a, c, g, or t
gtggactataggttattcggcntactacaccacggcaatttggttcgctttgacaaacccggaaattcgctgggcttaacccttaccggttcgaccttggcaggccccgtttgggcggattatatgcgggaaatccaccaggggctcccctacagggattttntgcgtcccgccacaggtctggttgacataaccgtttgcctcaaatccgggctcttaaaaacgccttcctgttccgaaggagtaacattaaccttccttgaaggcacccagccggtgcttttttgcgaggagtgtggcagtaccagggggtttgaggccttcaggtatattgaattgaatcctatgttcttcgacacattgaatttcataaacgatcttaaaatgccggttctggacgaggcttttctgagggaaattgaggaagatatgcgcaggtcgcagaccaacctaaccattagcagaagcgatgttcccagccccggcacaccgccagccttaaatatgccaaccctaaatttggatttgatagaaagtaacccgcaaccggttccgcaacatgtcagtgaaaacgattctgatgagaaagaaacttttggtatggatgacgacttggaacccccttcttacaacccggttctggactaa

SEQ ID NO: 60806 - protein, 215 aa, Unknown
  Obtained from environmental sample
  misc_feature (1)..(215): Xaa is any amino acid
MDYRLFGXLHHGNLVRFDKPGNSLGLTLTGSTLAGPVWADYMREIHQGLPYRDFXRPATGLVDITVCLKSGLLKTPSCSEGVTLTFLEGTQPVLFCEECGSTRGFEAFRYIELNPMFFDTLNFINDLKMPVLDEAFLREIEEDMRRSQTNLTISRSDVPSPGTPPALNMPTLNLDLIESNPQPVPQHVSENDSDEKETFGMDDDLEPPSYNPVLD

SEQ ID NO: 60807 - DNA, 813 bp, Unknown
  Obtained from environmental sample
  misc_feature (1)..(813): n is a, c, g, or t
ttgaggtgcgaattaattatgaacgagttgttgatagggacaagcgggtatgattatcctgattggaaaggcgggttttatcctgaaaaacttgcccgcgctaaatttttggaatattactcggagcattttaattctctggaattgaacggcacttattaccgtatgcccgcgccggatcaaatgcgcaagatgatagaacggtcggggggcagggtcagatttaccgttaaggcgtttcaggatttgactcattctcttgatagaagcaaatatcaaatgctgatttatgaatttataaaggcgcttgagccgctgattacaggcaatcttttggtctgcgccctgtttcagtttcccgaaagtttccattacgaaaaggatgaaagattgtatttggacgcgctcttgaaagagctcggcgatgttcctgttgttgttgaaatgcggaatgtcggctggcagaacgatcaggtgtataacgccctgcgtcagcgtaatactgggtggtgtataacggataaccccaatcttaaaaatcttatgaagctggattatgtttgtacaagcgatattgcgtatatgcgttttcacgggcgcaattcagatatgtggtacaagggtgataatgtttcgcggtatgactatatgtattcggatacggaattgcggtcttttgtaaatccgattctggaactattaaagcataccaggattgtccagttgtttttcaataaccacgctaaaagtcaggctgtgcttaacgcaaaaaagattgagatgctgataagggagatgagaaaacctgattaa

SEQ ID NO: 60808 - protein, 270 aa, Unknown
  Obtained from environmental sample
  DOMAIN (26)...(264): Protein of unknown function DUF72
  misc_feature (1)..(270): Xaa is any amino acid
MRCELIMNELLIGTSGYDYPDWKGGFYPEKLARAKFLEYYSEHFNSLELNGTYYRMPAPDQMRKMIERSGGRVRFTVKAFQDLTHSLDRSKYQMLIYEFIKALEPLITGNLLVCALFQFPESFHYEKDERLYLDALLKELGDVPVVVEMRNVGWQNDQVYNALRQRNTGWCITDNPNLKNLMKLDYVCTSDIAYMRFHGRNSDMWYKGDNVSRYDYMYSDTELRSFVNPILELLKHTRIVQLFFNNHAKSQAVLNAKKIEMLIREMRKPD

SEQ ID NO: 60809 - DNA, 1869 bp, Unknown
  Obtained from environmental sample
  misc_feature (1)..(1869): n is a, c, g, or t
atgaccacagcccccgctaaagacgaaaccgcttccacaggctcagattttatcagtgaatttattaaagaagatttggcattgggcagattcagttatgtgcatacccgtttcccgcccgagcccaacggctggctgcacatcggccactgcaaggcgttctacatcgactttacgatggcggaacgtttcggcggcaagtgcaatctccgttttgatgacaccaatcctgaaaaagaagatatatcatacgttgaggcgatcaaacgcgatgttaaatggatgggttatgactgggaggacagggagtattacgcttcggactattacgagtacctgtacgatctggctgtaaagatcatcaaaaaggggaaggcttatgttgatgatctttccgatgttgaaatgagcgaataccgtggaaacgcgnttcangataaaaacaacataacagtgacgccgccgggtagaaacagcccgtacagagaccgttctgtcgaagaaaatctagacctcttcgcaaaaatgcgctccggcgaatatgcggacggagcaaaaaccctacgcgcgaaaattgatatgacacaccctaacttaattatgcgcgatcccgtcatgtaccgcatacgccgtgaaacccattatcgtaccggaaattcatggtgtatctatcccatgtatgattttcaacaccctctttccgacgcaaaagagggaattacccactctctttgttcgcttgaatacgaaatccaccgccccttgtacgattggtttatccgcgaggcggaagtttttccttcacggcagatagaatttgcccgccttaatttaagccataccgttatgagcaagcgttggcttttaaagctcgtgcagaataaatacgttacaggttgggacgatccgcgaatgcccacaatagccggtcttcgcagacggggttacactcctgaggcaatccgcagttttgtctcgcaaattggcatcgcaaagacggacagcatggtagacatcgctttccttgaatactgtcttcgcgaagacctgaacaaacgcgctttgcgcgtaatggcggttttacgccctcttaaattgattatcgaaaattgggaagaaggtaaaagtgaactttattcaagcgaagaaatggaagcggtaaacaatcccgaagacgaatccgccggaaaacgctttgtaccattttcccgagaactgtggattgaacgtgaagattttgaggagactcctccgcccaaatatttcaggctttttcccggaaactccgtccgtctgcgttatgcgtatattgttacatgcacaggttttgacaaagacgcaagcggcaatattacagccgtgcgctgcacctacgatcccgaaacaagaggcggtaacgctaaagacaacaaaaaagtaaaaggtacgatacattgggtttccgcagcgcattctgtccccatacaagcccgtatttacgattacttgttcggcgtagaaaagcctatggaagttcctaatcgcgcggacggctctcccggcgaatttaccgataacttaaatcccaattcgctggaagtgattgaaaacgcgcagggagaaccgttactcgcaaatgtttcgccgggcaaagttttccaatttgaacgccttggctattttgtccgcgatcccgacatttccgctaacggtaaacctgtttttaacaaaacaatcggtcttcgcgacacatgggcaaagatagctaacaaagggttaatcaggttttctcatctcccttatcagcatctcaatcttttttgcgttaagcacagcctgacttttagcgtggttattgaaaaacaactggacaatcctggtatgctttaa

SEQ ID NO: 60810 - protein, 622 aa, Unknown
  Obtained from environmental sample
  DOMAIN (354)...(557): tRNA synthetases class I (E and Q), anti-codon binding domain
  misc_feature (1)..(622): Xaa is any amino acid
MTTAPAKDETASTGSDFISEFIKEDLALGRFSYVHTRFPPEPNGWLHIGHCKAFYIDFTMAERFGGKCNLRFDDTNPEKEDISYVEAIKRDVKWMGYDWEDREYYASDYYEYLYDLAVKIIKKGKAYVDDLSDVEMSEYRGNAXXDKNNITVTPPGRNSPYRDRSVEENLDLFAKMRSGEYADGAKTLRAKIDMTHPNLIMRDPVMYRIRRETHYRTGNSWCIYPMYDFQHPLSDAKEGITHSLCSLEYEIHRPLYDWFIREAEVFPSRQIEFARLNLSHTVMSKRWLLKLVQNKYVTGWDDPRMPTIAGLRRRGYTPEAIRSFVSQIGIAKTDSMVDIAFLEYCLREDLNKRALRVMAVLRPLKLIIENWEEGKSELYSSEEMEAVNNPEDESAGKRFVPFSRELWIEREDFEETPPPKYFRLFPGNSVRLRYAYIVTCTGFDKDASGNITAVRCTYDPETRGGNAKDNKKVKGTIHWVSAAHSVPIQARIYDYLFGVEKPMEVPNRADGSPGEFTDNLNPNSLEVIENAQGEPLLANVSPGKVFQFERLGYFVRDPDISANGKPVFNKTIGLRDTWAKIANKGLIRFSHLPYQHLNLFCVKHSLTFSVVIEKQLDNPGML

SEQ ID NO: 60811 - DNA, 387 bp, Unknown
  Obtained from environmental sample
  misc_feature (1)..(387): n is a, c, g, or t
atgcgcaagtttctggctcattttcaaaacaaccttgatcttttgatacagaaaacctgggttgagaaggcggatgaatcgcgcaaggaaaaagtacaagacgacgttccgccctttatggcacggattgaacaggggaatttccagcaggcccttgagcaatttggctcaatactggaagaacttgcgtatctgctttttggactgcaaagctccaaagaggattttaccgagtataccttcaggatcgatttgcagatggggctgttctggtggtacggttccaggcttggcagtttgaaagacgcaggtaaaaccggcgctgtaaatgatgaaatcctttgggcgattttgcttatcggtatttgctatctgactaatttttag

SEQ ID NO: 60812 - protein, 128 aa, Unknown
  Obtained from environmental sample
  misc_feature (1)..(128): Xaa is any amino acid
MRKFLAHFQNNLDLLIQKTWVEKADESRKEKVQDDVPPFMARIEQGNFQQALEQFGSILEELAYLLFGLQSSKEDFTEYTFRIDLQMGLFWWYGSRLGSLKDAGKTGAVNDEILWAILLIGICYLTNF

SEQ ID NO: 60813 - DNA, 336 bp, Unknown
  Obtained from environmental sample
  misc_feature (1)..(336): n is a, c, g, or t
gtgatgctgaaactggaaggcctctcggttttttatggtggcatccatgccctgcggggtatcgacatggaagttccggacgccaagatcatcagccttattggcgcgaatggggcgggcaaaagcaccatgcttaacacgattgtgggacttgttaagcctgcttccggtaaagtcatctgggacggcgaggacataacgggcacagacccaaaggacattgtttcatgcggtcttgtaatggttcccgagggccgccacatcttcccgaatctgacagttaacgaaaacctaccctgggcgctacgcagaaacacactcggcgatctgtcatga

SEQ ID NO: 60814 - protein, 111 aa, Unknown
  Obtained from environmental sample
  misc_feature (1)..(111): Xaa is any amino acid
MMLKLEGLSVFYGGIHALRGIDMEVPDAKIISLIGANGAGKSTMLNTIVGLVKPASGKVIWDGEDITGTDPKDIVSCGLVMVPEGRHIFPNLTVNENLPWALRRNTLGDLS

SEQ ID NO: 60815 - DNA, 756 bp, Unknown
  Obtained from environmental sample
  misc_feature (1)..(756): n is a, c, g, or t
atgcttcgcacagataaggtgaccatgcagttcggcggccttacggctgtttccgatttttcaataaatgtgaatgacggcgagatcgtcgggcttatagggcccaatggcgcgggcaaaactacggccttcaacatgattacaggccaatacacccctaccagcggtcagatttttttcgaggaaaaaaatatcaccggcaagaagccccatgtaataacggaagcgggcattgccaggacttttcagaacatcaggctgttcagcaaaatgacagttatagaaaacatacttgccgcctgcacccttcgcgagaaaccccatttgtttgagtcggttctgcatctgccggcctacaaagccaaagaaaagcgctcttctgaatttgcatgtgaaatgcttgcctcggtcggccttcttgagaacgcggatgacaacgccgtgtccctgccttatggcaagcaacgccgccttgagattgtccgcgcactggcaacccgccccaagctccttttgcttgatgaaccggccgccgggatgaatccccaggaatcttatgaactaatggattttattgttgccgtacgcgacaagttcaggatttgcgttttgcttattgagcatcatatgcaggtagtgatgggcatctgctcgcgcctttatgtgcttgactacgggcataccatcgcggaagggccgcctcatgaaatccaaaacaacaagaaagtaatcgatgcctacctgggggtagagtga

SEQ ID NO: 60816 - protein, 251 aa, Unknown
  Obtained from environmental sample
  DOMAIN (27)...(226): ABC transporter
  misc_feature (1)..(251): Xaa is any amino acid
MLRTDKVTMQFGGLTAVSDFSINVNDGEIVGLIGPNGAGKTTAFNMITGQYTPTSGQIFFEEKNITGKKPHVITEAGIARTFQNIRLFSKMTVIENILAACTLREKPHLFESVLHLPAYKAKEKRSSEFACEMLASVGLLENADDNAVSLPYGKQRRLEIVRALATRPKLLLLDEPAAGMNPQESYELMDFIVAVRDKFRICVLLIEHHMQVVMGICSRLYVLDYGHTIAEGPPHEIQNNKKVIDAYLGVE

SEQ ID NO: 60817 - DNA, 1086 bp, Unknown
  Obtained from environmental sample
  misc_feature (1)..(1086): n is a, c, g, or t
atgagcatggcattatccggcactgttctaacaaagaaacagaaaaacatatacacccttgttttgcttcttgtccttgccgtgtttgtaattatcgccgacaaacttttcagctcgtttgttttgcgtatctttaatctctgcggcatttatatcatcctggcgctttccctaaatttgattaacggctttaccgggcttttttcccttggccacgccggctttatggcagtgggggcgtacacaagcgcccttctgacaatgagtccaacatcaaagcaaatgaatttcttccttgccccaattgtcgcgcccttggcgaatctaagccttccgtttattcccgccctgatcgtcgcgggccttctggcaggattggtgggctttctcatcggcgctcctgctttgcgccttcgcgacgattatcttgctatagctactctgggtttttcggaaataatcagggtggttataacgaatttgcaatctgttaccaacggcgctttgggccttaaagggctgcccaggttttctacgacctacatgatctggggagttgcctttatctctgtcgtgtttattatcgcgcttataaattccgccttcgggcgttcctgcaaagctgtaagggacaatgaaattgccgcccaggcaatgggaattaacgtggccggaataaaaatcacaagttttacgatagcaagttttatggcgggcataggcggcgcaatgctgggacatatgttaagcaccattgatcccaggatgtttacctttacccttacgtataacgttttgctcatagtagttcttggaggaagcggcagtatttcaggatcgattattgcggcgattattgtaacaatttccatggaagccctgcgttttctcgacggtcctttaaattttctctttttccgcacacagggactgccgggtttacgtatggttgtgttcagtatccttttactgttggtaattatattcaggcaacagggcctgatggggaaccgcgaattatcctgggacatggttgtcaatttcaagtcgaaactgcccaggtttaaaaagacgggggccgcctga

SEQ ID NO: 60818 - protein, 361 aa, Unknown
  Obtained from environmental sample
  DOMAIN (40)...(327): Branched-chain amino acid transport system / permease component
  misc_feature (1)..(361): Xaa is any amino acid
MSMALSGTVLTKKQKNIYTLVLLLVLAVFVIIADKLFSSFVLRIFNLCGIYIILALSLNLINGFTGLFSLGHAGFMAVGAYTSALLTMSPTSKQMNFFLAPIVAPLANLSLPFIPALIVAGLLAGLVGFLIGAPALRLRDDYLAIATLGFSEIIRVVITNLQSVTNGALGLKGLPRFSTTYMIWGVAFISVVFIIALINSAFGRSCKAVRDNEIAAQAMGINVAGIKITSFTIASFMAGIGGAMLGHMLSTIDPRMFTFTLTYNVLLIVVLGGSGSISGSIIAAIIVTISMEALRFLDGPLNFLFFRTQGLPGLRMVVFSILLLLVIIFRQQGLMGNRELSWDMVVNFKSKLPRFKKTGAA

SEQ ID NO: 60819 - DNA, 603 bp, Unknown
  Obtained from environmental sample
  misc_feature (1)..(603): n is a, c, g, or t
ttggtaaaagaagccgcaaagcaggaaattgtacgaagatatttcaggacatggtgttattataaagaaggccgtctgccaatcggcgcggttgaaaaacttgagattataatgaaacagcttggtatttctcccgaatacggtctggcggtaaggcccgcgctggaaaaatccgaacaaaacaaatgccccgcgatggcgctgattttaaacggcggaagcgttataaccggaaaaacgacaaatgtcctgacggcgtcttccagccttgtgctgaattgcattaagcaattggcgggtattcctgacgacatccaccttattgcgcctcatgttctggaacccatgttgatgcttaaggaaaaaatcctctgcgacaaaaatcctctgctcagtcttgaggaggttttggatgcgctgtctatctgcgcggcaaccgacccctccgcccataaatgtctttttaaactgcaagagctaaagggatgcgaagctcattcatcacacatgatatcgcggtcggacgaaaacgcccttaaaaaactgggcgtaaacgtaacctgtactcccgaattttcttctgataatctatactatatttga

SEQ ID NO: 60820 - protein, 200 aa, Unknown
  Obtained from environmental sample
  misc_feature (1)..(200): Xaa is any amino acid
MVKEAAKQEIVRRYFRTWCYYKEGRLPIGAVEKLEIIMKQLGISPEYGLAVRPALEKSEQNKCPAMALILNGGSVITGKTTNVLTASSSLVLNCIKQLAGIPDDIHLIAPHVLEPMLMLKEKILCDKNPLLSLEEVLDALSICAATDPSAHKCLFKLQELKGCEAHSSHMISRSDENALKKLGVNVTCTPEFSSDNLYYI

SEQ ID NO: 60821 - DNA, 1620 bp, Unknown
  Obtained from environmental sample
  misc_feature (1)..(1620): n is a, c, g, or t
ttgatggtaattatgacaaagtatatttttgtaacaggtggcgttgtttcgggacttggcaagggaattaccgccgcttctttaggcaggctgctcaaacagcgggggctgaaagttgcggcccaaaaactcgacccgtatatgaacatagaccccggaaccatgagtccgttccagcacggcgaggtttttgttaccgacgacggcgcggaaactgatcttgacctggggcattacgagcgtttcattgatgaaaacctgacaaaaaggagcaacctgacatccggccaggtttactggaatgtacttggccgcgaacgcgcgggaggctatcttggcggtacagtgcaggttataccccatgttacagaggaaataaaaaggtttatttataccggagcagaaaataaccacgtcgacgtgatcatcaccgagattggaggcacgacgggcgatattgagagccagccgtttttagaggcgattcggcagatttctcttgagaaaggccgcgagaactgtctgttcattcacgttaccctgattccgtttttaaaatgttcaggcgagcataaatcaaaaccgactcagcattcggttaaggagctgcgctccatgggtatttcacctaacgttataatcgcgcgcgccgacgaacctttaagcggcggcattaaggaaaaaatatcgctgttttgcaatgtaaagatcgactgcgtaatagagaacacctctattcagtctctgtacgaagtgccgctcatgctacaccaaaacggcctggataaagtcgtttgccgggaactggcccttgacaccgccgaacctgatttaaacgaatggcggaagatggttcaaaaaatcggggagaggaaacaggaagtaaacatttcgatagtcggtaaatacgttcaactgcacgacgcgtatttgtccatcattgaaagtttgaatcacgccgggtttgaagtcggcgtaagagtaaacattgcatggattgacagcgccgaggtaaccgctgaaagcatagtaggtctgttaggcgggacggacggcatgatcgttcccggcggttttggcgacaggggaattgaggggaagatcaacgcctgccgttacgcgagggaaaacaacataccgtatttggggatttgccttggaatgcagattgccgtgattgaatttgcgcgtaacgtttgcggcctggaacgcgcaaactcaagcgagtttgacgagacttcgccccatcctgtaatcgatataatgccgggccaggccggtatgctaggctctggcggtaccatgcgcctgggcgcttatccctgcaagatcacaaaaggcacaattttaagcaggctttatgactcggaggaaataagcgaaagacaccgccaccgctttgaatttaacaatgcctacctggaaagcctgacaaacaagggccttgttgtctccggcgcatctcctgacggcagccttgtcgaagcaatcgagttgccgaatcatcgcttttttaccgctgttcaatttcatccagaattcaagagccgtcccaataaaccccacccgctttttttgggacttgtaaaggcggcgtttagtatgcgaggagagcgttaa

SEQ ID NO: 60822 - protein, 539 aa, Unknown
  Obtained from environmental sample
  DOMAIN (297)...(513): Peptidase C26
  misc_feature (1)..(539): Xaa is any amino acid
MMVIMTKYIFVTGGVVSGLGKGITAASLGRLLKQRGLKVAAQKLDPYMNIDPGTMSPFQHGEVFVTDDGAETDLDLGHYERFIDENLTKRSNLTSGQVYWNVLGRERAGGYLGGTVQVIPHVTEEIKRFIYTGAENNHVDVIITEIGGTTGDIESQPFLEAIRQISLEKGRENCLFIHVTLIPFLKCSGEHKSKPTQHSVKELRSMGISPNVIIARADEPLSGGIKEKISLFCNVKIDCVIENTSIQSLYEVPLMLHQNGLDKVVCRELALDTAEPDLNEWRKMVQKIGERKQEVNISIVGKYVQLHDAYLSIIESLNHAGFEVGVRVNIAWIDSAEVTAESIVGLLGGTDGMIVPGGFGDRGIEGKINACRYARENNIPYLGICLGMQIAVIEFARNVCGLERANSSEFDETSPHPVIDIMPGQAGMLGSGGTMRLGAYPCKITKGTILSRLYDSEEISERHRHRFEFNNAYLESLTNKGLVVSGASPDGSLVEAIELPNHRFFTAVQFHPEFKSRPNKPHPLFLGLVKAAFSMRGER

SEQ ID NO: 60823 - DNA, 774 bp, Unknown
  Obtained from environmental sample
  misc_feature (1)..(774): n is a, c, g, or t
ttgctcgctatgaatattgaagctgatacctactccattaagcaaaggcccattatctcccaggataaaaaatacagtatcgcgataatccttggcggagatgggactgttctatccgcagccagaacggtatccaggtttggtatcccgattttcccaataaacctgggaacatttggctttattgccgaagtacaacctcttgaatggcgggatgttttcaacaggtggatggcagggaaggtacccgtttctcgacgtctcatgcttgaagtctcggtagaaagggacggccgcaaggtctttcgggaatcctgccttaacgatgtgattatttcatcctccggcattgccaaaataattaatctgcgccttttaagcagggaaaggggaatggagacagacttaaagctaggctcataccgctctgacggcctaataatagccactcctaccggatcgaccgcttactcggctgcggtaggcggtcccattgttgatcctgaactagaggcgctgattttgagccccatttgccccttcatgctcacaaaccgtccctttgtattaccggcagccggaacggtgattgcggaggtggcggacgaacagcaaagcggggtaatattgacattggacggccaggttaaggaaaagttaaaaaaaggggacagggtttttattgagaaagcgccttatccatgcgtattaattgcgtcaagccgcagcggtttttatacagccctcaggaaaaagctttcctgggcgggataa

SEQ ID NO: 60824 - protein, 257 aa, Unknown
  Obtained from environmental sample
  DOMAIN (1)...(241): ATP-NAD kinase
  misc_feature (1)..(257): Xaa is any amino acid
MLAMNIEADTYSIKQRPIISQDKKYSIAIILGGDGTVLSAARTVSRFGIPIFPINLGTFGFIAEVQPLEWRDVFNRWMAGKVPVSRRLMLEVSVERDGRKVFRESCLNDVIISSSGIAKIINLRLLSRERGMETDLKLGSYRSDGLIIATPTGSTAYSAAVGGPIVDPELEALILSPICPFMLTNRPFVLPAAGTVIAEVADEQQSGVILTLDGQVKEKLKKGDRVFIEKAPYPCVLIASSRSGFYTALRKKLSWAG

SEQ ID NO: 60825 - DNA, 1629 bp, Unknown
  Obtained from environmental sample
  misc_feature (1)..(1629): n is a, c, g, or t
atgatagaagaactgagcgtaaggaattttgcgctgattgacagccttaacctctcatttgaaaaaggctttacggttttatcgggggagacgggagccggaaaatcaataatcgtgggttcccttagttttcttcttggcgcaaaagcggacagcgaaattatccgttccggttccgaagaggcaagcgtttcggcggtggttaccgttgacggcaaaaaccgggacgccctgcaatggcttagccagcgggatattgagccggaagattccaggcttgttatccggcgcagcgttaaagcttcgggccgcaattcaatctatgtacaaaacatacctgtaacccggaacgatctcgcggaatttatggggcttatttttgaccttcacggccagcatacccacgaatcccttttgaaaaaagaaactcaccgtatttaccttgaccggttttcaggcttggaagacgaggtcgcggcctttagccaggtgtttacggagctggcggaaaagcgcaagacccttgaatcgttgaaccgttctgaaaaggaaagggggcagcggcttgagctgcttaattacgctattgaggaaattagcaaggccgctcccaaaaacggggagataaaagagctggaagccgaaacccagcgccttgcggattttgaaaagctaagccttcatgtaaacgccgtttcttcagcgctttttgaagactcggaatccaaggattccgctatctctttcttaagccttgggcgacgcctgagggcttcgctggagaacgccgcttccattgacagctctctttcgccgatgctaaagcgcctggaagatatttactacgaggctgaagatctggccgccgaattcagaaattaccggggccgcctgacctacgatcctgcgaagcttgaagaagcggaagaaaggcttgcccttctatacaaactgaaaaagaaataccgccctgcggaaaacgcagatgcaagcggccaggatgaaggcgggatattcgcctacaaaagcgaggccgaggcggagatagaagcgctttcaggagcgggggaaaaccaggacaaattgaggggcgaaataaaccgccttgaaagggatctttccgcaaaggctgccgttttaagcgccaagcgaaatgaaggggcaaagcgcctgggcgagggaataacgggtatcctttcccggctggggatgcccaaggcggtttttgctgcgaatgtgaagccaaaagccagggaagggggagccggtcttgtctgcgggccttggggttctgatgaggtggaattcatgatttccgccaataaaggagagccgctaaaagaacttgccaggattgcctcgggaggcgaattatcgcgcgttatgctggcaataaaaaccatcttattggattccgcgtccgcttcagcgtccgctgacactagcgcggagaccttgattttcgatgaagttgacaccggaataggaggagaagtggctctttcggtcggggaataccttgcacggatcggttcatcgcctgctgatnaatcgcctaccaataatgaaaacaaattttctggtgtacgcatttggccagtattgcagtacgtgccgataatcatctga

SEQ ID NO: 60826 - protein, 542 aa, Unknown
  Obtained from environmental sample
  DOMAIN (1)...(519): RecF/RecN/SMC N terminal domain
  misc_feature (1)..(542): Xaa is any amino acid
MIEELSVRNFALIDSLNLSFEKGFTVLSGETGAGKSIIVGSLSFLLGAKADSEIIRSGSEEASVSAVVTVDGKNRDALQWLSQRDIEPEDSRLVIRRSVKASGRNSIYVQNIPVTRNDLAEFMGLIFDLHGQHTHESLLKKETHRIYLDRFSGLEDEVAAFSQVFTELAEKRKTLESLNRSEKERGQRLELLNYAIEEISKAAPKNGEIKELEAETQRLADFEKLSLHVNAVSSALFEDSESKDSAISFLSLGRRLRASLENAASIDSSLSPMLKRLEDIYYEAEDLAAEFRNYRGRLTYDPAKLEEAEERLALLYKLKKKYRPAENADASGQDEGGIFAYKSEAEAEIEALSGAGENQDKLRGEINRLERDLSAKAAVLSAKRNEGAKRLGEGITGILSRLGMPKAVFAANVKPKAREGGAGLVCGPWGSDEVEFMISANKGEPLKELARIASGGELSRVMLAIKTILLDSASASASADTSAETLIFDEVDTGIGGEVALSVGEYLARIGSSPADXSPTNNENKFSGVRIWPVLQYVPIII

SEQ ID NO: 60827 - DNA, 816 bp, Unknown
  Obtained from environmental sample
  misc_feature (1)..(816): n is a, c, g, or t
atggcgaaagtaacaattgaagatcgtcatctgtattttgaaaagataaaaccttataaagccatgattgagtcccttatagtgcgggaagaaaaagttttattggaaatcagaaaggataacctgggagcggcgctaaaacggctggctttggtggaagatatgctttctttggccgccaattttatgataatcagcggcatttcacagtccatgctgaagctgcgcagcgaggaagccctgaatgacagcagaaaatccctttacaaagcggtaatttactttgaagagattgtaagcccgctggtagacgcgccattttcggattatgaggaccgcctcgctgaaattgacactatagacgctcaacaacgatataacctgataagaaaaacaggccttaccctgcagctccttgaatccgcctatggggacaatacaaaatggagatggacctttgttgatcttgaaggccggtttgccgccgttgccaaaaatactatgaacctgaaaacagccgtgataaatacggatccgagttcaccggactatgagcccacaatgtttcatttaaggctgataaaaaagctccttatgcaggccgctgatcgttaccgtgaaaagtacgaattatccaccaaccggatggatgattttaaaatggggataaactttctcaatgccctgcgccgcattcacgcgcttttaggtgaacggcctgatgccgagatggtcaagaaaaaggcggaaatttggtcttcaaaactggaaacggatcaaaagaagaaggaagaagcggttagcaggaaaatttaa

SEQ ID NO: 60828 - protein, 271 aa, Unknown
  Obtained from environmental sample
  misc_feature (1)..(271): Xaa is any amino acid
MAKVTIEDRHLYFEKIKPYKAMIESLIVREEKVLLEIRKDNLGAALKRLALVEDMLSLAANFMIISGISQSMLKLRSEEALNDSRKSLYKAVIYFEEIVSPLVDAPFSDYEDRLAEIDTIDAQQRYNLIRKTGLTLQLLESAYGDNTKWRWTFVDLEGRFAAVAKNTMNLKTAVINTDPSSPDYEPTMFHLRLIKKLLMQAADRYREKYELSTNRMDDFKMGINFLNALRRIHALLGERPDAEMVKKKAEIWSSKLETDQKKKEEAVSRKI

SEQ ID NO: 60829 - DNA, 2142 bp, Unknown
  Obtained from environmental sample
  misc_feature (1)..(2142): n is a, c, g, or t
ttgataaatcttgataaggtaacaaaaaaatacgaggggttggacggaacggaacttgcgatcagtgaaagccaggaacgtatgtccgtagtaacaacggaaaaagacgcgaaagaatttatcgagcttgcggcggcggaaaaccttgaagcggttgtaatagccgaagttactcctgaaaaacgccttgtaatgaattggaacggaaaaacaattgtaaacctttcaagagaattccttaacagcaacggagcggaaaaacacgcaaaagcccgtatcttccctccgactgttgatcacaaaaaaaaggaacaggacgcggagcgtttagaaaaatttattggcggtttaaatatatgctctcaaaaaggtcttgttgagcgttttgactcaagcgtaggagcggctacagttatcgcgccttacggcggaaaatatcagcttacgccttctcaagttatggcggcaaaaatacccgttcttaacggcgaaacaaaaacctgctctcttatgtcatggggttttgatcctgaaatatctaccgtaagcccataccacggcgctgtttttgccgttataatgtcgctggcgaaaataatcgccgcgggcggaagcagaaaacggtgctggctgtcttttcaggaatattttgaaaggttacgcgacgatcctttaaggtggggaaagcctgtatccgcgctgcttggcgcgcttgacgcccaactgggactggaaatagcggcaataggcggcaaggattcaatgtcaggctccttcactcttaaaaacggagaaaatatcgacgttccgccgactcttgtttcatttgccgtctctacagcaaaaatagacggcatactaacgcccgaattcaagcgcgccggaaactatgtttatctttatactccgccccgctctgtttttgaaaagacggattttatcgcattacgcgaatattttgatactgcggaaaaattaataaaagagaaaaaaattctttccgcgtgggctgttggttcgggcggaacggccgaagcggttgtaaaaatgtgcgccggtaacagaattggttttaagacggaacaaacgcttttctatgagccgggcttcggcggcctaatatttgaaacggacgcgccgttacaaacaggcagtttattgggacgcactacagacgaatacacgcttagtacaaaaacttttaatatccctcttgataaactgcaaagcgcgtgggaaaagactcttgaaccggtttatccgtacaatatcgaacaagaaggaaaaacagaggcgttcttttatgacaagggcgtaaccataaaagcaaaagagcgttacgcaaaacctaagtttatcatccccgtatttcccggaacaaacagcgaatacgacacggcgaaagcaattgagaaagcgggaggagaggcgcaaatatttgtgatgcgtaatcttaccnccttcttcatcgcacaaagcgccagcgcttttgaaaaagccgtccgttcggcgcagggtttgggtatcccgggaggtttttcaggcggagatgagcctgacggatcgggaaaatttattacggcgtttatgcgtaacagagcgattaaagacgcagttacagaccttttgaaaaaccgtgacgggcttatttgcggaatatgcaacggatttcaggctcttataaaactcgggcttgtgccttacggtgaaatccgcgatatgacggaagactcacctacccttacatttaacacaatcggcaggcatcaatctactctgccgattacaaaagttgtctccaataagtccccgtggctttcctgctttgaacccggagaacaatttatagtgccgatttcgcacggtgagggacgctttatcgcccaggaaagcgttatccgctctttagccgccaacggtcaaatagcgactcaatattcagattacgacggcaacgcttcgcaagatatacgttttaaccccaacaattccgacttcgctattgagggaattacgtctcccgacggcagagtattcggccgtatggcgcataacgagcggctggacgacggtatttacaggaatataccgggtattaggagaatggatatatttgccggagctgtgagatatttcagataa

SEQ ID NO: 60830 - protein, 713 aa, Unknown
  Obtained from environmental sample
  misc_feature (1)..(713): Xaa is any amino acid
MINLDKVTKKYEGLDGTELAISESQERMSVVTTEKDAKEFIELAAAENLEAVVIAEVTPEKRLVMNWNGKTIVNLSREFLNSNGAEKHAKARIFPPTVDHKKKEQDAERLEKFIGGLNICSQKGLVERFDSSVGAATVIAPYGGKYQLTPSQVMAAKIPVLNGETKTCSLMSWGFDPEISTVSPYHGAVFAVIMSLAKIIAAGGSRKRCWLSFQEYFERLRDDPLRWGKPVSALLGALDAQLGLEIAAIGGKDSMSGSFTLKNGENIDVPPTLVSFAVSTAKIDGILTPEFKRAGNYVYLYTPPRSVFEKTDFIALREYFDTAEKLIKEKKILSAWAVGSGGTAEAVVKMCAGNRIGFKTEQTLFYEPGFGGLIFETDAPLQTGSLLGRTTDEYTLSTKTFNIPLDKLQSAWEKTLEPVYPYNIEQEGKTEAFFYDKGVTIKAKERYAKPKFIIPVFPGTNSEYDTAKAIEKAGGEAQIFVMRNLTXFFIAQSASAFEKAVRSAQGLGIPGGFSGGDEPDGSGKFITAFMRNRAIKDAVTDLLKNRDGLICGICNGFQALIKLGLVPYGEIRDMTEDSPTLTFNTIGRHQSTLPITKVVSNKSPWLSCFEPGEQFIVPISHGEGRFIAQESVIRSLAANGQIATQYSDYDGNASQDIRFNPNNSDFAIEGITSPDGRVFGRMAHNERLDDGIYRNIPGIRRMDIFAGAVRYFR

SEQ ID NO: 60831 - DNA, 615 bp, Unknown
  Obtained from environmental sample
  misc_feature (1)..(615): n is a, c, g, or t
ttgtttttggaagttgtcgtggctcccgattttgacgacgacgctcttgaaatattaaaaaagaaaaaaaatctgcgtgttataagaatgaagaaaacgccgaaagaaaagcatgaatacgttgccgttgacggcggcattttggttcagcagagcgaccgcaccttgcttgaaaaatgggaagtagttacaaaaaccgctccgcaggaatgcgacttaaaagacatggtctttggaatgagagctgtaacctttgtaaaatcgaacgcgattttaatcgtaaaagagcaatccgctaccggcattggcggcgggcaggtaaaccgcatctggcccacaaagcagtctttggaaagaagcgccgacgccttgaaagcggcggctgaagaaacggaggacacaggcggaagtccctggaataacgagcttcctgcgagagttttggcctccgacgcttttttcccatttcctgacattgtagaagcggcggcgaaggcgggaattaaagcgataatacagcctggcggttctgtaaacgacaagctttcaatcgaggcgtgtgataatcacgggatagcgatggtatttactgggacacggcactttaagcattag

SEQ ID NO: 60832 - protein, 204 aa, Unknown
  Obtained from environmental sample
  DOMAIN (1)...(128): AICARFT/IMPCHase bienzyme
  misc_feature (1)..(204): Xaa is any amino acid
MFLEVVVAPDFDDDALEILKKKKNLRVIRMKKTPKEKHEYVAVDGGILVQQSDRTLLEKWEVVTKTAPQECDLKDMVFGMRAVTFVKSNAILIVKEQSATGIGGGQVNRIWPTKQSLERSADALKAAAEETEDTGGSPWNNELPARVLASDAFFPFPDIVEAAAKAGIKAIIQPGGSVNDKLSIEACDNHGIAMVFTGTRHFKH

SEQ ID NO: 60833 - DNA, 1446 bp, Unknown
  Obtained from environmental sample
  misc_feature (1)..(1446): n is a, c, g, or t
gtgatagaacggggcaagacccttattgacggcatacacaaccgctaccagggactgaaaggcctgcaggagcaggtggacagcgacattcagcttacagtaggaagggtgaacgagattacccgccagatagccgcccttaacggcgagatcgtaaggattaaggcgatgggcgataaccccaacgaccttatggaccgccgcgacctgttagtcgacagactctcctcaataattgacgtaaccattgacgcccgcgaccctgatgaatttatggtgcacaccgccggcctggtcattgtgcaggggaagataggccgccagctcgatctccgcaagggggtagacgacgaaggttatgcccacattttctggcaggacaccaggcaggagattcgcttcagcaagggcgctttgggggccttgctggaaatgcgcgacgagaccataaacgccgagatccgcaccctggacaatatgacaatgaattttgtggaccttgtgaacgagatacacagcaagggctacgggattaacggcgctacgggcttaaacttcttttccgagtatccctttgttaccaatgttaacggaaattacgaccggtccggggacgggaatttcgattccagctacatataccggataaacggatcgaacgcgctggaaccccaggctcagccgggttttgaaggcacgataacccttgccgggccgaacggcaatgtcctggtcccgtattattcctccgacactgtctcggatattatcagcaggattaacaattcgggagcggaagtcgtggcgcggcttaacagggacggcaggctttcgatcaagggcaccccggcgaggcccattgacggcgtgcatgagaaccccgattttgttatacgccatgtggaagacaacgggcatttccttacgggttacgccggtcttttgggacaggacggggtcttcgactggggaaccgccgacgccgtagccaatttgcgcggcggaaccgaatattcagtcgcgcccatagcccatccctcgggctggatcgaggtgaaccccgaccttatcaaggacaccacgtcggtggcctcgggcttcgggtttaacggcaacgccgccaatctaggcaacggcgacgcggcggcggcgatagcgtctatcaggaacaacccggtaatggtaggccagcttggtacttttgacgattacttcgccgattccgtaagccgcatggggcttcttggcgagcagagcgaaagggctttggcgaccgagaaccagctcatgaagcagcttaacgagatgaggcagtcaattgccggagtgaacatagaagaggaactggcgaacatgatccgctatcagcacggctttaacgcggcggcgcgttttgtttccacggtaaattccatgctggatgtattaatgaggcttggcgcctaa

SEQ ID NO: 60834 - protein, 481 aa, Unknown
  Obtained from environmental sample
  DOMAIN (233)...(283): Flagellin hook IN motif
  misc_feature (1)..(481): Xaa is any amino acid
MIERGKTLIDGIHNRYQGLKGLQEQVDSDIQLTVGRVNEITRQIAALNGEIVRIKAMGDNPNDLMDRRDLLVDRLSSIIDVTIDARDPDEFMVHTAGLVIVQGKIGRQLDLRKGVDDEGYAHIFWQDTRQEIRFSKGALGALLEMRDETINAEIRTLDNMTMNFVDLVNEIHSKGYGINGATGLNFFSEYPFVTNVNGNYDRSGDGNFDSSYIYRINGSNALEPQAQPGFEGTITLAGPNGNVLVPYYSSDTVSDIISRINNSGAEVVARLNRDGRLSIKGTPARPIDGVHENPDFVIRHVEDNGHFLTGYAGLLGQDGVFDWGTADAVANLRGGTEYSVAPIAHPSGWIEVNPDLIKDTTSVASGFGFNGNAANLGNGDAAAAIASIRNNPVMVGQLGTFDDYFADSVSRMGLLGEQSERALATENQLMKQLNEMRQSIAGVNIEEELANMIRYQHGFNAAARFVSTVNSMLDVLMRLGA

SEQ ID NO: 60835 - DNA, 1266 bp, Unknown
  Obtained from environmental sample
  misc_feature (1)..(1266): n is a, c, g, or t
atgcgaagaatatcaagcgagatgccccacattgacatgcagtatcaattaaggcggcaggaagaaaaaattgcgaaaatgcagtcacagattaactccgggagcaggatacaggaactgcgcgacgacccccttgcggcttcccacacggtgcgctatcaatcctatcttgcccggcttgagcgttttgagaaaaacacgttgtacgcgaaggatcactacaatgtcgttcacggatacatgaatgaggcccttggcattatgcagcgggtgcgcgagctttccgtacagggcgccaacggaacctacacgccggaagatcaaaaactcatgggtatggaaataaacgagcttatcaaggagcttgtatccatctccaatacgacgggtccggacggcaagcaggtctttgccggcgacaaggcttttacggagcctttccgcattgtcgaaggcacagtcccgggcggcggcgaaaacatggtcgtcagggttgagtaccgcggcgcgggcgcgtcacggacaaccgaaatcagcgacaatacttacgtccatcttgacctgggcggcggcgaggcgttctgggcggaaaagatgaagatttttttccatgttaacgcttccaattacagagtcagcgcctccggcgccctctttatagacgggaacgagatacgggtggcccccggggacacgctgcccgctattgtcgcgaagatcaacgattcccctgcgccggttaaggctttcatcgatcccgaaaccagagggcttgtgctggagggaaccaatccccatctgatccgcgccgaagacgcggtttccccaaacggcgaagggccgacagtgctgaaagacctcggaattatccgggggaatatggaaaacaacgctccgaattgggatactacgcgttcccgtgtttcgggcggctcgatgtttgacatgctcatacggcttcgcgacgcgctgtaccgcggcgatcaggattatatcggcagtcaggggattggcggcatggatctcgccttaagcaatttgaccacgcgccttgccgacatcggcagccgccaggaaagggcggagaccgtctggcagcggcttaacagtgaaatcccgaatgttacagctaacatcgtccgcgagtcctccgttgatatgaccgacgccgctacagaactcaagatgctggatttcgcccacaaggctgccctttcgaccgctgcgcgcattctgcctgtgtcgcttcttgatttcctcagataa

SEQ ID NO: 60836 - protein, 421 aa, Unknown
  Obtained from environmental sample
  DOMAIN (217)...(264): Flagellin hook IN motif
  misc_feature (1)..(421): Xaa is any amino acid
MRRISSEMPHIDMQYQLRRQEEKIAKMQSQINSGSRIQELRDDPLAASHTVRYQSYLARLERFEKNTLYAKDHYNVVHGYMNEALGIMQRVRELSVQGANGTYTPEDQKLMGMEINELIKELVSISNTTGPDGKQVFAGDKAFTEPFRIVEGTVPGGGENMVVRVEYRGAGASRTTEISDNTYVHLDLGGGEAFWAEKMKIFFHVNASNYRVSASGALFIDGNEIRVAPGDTLPAIVAKINDSPAPVKAFIDPETRGLVLEGTNPHLIRAEDAVSPNGEGPTVLKDLGIIRGNMENNAPNWDTTRSRVSGGSMFDMLIRLRDALYRGDQDYIGSQGIGGMDLALSNLTTRLADIGSRQERAETVWQRLNSEIPNVTANIVRESSVDMTDAATELKMLDFAHKAALSTAARILPVSLLDFLR

SEQ ID NO: 60837 - DNA, 654 bp, Unknown
  Obtained from environmental sample
  misc_feature (1)..(654): n is a, c, g, or t
gtgcatatctgcgaaaacaacacaatcttcggttccaaatggaagtatctccccgacgccggaagcgtcccgctggtctccgacatgtcttcctgcatactatccgagccaattgacgttacaaaatacggcattatctacgcgggcgcgcaaaaaaacatcgccccagccggtcttacagtcgtaataatccgcaaggacttaatcgacactcccctgccagggacgccgaccatgctcaattacaaggtacaggccgaaaacgactcaatgaaaaacacccctccctgctgggcaatttacatttgcaaacttgttctggagcacattcaaaaactgggcgggcttgaagaaatgaagcgccgcaacgaagcgaaggcaaagctgctttacgattaccttgactcgacagatttctacaaaacccacgttataccaaaagatcgttccatgatgaacgttactttcagaaccggcaacgatgagctggacgcgaaatttgccaacgagagcaaggccgctggtatgtccaacctaaagggccaccgcgatgtaggcggcatgagggcgtctatttacaacgcgatgcccaaagagggaattgaataccttatcgagtttatgaagaaattcgagaaagaaaaccgcaagtag

SEQ ID NO: 60838 - protein, 217 aa, Unknown
  Obtained from environmental sample
  DOMAIN (5)...(204): Aminotransferase class-V
  misc_feature (1)..(217): Xaa is any amino acid
MHICENNTIFGSKWKYLPDAGSVPLVSDMSSCILSEPIDVTKYGIIYAGAQKNIAPAGLTVVIIRKDLIDTPLPGTPTMLNYKVQAENDSMKNTPPCWAIYICKLVLEHIQKLGGLEEMKRRNEAKAKLLYDYLDSTDFYKTHVIPKDRSMMNVTFRTGNDELDAKFANESKAAGMSNLKGHRDVGGMRASIYNAMPKEGIEYLIEFMKKFEKENRK

SEQ ID NO: 60839 - DNA, 1041 bp, Unknown
  Obtained from environmental sample
  misc_feature (1)..(1041): n is a, c, g, or t
atgacaagggtaaaagctttccgggctttacggcctgtggcagggtatgcggataaaatagccgaccttccctacgatgttatgaacagcgacgaggcgcgggtaatggtcagggacaggcccttgtccttttctcatgttgataaggcagagatcgatctagatccgggtatcaatatctacgatgaatcagtttatgaaaaagcaaaatcgaatttccagcagctcagaacttcgggcaagatgcaaaaagatgaatcggaattttactacatctaccaactaacgatggacgaccgcgtccaaacaggaattgtggcctgtccatcggttgatgattatcttgacaacaccataaaaaagcacgaattaacaagggcggacaaggaagcggatcgtatccgccatgttgacattctggacgcaaacaccggccccatatttcttacccaccgtcctgacaaaaccctttccgaaataacatccgcctggataaaaaaccgcgagccgattttttcattcaagaaaggcaaggtaaaacattcaggctgggttgttgacaatccggagacgattgaaaaaatcgcgtcctgctttaaagacatccccgccctttacatcgccgatggccatcaccgctgcgcgtccgccgtgaaggtagctcaaaagcgcagagaggcaaatccgggatattcaggcggggaagaatttaactactttctcgctgtaattttcccgtcggacgagctcacgatctttgactacaaccgcattgttaaagatctcaacaggcttggtaaagagggatttattaaaaaaatccgtcactcattcgatgtcgaaaccagcagaggcgctgtaagaccgcaggtaaaacacgaattcggcctttttctgggggacaagtggtaccgcctgaaagcaaaaaacggtatttgggatgataatgatccggttgaacggcttgatgtttcggttctacagaattgccttttaaacccatcctgggaattgacgatcccagaacaaacaagcggatag

SEQ ID NO: 60840 - protein, 346 aa, Unknown
  Obtained from environmental sample
  DOMAIN (3)...(346): Protein of unknown function (DUF1015)
  misc_feature (1)..(346): Xaa is any amino acid
MTRVKAFRALRPVAGYADKIADLPYDVMNSDEARVMVRDRPLSFSHVDKAEIDLDPGINIYDESVYEKAKSNFQQLRTSGKMQKDESEFYYIYQLTMDDRVQTGIVACPSVDDYLDNTIKKHELTRADKEADRIRHVDILDANTGPIFLTHRPDKTLSEITSAWIKNREPIFSFKKGKVKHSGWVVDNPETIEKIASCFKDIPALYIADGHHRCASAVKVAQKRREANPGYSGGEEFNYFLAVIFPSDELTIFDYNRIVKDLNRLGKEGFIKKIRHSFDVETSRGAVRPQVKHEFGLFLGDKWYRLKAKNGIWDDNDPVERLDVSVLQNCLLNPSWELTIPEQTSG

SEQ ID NO: 60841 - DNA, 1371 bp, Unknown
  Obtained from environmental sample
  misc_feature (1)..(1371): n is a, c, g, or t
atgattcaattaaaacaacgcttcggcccctggtctttctatcgtgaggtcctggctgttgccctgcctgtgatgacgcagcagttcattatgagtatggtttctctaattgacaacttcatggtagcgggtcttggggatgtcagcatggcggcggtaaatgtaaccaaccatcttttttttatatacatcgtattgataaacgttacctgccaggccggcggtatttacatcgcccagttcaagggagcaggtgacagcgagggaatgaagcacgcattccgcttcaaggttatttttgccgccgccatcgcggcgctggctttcacagtcggcagatcccttacaagcccgttgattgcgatgatgacaacggctaacatttcccagcaagaaattgtctctgtcggctcccgttacctgaaactcatctcctggacttttctgccaatggcaatttcatctgcgatagggaccagtttccgcgataccgcaagaccaaaaattccgctaatcatctccatttttgcaaccctaataaacactatcggaaactggatattaatttacggcaatttgggcgctccccgtcttgaagtcgaaggcgcggcgtacgcaacaatcatagcccgcgtttttgagctatgcgtctttgtgatctatgccacctgggacaggacgcctttttttaccgtgcggatattttatattcacaaaagactaattaaagatatcctgattaaatcctcaatgatattcgcgtcggaactgtcatggatcacttcagaaacaataatgatcgccatgtataaccgccgcggcggcgcggaggtggtggccggtatggctgcgggctggactatcgcgaatttatttttcattctatttggcggtgtttggacagcgtcggcaatactcgttgggggaacccttggctcaggccagctagacgaagcgcgccgccgctcagaatggctcaaatcgggatcggtggtagcgggcatcatcatggcgctgcccggcgtggtcatgtcatcttttctcgtccctctggttttttccaatctcagccaggaagccagggcaaactgccttggtcttgtctatgtgatcctcgcataccttccactctgggggcttttaaatacgcaattcgccatatcccgcgccggaggcgacaccgcaatggggatgtacgccgaccttttagtaaataccgttcttttcgccccaggagcttttcttctgtcttattttacaaccatcgcgcctgttcctatgttagccatactaaagacttcggatatcgccaagtattttatctgccgctatcttatgcgcaaggaaagatgggttaggaatttaacttag

SEQ ID NO: 60842 - protein, 456 aa, Unknown
  Obtained from environmental sample
  DOMAIN (250)...(415): MatE
  misc_feature (1)..(456): Xaa is any amino acid
MIQLKQRFGPWSFYREVLAVALPVMTQQFIMSMVSLIDNFMVAGLGDVSMAAVNVTNHLFFIYIVLINVTCQAGGIYIAQFKGAGDSEGMKHAFRFKVIFAAAIAALAFTVGRSLTSPLIAMMTTANISQQEIVSVGSRYLKLISWTFLPMAISSAIGTSFRDTARPKIPLIISIFATLINTIGNWILIYGNLGAPRLEVEGAAYATIIARVFELCVFVIYATWDRTPFFTVRIFYIHKRLIKDILIKSSMIFASELSWITSETIMIAMYNRRGGAEVVAGMAAGWTIANLFFILFGGVWTASAILVGGTLGSGQLDEARRRSEWLKSGSVVAGIIMALPGVVMSSFLVPLVFSNLSQEARANCLGLVYVILAYLPLWGLLNTQFAISRAGGDTAMGMYADLLVNTVLFAPGAFLLSYFTTIAPVPMLAILKTSDIAKYFICRYLMRKERWVRNLT

SEQ ID NO: 60843 - DNA, 1188 bp, Unknown
  Obtained from environmental sample
  misc_feature (1)..(1188): n is a, c, g, or t
atgccgtttaagggggtcgatattatggacgttaagaaggaatttgtcttaaaagcgctggatgacagagtggtattcaccgaactgtgccgtgaatacggaatcggcacgaaatgcgggtacaaatggaaaaagcggttccttgaggaaggatacgctggtcttgaggaacactcaaggaagccgttaaccaacagccgaagcataccggaaccggtaagcgttgaaatgctgcgtataaaaaaattacaccccgcatggggagcgaaaaaaatccttgaaatatacaaaagaaaccatacagggaaatacgctcctgcgcggggaagcgtggaaaatctttttgtacgcgcgggctacacgggcgtcaggcggagaagaaacatacgcggcggcaagataatacaaaaccgtgttattcccacaaaacctaacgaagtttggactgttgattttaagggctggtggtataccaagaacagggagaaagtaaacccgcttaccatacgcgatgaatacagcaaatacatactggcgatagatgttgtcgaaaagggcgataaagccacagtaaaatatgtctttcagcgtgttttcaagcaatacggtttaccgcagtgtatacgcagcgacaacggtccgccgttcgccagcgcgcttaatttttggggtttgtcaaaattgtcggtatggtggatgacgctgggaatacagcttgaccgcgacgatcccggacacccggaacagaacggcggacatgaaagaatgcatagtgacatgaaaacagaactgcaggggcagattgacggctctcttaacgaacaccagaaagtatttgaacagtggcgtaaagattttaacgaagtgagaccgcatgaagcgctggatatgaaagtgccagccgacatatatacaaaatcagaaataaaatatacaggtgaaaatgttgagcacaggtacgggagaggttttaaagttcgtattgtcaacgacaggggatttatgaatttccaacaaaaacgtgtgtttgttggaaatccgtttgccggatataatgttggtgtgaaagaatttgttgacaagccaacagaagtatggtttgggaattatttgttaggtgtaataaacaatgacactggactcatagagccaaattttactataatgcagctaacaaataatacttga

SEQ ID NO: 60844 - protein, 395 aa, Unknown
  Obtained from environmental sample
  DOMAIN (140)...(305): Integrase core domain
  misc_feature (1)..(395): Xaa is any amino acid
MPFKGVDIMDVKKEFVLKALDDRVVFTELCREYGIGTKCGYKWKKRFLEEGYAGLEEHSRKPLTNSRSIPEPVSVEMLRIKKLHPAWGAKKILEIYKRNHTGKYAPARGSVENLFVRAGYTGVRRRRNIRGGKIIQNRVIPTKPNEVWTVDFKGWWYTKNREKVNPLTIRDEYSKYILAIDVVEKGDKATVKYVFQRVFKQYGLPQCIRSDNGPPFASALNFWGLSKLSVWWMTLGIQLDRDDPGHPEQNGGHERMHSDMKTELQGQIDGSLNEHQKVFEQWRKDFNEVRPHEALDMKVPADIYTKSEIKYTGENVEHRYGRGFKVRIVNDRGFMNFQQKRVFVGNPFAGYNVGVKEFVDKPTEVWFGNYLLGVINNDTGLIEPNFTIMQLTNNT

SEQ ID NO: 60845 - DNA, 894 bp, Unknown
  Obtained from environmental sample
  misc_feature (1)..(894): n is a, c, g, or t
ttggatcaaatcgctaaaattgtatggacgcaaagggtaacagcggaacttaacgcgaaagtggacattgccggaattgactggcaaaaagaaaaaaacacttttctttccgacacgaaaagcgaacacacgcgccgcgcttataacgccgctttatcgcgctttgaggcatgggcaagccgtgagggaataaacccgcttgaactttccgcttccggagccgatcaatttatccgcgctatgaacgatgatcaccgcgccgcggcttccatgcgccgggacatagcggcggtatccgcttttttttcatggcttgagcgttaccacaagggaattaaaaacccggtacgcggaacgcgcataaggccgccgcgggaaaacaaaaaagaggttgttattcctacagctgcggactataagacaataatagaggaactgccggaaattgaacgcgccattataattgtatttgccacacgcggactgagggcgggggccttgcccactcttgagttaaagcgcggaaagtatcacggcaagagcaaggggaaactgttagaggaaaacggaacgcccgggataaccctgccccgcgccgccattgccgcgattaaacgcgccgggcttgacgaaaaaaggcctttcgcatgggacacgcggcaaaaaacgaaaaacggcgccgccgcaattgaggggcggatcgcgtatcacattgacaagctctaccaaagcagaaaaatcgcggcgcggtattcttgccatgacttccggcattttttcgcggtgaacgaatataaaaagaataaagacattttccgactttcaaaacttcttaatcacgccggaatacagataacgcagacttacttgaaaagcctgggcattgaactttga

SEQ ID NO: 60846 - protein, 297 aa, Unknown
  Obtained from environmental sample
  DOMAIN (34)...(109): Phage integrase, N-terminal SAM-like domain
  misc_feature (1)..(297): Xaa is any amino acid
MDQIAKIVWTQRVTAELNAKVDIAGIDWQKEKNTFLSDTKSEHTRRAYNAALSRFEAWASREGINPLELSASGADQFIRAMNDDHRAAASMRRDIAAVSAFFSWLERYHKGIKNPVRGTRIRPPRENKKEVVIPTAADYKTIIEELPEIERAIIIVFATRGLRAGALPTLELKRGKYHGKSKGKLLEENGTPGITLPRAAIAAIKRAGLDEKRPFAWDTRQKTKNGAAAIEGRIAYHIDKLYQSRKIAARYSCHDFRHFFAVNEYKKNKDIFRLSKLLNHAGIQITQTYLKSLGIEL

SEQ ID NO: 60847 - DNA, 1221 bp, Unknown
  Obtained from environmental sample
  misc_feature (1)..(1221): n is a, c, g, or t
atgccgtctattaattcacttataaaaaaaataacgccaaagcgtcctctgtatgtgcagataatgtttacgatcttttcattcttgttaatggtcgttttaagttatttcttttcaagaaatattattgacaagtatataaaacaaaatacgaataatatttttacttccctgcagacacaaatcatggccgatcttcttgaaccccagataacgctgaaaaatttttcacagacagtgcgggacatgattttgaacggcgacagcgcggaaagactgcatgaatattacaatgacatgtcaaattatttgtctttggacaaacaaagctatttgaattttaacggctttatgggatattttgaatcgcttccaggcgggcccatttttatagaaagctcgctgtggggcatgccggttgaatttaatcccgctgaacgcgaatggtataaaaacgcgatagccgcaaacggtaaaatcgcggaaacattgatgtaccatgacacaatttatgatgacatcatgtttatatgttctaacagtatttttgacaacgagggaaaccgtctcggcgttatcgcgctcagggtaaaaattgacaatatcagaaaatacattgttaataccgttatggttcaaggctcttacggaatgctgctcagcagggatttggttattctggcccaccctaacgacgcgttcgtcggcgaaaactcgcgtaatcccaagattcctttttcaatttttacaaacgagtttattaacagaatagaaattaacgaacgtccgcttataacctataaacatgaacgcgccctggcttctttccgatttctgcccaacgactggattttgggcattgtaacgcccaaaggtccgtactataaaagcatatccaatatggccttaatcctcgtcatattangcacggcgctatcatcggtgctgatcttcgtcttgatccgagtcgacgccgccagaaacaaatccgatttgggaaataagcacaaaacttctttttcttgccaggatgagccacgaaatacgcacgcccatgaacgcgataataggcatgacggagcttgcgctgcgcgaagaagaggtcagttcagttcacaggcatatccgcacggtcaaacaggcgggcgcccatcttttgtctcttatcaacgatattctggatttttcaaaaatcgaagtcggaaaactggaaatttttga

SEQ ID NO: 60848 - protein, 406 aa, Unknown
  Obtained from environmental sample
  DOMAIN (163)...(242): Cache domain
  misc_feature (1)..(406): Xaa is any amino acid
MPSINSLIKKITPKRPLYVQIMFTIFSFLLMVVLSYFFSRNIIDKYIKQNTNNIFTSLQTQIMADLLEPQITLKNFSQTVRDMILNGDSAERLHEYYNDMSNYLSLDKQSYLNFNGFMGYFESLPGGPIFIESSLWGMPVEFNPAEREWYKNAIAANGKIAETLMYHDTIYDDIMFICSNSIFDNEGNRLGVIALRVKIDNIRKYIVNTVMVQGSYGMLLSRDLVILAHPNDAFVGENSRNPKIPFSIFTNEFINRIEINERPLITYKHERALASFRFLPNDWILGIVTPKGPYYKSISNMALILVILXTALSSVLIFVLIRVDAARNKSDLGNKHKTSFSCQDEPRNTHAHERDNRHDGACAARRRGQFSSQAYPHGQTGGRPSFVSYQRYSGFFKNRSRKTGNF

SEQ ID NO: 60849 - DNA, 1119 bp, Unknown
  Obtained from environmental sample
  misc_feature (1)..(1119): n is a, c, g, or t
atgagccacgaaatacgcacgcccatgaacgcgataataggcatgacggagcttgcgctgcgcgaagaagaggtcagttcagttcacaggcatatccgcacggtcaaacaggcgggcgcccatcttttgtctcttatcaacgatattctggatttttcaaaaatcgaagtcggaaaactggaaatttttgaagatgaatatatggtttcatcccttgtcaatgatgttataagcattatccgaatgcgggtagctgatacgaatataaggtttgtggttaatattgacagcaatattcccaatttgctttttggcgatgaaacaagaatacggcaggtgctgctgaatattttaaataacgccgtaaagtataccgaaaggggctttgtttcctttaccgcacagagtgaggttatcgacgaaaaaagaattaacctagtcatggaggtaatggattcaggtaaaggaataaaacaggaagacgtaaacaaattgttcggcgaatatatgcaggttgatcagaataaaaacaagggcatagaaggcgtgggcctggggcttgcaataacctggaatatcgtcaaagcgatggggggagacataaaagtttattccgaatacggaaaaggcagcatatttaccgttagaataccgcaaatagtttcttctcccgagcctctggcatctgttaaagacccaggtaaaatcaaggttattgtatacgaacggcgtgaaatattcgcgaattccatagcttttaccattgataaccttggcgttgactgcacgcttgttacaagcaattcggaattgcatggcgaattgtcggcaaaagaatacaattttatttttatctcattctcgttatacgaaagcaacaaaagcacaatcatgaaattggggaaacaggcaaaagttgttttgcttgccgaattcggcgaatcagcttacgataaaaaattaagcgttatcgccatgccggtttactctatttcatcgcgaatatattanacggagtctcggagagctttaatctcaacgaaaatgaagaaaccattggccgctttgtcgcgccggaagcaatcgttttggttgttgacgatgtgngtactaacttaa

SEQ ID NO: 60850 - protein, 372 aa, Unknown
  Obtained from environmental sample
  DOMAIN (1)...(58): His Kinase A (phosphoacceptor) domain
  misc_feature (1)..(372): Xaa is any amino acid
MSHEIRTPMNAIIGMTELALREEEVSSVHRHIRTVKQAGAHLLSLINDILDFSKIEVGKLEIFEDEYMVSSLVNDVISIIRMRVADTNIRFVVNIDSNIPNLLFGDETRIRQVLLNILNNAVKYTERGFVSFTAQSEVIDEKRINLVMEVMDSGKGIKQEDVNKLFGEYMQVDQNKNKGIEGVGLGLAITWNIVKAMGGDIKVYSEYGKGSIFTVRIPQIVSSPEPLASVKDPGKIKVIVYERREIFANSIAFTIDNLGVDCTLVTSNSELHGELSAKEYNFIFISFSLYESNKSTIMKLGKQAKVVLLAEFGESAYDKKLSVIAMPVYSISSRIYXTESRRALISTKMKKPLAALSRRKQSFWLLTMXVLT

SEQ ID NO: 60851 - DNA, 1104 bp, Unknown
  Obtained from environmental sample
  misc_feature (1)..(1104): n is a, c, g, or t
atgacagggagcacagaagcggttttatccaccatgaccggaaagcccgacgctcatgtttttatgctgcagccgaactgggcaatggcgatgagggcgcgcggccttcttgcgcccttacccaataccatcaaaacaccgacgcctattgccaggggattttcaccggtagaatttagtcagcctaccattgattcttttacgtttgacggcaaaccctacgccttctcgataggcgtaaacttgaacaatttccaggccttgttctttaacaaacggctgttcagggaagcgggccttgatcccaaccttccctataatatgcagaaagcgggtacctggacctgggcggagtttcttactatttgcaagaagctgacgcgggatataaataacgacggcaaagtggatacctatgccatggccgccgacctttccacggagatactggacgcgataatttccagcaacggcgcgacatacgtggacaaggaccccaagaccggaaaatttgtcaacgccaccggcaggcccgaattcctggaagccctgcagttcgcgatcaggctgaagaccgaaggcgttttgaagccgaggccggaaaacagcaactgggattggtacaaatccgaattcattgacggaagggtcgcgatgcggattgacgaatcgtatatcgctaacagtgattctaaagaactggatagaatgaaggatgactggggcatggttctgttccccaaggggccgaaatcccctacctaccgcgtgtatagccgtgataacctgatggtcatccccaaaacatactcggccgcggaagtggagaaaattatatgggcggtggcgctgtggtatactcccgccgataccgactggaaatccggccaatacaactttttccgcgatccccgcgccgttgatgaaaccctggcgcttgtccgcgatccgaaacttgccatgacaaaatactttacctatatcaatggcctggagcgcggcgacatagcctggaatatgtggtaccatgaaggcgaacccgcccagcttatagagtcggtttcccaggactggaacaccaagataaacgaagctaacagataa

SEQ ID NO: 60852 - protein, 367 aa, Unknown
  Obtained from environmental sample
  misc_feature (1)..(367): Xaa is any amino acid
MTGSTEAVLSTMTGKPDAHVFMLQPNWAMAMRARGLLAPLPNTIKTPTPIARGFSPVEFSQPTIDSFTFDGKPYAFSIGVNLNNFQALFFNKRLFREAGLDPNLPYNMQKAGTWTWAEFLTICKKLTRDINNDGKVDTYAMAADLSTEILDAIISSNGATYVDKDPKTGKFVNATGRPEFLEALQFAIRLKTEGVLKPRPENSNWDWYKSEFIDGRVAMRIDESYIANSDSKELDRMKDDWGMVLFPKGPKSPTYRVYSRDNLMVIPKTYSAAEVEKIIWAVALWYTPADTDWKSGQYNFFRDPRAVDETLALVRDPKLAMTKYFTYINGLERGDIAWNMWYHEGEPAQLIESVSQDWNTKINEANR

SEQ ID NO: 60853 - DNA, 714 bp, Unknown
  Obtained from environmental sample
  misc_feature (1)..(714): n is a, c, g, or t
atgagctgtgctattgtaaacggagtcagccttcccaatataccttgggaagacagaccatcatcaagcaatcctaaaaaggaattaatgtggcgttattctaagaatccgattattccaagggatttaaccttaacttcaaacagtatttttaacagcgcggtagttccttttaaaggcgagtatgccggcgtgtttcgctgtgatgatactgcccgtcatatggatatacatgccggacgcagtaatgacggcgttaactggaaaattgaagacaaccctattcaatttattaaaacagacagtgagttgcccgattctgagtataaatatgatccccgggtaatttttattgaggatcgatactatataatttggtgtaacggttatcacggcgcaagtctcggtatgggttatacttatgattttgaaaaattttatcaaatggaaagtccgatgatggtttacaaccgcaatggagcgcttttcccgcgcaagattggaaataactatgcaatgtacagccgtcccagcgattccggacatactccgtttggagatattttctattctgaaagtcctgaccttgtttattggggcaaacatcgtcatgttatgtcgccgtcaggcggatggcaaagcacaaaagtaggcgcgggtccctgccncattgaaacatcagaaggctggcttgtttttatcacggggtactga

SEQ ID NO: 60854 - protein, 237 aa, Unknown
  Obtained from environmental sample
  DOMAIN (11)...(236): Domain of unknown function (DUF377)
  misc_feature (1)..(237): Xaa is any amino acid
MSCAIVNGVSLPNIPWEDRPSSSNPKKELMWRYSKNPIIPRDLTLTSNSIFNSAVVPFKGEYAGVFRCDDTARHMDIHAGRSNDGVNWKIEDNPIQFIKTDSELPDSEYKYDPRVIFIEDRYYIIWCNGYHGASLGMGYTYDFEKFYQMESPMMVYNRNGALFPRKIGNNYAMYSRPSDSGHTPFGDIFYSESPDLVYWGKHRHVMSPSGGWQSTKVGAGPCXIETSEGWLVFITGY

SEQ ID NO: 60855 - DNA, 771 bp, Unknown
  Obtained from environmental sample
  misc_feature (1)..(771): n is a, c, g, or t
gtgaacaatgaaaaaatcccaatctggatagccgattatgttcttatttcatacggaacaggagccattatggcggttcccgcgcatgacgagcgcgactgggaattcgccaagacgtttaagctgccaatagtgcaagtggtagctgaagaacaaccccactccccactccccactccccactccctttgtacgaaagaagaaccatctgaatgtaccacagcggacggttactcggtaaactcaggctcctatgacgggcttcctacggaggagacaaaaaagcgcataacgcaatggcttgaggataacaagctcggtaagaatatggtgaacttcaaactgcgcgactgggttttcagcagacagcgttactggggcgaacctatccccgtggtgcattgcgaatcctgcggaatagtcccgctaagcgaaaaagatctcccgctgaaactgcccgatgtccagtcatacgcgcccaccggcaccggcgaatctccgttagctgcaattaccgaatgggtgaacaccgtctgcccgaaatgcggaaagcccgccaaaagggaaaccaataccatgccccaatgggcgggctcctgctggtactacctgcgctatcttgacccgcataatgacagggaatttgcgagtaaggacaaaatggaatattgggccccggttgatctctatgtgggcggagtggaacacgctgtgcttcacctcctgtacgcccgttttggcacaaggtgctttatgacgcgggtcttgtaa

SEQ ID NO: 60856 - protein, 256 aa, Unknown
  Obtained from environmental sample
  misc_feature (1)..(256): Xaa is any amino acid
MNNEKIPIWIADYVLISYGTGAIMAVPAHDERDWEFAKTFKLPIVQVVAEEQPHSPLPTPHSLCTKEEPSECTTADGYSVNSGSYDGLPTEETKKRITQWLEDNKLGKNMVNFKLRDWVFSRQRYWGEPIPVVHCESCGIVPLSEKDLPLKLPDVQSYAPTGTGESPLAAITEWVNTVCPKCGKPAKRETNTMPQWAGSCWYYLRYLDPHNDREFASKDKMEYWAPVDLYVGGVEHAVLHLLYARFGTRCFMTRVL

SEQ ID NO: 60857 - DNA, 882 bp, Unknown
  Obtained from environmental sample
  misc_feature (1)..(882): n is a, c, g, or t
gtgctttatgacgcgggtcttgtaaacagcaaggagccttttatacgccttgtgaatcagggtatgatcgtttcctttgcctatcagagaaaggataaaacactggttcccacggatcaaattgaaaaaaggccggacggcagtttctttgaaaaagcgaccggtgaagaagtaaacgaagtaatcgccaagatgagtaagagtcttaaaaacgtgattaaccccgatgaaataaccaaagacttcggggcggattcccttcgcgtctacgaaatgtttatgggccctcttgaagtaagcaaaccctggagtacggcgggccttatcggcgtaacgcgctttctggagaggatctggggcattgcgagtgaaaagttaaaagtgaaaagtgaagaaagtatttcgcctgaggaaatgcagcgactgactaaattgctccacaagaccatcaagaaagtaagttccgacaccgcgacgctgaatttcaacacggcgatcagcgccatgatgatttacacaaacgagcttgcgagaccggctgaaatcccccgctctctctgggaaccgctggtaataatgctcagcgtttacgcgccccaccttggcgaggagctatgggaaaaactggggcataaagattcggttagcgcatgttcatggcctgttttcgacgaacagctgacgcatgacgatgaaatgacggtcgtggttcaggtaaacggcaagatacgggacaaattcaccgctcctgccgggactgccaaagccgaattggaaaaaacggccttgtctttgcccggcataatcaagtggaccgaaggacacgcgatagcaaaagtgataacggtggtggataagttggtgaatatagttatcaaataa

SEQ ID NO: 60858 - protein, 293 aa, Unknown
  Obtained from environmental sample
  DOMAIN (142)...(259): Anticodon-binding domain
  misc_feature (1)..(293): Xaa is any amino acid
MLYDAGLVNSKEPFIRLVNQGMIVSFAYQRKDKTLVPTDQIEKRPDGSFFEKATGEEVNEVIAKMSKSLKNVINPDEITKDFGADSLRVYEMFMGPLEVSKPWSTAGLIGVTRFLERIWGIASEKLKVKSEESISPEEMQRLTKLLHKTIKKVSSDTATLNFNTAISAMMIYTNELARPAEIPRSLWEPLVIMLSVYAPHLGEELWEKLGHKDSVSACSWPVFDEQLTHDDEMTVVVQVNGKIRDKFTAPAGTAKAELEKTALSLPGIIKWTEGHAIAKVITVVDKLVNIVIK

SEQ ID NO: 60859 - DNA, 1290 bp, Unknown
  Obtained from environmental sample
  misc_feature (1)..(1290): n is a, c, g, or t
ttgcgctcttttggtttccgtgtatggcttgattctgcggcggtcagggctatcatggcaattcccgaggggatattgactaccgcgtgctacgggttgttctatcttacatggctgaggccggcgacaggccgggcaaaccggacaggcaaattctgttcgctgatcctgggcgcggcccttctcggttccgtcctcgcctgttattattccgtaccgctgatggaggcgggtcttgcggctgaaaacccgttgaaagacggcgcgcttgaaagcggtgcgcttaaaagcggcgcgcttaaaagcgcggcgtttatattcaacggcatcaaatggtgcatgatagttttggcgggggtatttccgacagcaagcgtgtactttatgcggaattcgacctccgcatttgcggccgcatccgcgtcggcagatactcccgcggttaaaaccgacttgcctgtgattctgcggcttatcggtattgcgtcgatgtttaccattctgaacggggtaatggatatgcaggcgcttccgctgtataccgataacgcgatatactatcccaattatttaatagtcgctttggtggttcccgttttagggtttctggcgggtctctcaataaaacactttatccgccggtttctgcttccggtaatccttttgtttataatgttctcctgcctgcccttgtttgaagattatctccggttcaatctgattataagcacccttgtgtccattgcccattatacggcatggattgtttttaccaccgccattgtggaattgtactccggaggattctggttttacggggcgtcgattgtaatttttttcagcgttgtttttgctttcctttcacctttaaatcacccgtatgtgccccacaccagggaattccgggtgttatttataataatagccgccgtgcttaccatgcttatggctttcaggtggctgctattcccaaaactgccgcgtcataaggcccggcaagagccgaatgaatctcgcgtaacacctgccggtaaaatttccaatcttgaggatattttcagggagcgcgggctttccaaacgggaaattgaagttgccaatttactggtaaaggaagggcttggaaaacaggaaatcggggagcgtctttttatcgcgcccggtactgtcaagattcacatcagtaaaatctatgagaaattcgatgtgaaaaccagggctgaatttatggctttatttgtcgcagcaccgcttcttcagccggaccgcccggcagattcctcgcgttaa

SEQ ID NO: 60860 - protein, 429 aa, Unknown
  Obtained from environmental sample
  DOMAIN (355)...(413): Bacterial regulatory proteins, luxR family
  misc_feature (1)..(429): Xaa is any amino acid
MRSFGFRVWLDSAAVRAIMAIPEGILTTACYGLFYLTWLRPATGRANRTGKFCSLILGAALLGSVLACYYSVPLMEAGLAAENPLKDGALESGALKSGALKSAAFIFNGIKWCMIVLAGVFPTASVYFMRNSTSAFAAASASADTPAVKTDLPVILRLIGIASMFTILNGVMDMQALPLYTDNAIYYPNYLIVALVVPVLGFLAGLSIKHFIRRFLLPVILLFIMFSCLPLFEDYLRFNLIISTLVSIAHYTAWIVFTTAIVELYSGGFWFYGASIVIFFSVVFAFLSPLNHPYVPHTREFRVLFIIIAAVLTMLMAFRWLLFPKLPRHKARQEPNESRVTPAGKISNLEDIFRERGLSKREIEVANLLVKEGLGKQEIGERLFIAPGTVKIHISKIYEKFDVKTRAEFMALFVAAPLLQPDRPADSSR

SEQ ID NO: 60861 - DNA, 1227 bp, Unknown
  Obtained from environmental sample
  misc_feature (1)..(1227): n is a, c, g, or t
atgctgggcagcagggggatcatcacaaaacaggattcggatgcgatagtaaaatcgcttgaggccatattggctgagattgaaagcggcgctctaaaaatagacatgaacgccgaggatatccattcctttgtcgagtccgagcttgtctcgcgcattggcgatcccggcaggcggctgcacacgggcagaagccgcaatgaccaggtcgcccttgatatgcggatgtatataaaagaagagatcgacgcggcggccgctctgcttaaacaactgcttgacgcgcttctggccgcggcgaaaaaacataccgcgtcgataatgcccggatacacccatttgcaaaaggcgcagcctgttacgctggcccatcatcttctggcctacgcgcagatgttcaaacgggaccgcgaaaggctcaaggactgccgcgagagaacagacgaaatgcccctcgggtccggggcgctcgcctccacaagctatccgcttgacagggaatttgtcagggagaaacttggcttcgcgaagataagcgcgaacagcatggacgccgtgtccgacagggatttctgcgcggaatttgtcttctgcctctcccttattatgacgcacctgagccgcttctgcgaggaactggtgctgtggtcaacggacaatttcggctttgttgaaatttcagacgcttacgcgacaggctcctcaatcatgccgcaaaagaaaaaccccgacatggcggagcttgtcaggggcaagacaggccgggtttacggcagcctgacttgtctccttacggtgatgaaaggattgccgctgtcgtataacaaggatatgcaggaagacaaagaagcggtctttgacgccgttgacacggtaaaagcctgtctgtcggttttccgcgggatgtttgagactattacgtttaacacggaaaatatgtacaaaagcgcgctttgcggctacacgaacgccacggacgcggcggactggctggtaaaaaaagggattccattcagggaagcccacgaaataaccggcaggcttgtgttatacgccattaaaaaaaaggcgcggcttgaggagctgaccctggacgagttaaaatccgtgtctcccgtttttgatgaaaccatttacaaggctatttccgttgaagcctgcgttaacgcgaggaatctgccgggcggtccggctgaagaagcggtgctgcgacaaataaagccataa

SEQ ID NO: 60862 - protein, 408 aa, Unknown
  Obtained from environmental sample
  DOMAIN (1)...(258): Lyase
  misc_feature (1)..(408): Xaa is any amino acid
MLGSRGIITKQDSDAIVKSLEAILAEIESGALKIDMNAEDIHSFVESELVSRIGDPGRRLHTGRSRNDQVALDMRMYIKEEIDAAAALLKQLLDALLAAAKKHTASIMPGYTHLQKAQPVTLAHHLLAYAQMFKRDRERLKDCRERTDEMPLGSGALASTSYPLDREFVREKLGFAKISANSMDAVSDRDFCAEFVFCLSLIMTHLSRFCEELVLWSTDNFGFVEISDAYATGSSIMPQKKNPDMAELVRGKTGRVYGSLTCLLTVMKGLPLSYNKDMQEDKEAVFDAVDTVKACLSVFRGMFETITFNTENMYKSALCGYTNATDAADWLVKKGIPFREAHEITGRLVLYAIKKKARLEELTLDELKSVSPVFDETIYKAISVEACVNARNLPGGPAEEAVLRQIKP

SEQ ID NO: 60863 - DNA, 324 bp, Unknown
  Obtained from environmental sample
  misc_feature (1)..(324): n is a, c, g, or t
gtgggcttccctgaatggaatccctttttttaccagccagtccgccgcgtccgtggcgttcgtgtagccgcaaagcgcgcttttgtacatattttccgtgttaaacgtaatagtctcaaacatcccgcggaaaaccgacagacaggcttttaccgtgtcaacggcgtcaaagaccgcttctttgtcttcctgcatatccttgttatacgacagcggcaatcctttcatcaccgtaaggagacaagtcaggctgccgtaaacccggcctgtcttgcccctgacaagctccgccatgtcggggtttttcttttgcggcatgattga

SEQ ID NO: 60864 - protein, 107 aa, Unknown
  Obtained from environmental sample
  misc_feature (1)..(107): Xaa is any amino acid
MGFPEWNPFFYQPVRRVRGVRVAAKRAFVHIFRVKRNSLKHPAENRQTGFYRVNGVKDRFFVFLHILVIRQRQSFHHRKETSQAAVNPACLAPDKLRHVGVFLLRHD

SEQ ID NO: 60865 - DNA, 522 bp, Unknown
  Obtained from environmental sample
  misc_feature (1)..(522): n is a, c, g, or t
gtgcgtcataataagggagaggcagaagacaaattccgcgcagaaatccctgtcggacacggcgtccatgctgttcgcgcttatcttcgcgaagccaagtttctccctgacaaattccctgtcaagcggatagcttgtggaggcgagcgccccggacccgaggggcatttcgtctgttctctcgcggcagtccttgagcctttcgcggtcccgtttgaacatctgcgcgtaggccagaagatgatgggccagcgtaacaggctgcgccttttgcaaatgggtgtatccgggcattatcgacgcggtatgttttttcgccgcggccagaagcgcgtcaagcagttgtttaagcagagcggccgccgcgtcgatctcttcttttatatacatccgcatatcaagggcgacctggtcattgcggcttctgcccgtgtgcagccgcctgccgggatcgccaatgcgcgagacaagctcggactcgacaaaggaatggatatcctcggcgttcatgtctatttttag

SEQ ID NO: 60866 - protein, 173 aa, Unknown
  Obtained from environmental sample
  misc_feature (1)..(173): Xaa is any amino acid
MRHNKGEAEDKFRAEIPVGHGVHAVRAYLREAKFLPDKFPVKRIACGGERPGPEGHFVCSLAAVLEPFAVPFEHLRVGQKMMGQRNRLRLLQMGVSGHYRRGMFFRRGQKRVKQLFKQSGRRVDLFFYIHPHIKGDLVIAASARVQPPAGIANARDKLGLDKGMDILGVHVYF

SEQ ID NO: 60867 - DNA, 438 bp, Unknown
  Obtained from environmental sample
  misc_feature (1)..(438): n is a, c, g, or t
atggttgacgccagccttagaatggctattgtaaatctttttaaaatactcagggataaagagaaagtcagcgttatttatattactcacgatctggcgaccgcctactacatcagcgacaggatcgccattatgctccgcggttatgtagtggaaatggggccggtggaagcggtattgggcaatcccctgcacccatatacaaaactgttaaaagaatctgttccggctcccgctccgaaggataaggaaggctgggcaaagcgaattggcctttccactaccgaagtaagggaatattcaagacagggttgtaaattccacggaagatgtcctgacgcgctggaacaatgcaaacacgacgatccgccggatacagaggcggaaggcagaattgttaaatgtcatctttacgcgaaaaaaaagggtaacccatga

SEQ ID NO: 60868 - protein, 145 aa, Unknown
  Obtained from environmental sample
  DOMAIN (51)...(118): Oligopeptide/dipeptide transporter, C-terminal region
  misc_feature (1)..(145): Xaa is any amino acid
MVDASLRMAIVNLFKILRDKEKVSVIYITHDLATAYYISDRIAIMLRGYVVEMGPVEAVLGNPLHPYTKLLKESVPAPAPKDKEGWAKRIGLSTTEVREYSRQGCKFHGRCPDALEQCKHDDPPDTEAEGRIVKCHLYAKKKGNP

SEQ ID NO: 60869 - DNA, 1059 bp, Unknown
  Obtained from environmental sample
  misc_feature (1)..(1059): n is a, c, g, or t
atgaaaaagagaggttttaatccgtatctgccttcatgggaatatattcccgacggagaaccctatgtatttaacggcagagtttatatttacggttcacatgataaattcaacggtcatgtttattgccctaacgactatgtgtgctggtctgcgcccgagaacgatttaagcgattggcgttatgagggagtaatttatcctaaaaccaacgacccctttaataaagacggacatatgtgcctttacgcgccggatataacgcgcggaccggacggacggtactatttgttttatgtgtttgataaggtaaatgttgtgtccgtagcggtttgtaaatctcctgccggaaaatttaaattccacggctatgttcattatcctgacggaacactgcttggcaagcgggaaggagaccagcctcagtttgatccgggcgttttaacagagggtgataaaacatatctttttaccggtttttgcggacgtgacgataagaccagaataggcgctacggcggtaacgctgggacccgatatgctgaccgtacttgataagccgattcttgtagctcccggagtacataacagcaagggtacaagttttgaaggctgtgaattttttgaagctccgtccgtaagaaaacgcggcgatacctattattttatctattcatctattgcgtctaacgaactttgttacgcgaccagcaaaaaccccataaaggattatgtttatggcggcgttatcatcagcaacgccgacgtgcatatcagcgcctataaacccgctgataaaccaatgggctgcggcggcaataatcacggaagcatcatcgaaataaaaaataaatggtatatcttttatcaccggcataccaatggaaatgagttcagccgccagggatgccttgagccgatagaaataaaggcggacggttctattccgcaggtagaggtgacttcgtgcggaccaacggcaaaccgcttatcggcaaaggggagtttccggcatatattgcgtgtaacatattttccgtggaaaacaaccagcagttaa

SEQ ID NO: 60870 - protein, 352 aa, Unknown
  Obtained from environmental sample
  DOMAIN (18)...(315): Glycosyl hydrolases family 43
  misc_feature (1)..(352): Xaa is any amino acid
MKKRGFNPYLPSWEYIPDGEPYVFNGRVYIYGSHDKFNGHVYCPNDYVCWSAPENDLSDWRYEGVIYPKTNDPFNKDGHMCLYAPDITRGPDGRYYLFYVFDKVNVVSVAVCKSPAGKFKFHGYVHYPDGTLLGKREGDQPQFDPGVLTEGDKTYLFTGFCGRDDKTRIGATAVTLGPDMLTVLDKPILVAPGVHNSKGTSFEGCEFFEAPSVRKRGDTYYFIYSSIASNELCYATSKNPIKDYVYGGVIISNADVHISAYKPADKPMGCGGNNHGSIIEIKNKWYIFYHRHTNGNEFSRQGCLEPIEIKADGSIPQVEVTSCGPTANRLSAKGSFRHILRVTYFPWKTTSS

SEQ ID NO: 60871 - DNA, 450 bp, Unknown
  Obtained from environmental sample
  misc_feature (1)..(450): n is a, c, g, or t
gtgcggaccaacggcaaaccgcttatcggcaaaggggagtttccggcatatattgcgtgtaacatattttccgtggaaaacaaccagcagttaatcagacaatggccgtttcataacccgtctttgccgaaaatttcgcaggatggacgggatggcgatgaagaacccggttttgtgacaaatatctcggacaattacggtattggttttaaatattttgattgtaagggaattaagaagattaagataaaaactcgcggttacaacgacggcgtctttcatgttaaaacaaaatgggacggcgagtctttggcgtgtataaaaattgaatacagcaatatttgggtggaatattcttcggatataaaccttcctgacggaatacacgccctttactttatttataaaggtaatggatacgcttctatggcttcctttactttggaataa

SEQ ID NO: 60872 - protein, 149 aa, Unknown
  Obtained from environmental sample
  misc_feature (1)..(149): Xaa is any amino acid
MRTNGKPLIGKGEFPAYIACNIFSVENNQQLIRQWPFHNPSLPKISQDGRDGDEEPGFVTNISDNYGIGFKYFDCKGIKKIKIKTRGYNDGVFHVKTKWDGESLACIKIEYSNIWVEYSSDINLPDGIHALYFIYKGNGYASMASFTLE

SEQ ID NO: 60873 - DNA, 414 bp, Unknown
  Obtained from environmental sample
  misc_feature (1)..(414): n is a, c, g, or t
gtggtttatgtatttgacgcctcttttgtcggcgcacttattattcctgatgaagcaaacccaaaggttgaaaaaatacgagctaaaataggagaagatgaagaaatttttgcgcctcaattattgtggtatgaaatagccaatattttcaaaaatttaatgaggcgtaaacgctgtacatttaacgaagttataaaatttttcccgccgttgtccgctatcaacattatctgtgattttgaaacaggccccaactatgccgagaaacttttgcgcctgtgcaatgattacaatatcagttcctatgacgccgcctaccttgaactggcaggacggaaaaaagcctctctctgtacactggacgaaaacctgataaccgccgcaaaaaaatacggcgtagcagtacttaaataa

SEQ ID NO: 60874 - protein, 137 aa, Unknown
  Obtained from environmental sample
  DOMAIN (3)...(135): PIN domain
  misc_feature (1)..(137): Xaa is any amino acid
MVYVFDASFVGALIIPDEANPKVEKIRAKIGEDEEIFAPQLLWYEIANIFKNLMRRKRCTFNEVIKFFPPLSAINIICDFETGPNYAEKLLRLCNDYNISSYDAAYLELAGRKKASLCTLDENLITAAKKYGVAVLK

SEQ ID NO: 60875 - DNA, 435 bp, Unknown
  Obtained from environmental sample
  misc_feature (1)..(435): n is a, c, g, or t
ttgaatatgcgcaataccctctttactctggtagacgaaggtatcattcccatcatcaacgagaacgatacagtttccgtagaagaaataaaaatcggcgacaatgacacgcttgccgcaagatcagcaattctttggagcgccgacctgttaatccttttcagcgacattgacgggttgtacaacaaaaacccgaaagaacataacgacgcagtccttgtcgaagaagtgcgggacattgatgccgtgcagaaagacatcagtataggaacggcaaacaactttggaacaggcggcattgctacaaaactggaagccgcaaaactggctttaagttacggtatccctgcaatcctcgcaaacggaggcaaaccccgcagtcttgaaaccctcgcggcgggtgggcaaaaagggacggtgtttcttaattcttga

SEQ ID NO: 60876 - protein, 144 aa, Unknown
  Obtained from environmental sample
  misc_feature (1)..(144): Xaa is any amino acid
MNMRNTLFTLVDEGIIPIINENDTVSVEEIKIGDNDTLAARSAILWSADLLILFSDIDGLYNKNPKEHNDAVLVEEVRDIDAVQKDISIGTANNFGTGGIATKLEAAKLALSYGIPAILANGGKPRSLETLAAGGQKGTVFLNS

SEQ ID NO: 60877 - DNA, 360 bp, Unknown
  Obtained from environmental sample
  misc_feature (1)..(360): n is a, c, g, or t
atgatttctaaccttatcgctgacgcgcgaaaaataattatcaagattggctcaaacacccttgccggcagtaacggcaaaatcaactcgcagtttctaaccgagtttgcggagcagactgcggcgcttatgaaaaagggcaagcagattgtcgttgtttcctcaggcgcgcaggtagcggggctttccacaatggacaagtgggcgcgaaaaaaagacattcactacagacaggcgttgtgcgctgtcgggcaggtagacctcatgggagcgtggaagcaaagcgttgaacagcacggcttgcacattgcgcagatacttttaacccgagaagatttgacgactcaatcagaacattga

SEQ ID NO: 60878 - protein, 119 aa, Unknown
  Obtained from environmental sample
  misc_feature (1)..(119): Xaa is any amino acid
MISNLIADARKIIIKIGSNTLAGSNGKINSQFLTEFAEQTAALMKKGKQIVVVSSGAQVAGLSTMDKWARKKDIHYRQALCAVGQVDLMGAWKQSVEQHGLHIAQILLTREDLTTQSEH

SEQ ID NO: 60879 - DNA, 1266 bp, Unknown
  Obtained from environmental sample
  misc_feature (1)..(1266): n is a, c, g, or t
atggcagattcattagctaccatttttaattctctcaaacaggcgcagacgaagctggcggcgcagaaccgcgcgggcaaagacaaagctcttgccgccgccgccgccgcaatcgaccgtgacagagccgccattctggaagcaaacgctcgtgatgtggaacaggcgagaaagggcggcatgaaagaaagccttgttgaccgtctgcttctcaacgacaaacgaatagacggtattatagaaggaatcgaaattgtgattaggcaggaagacccgattggtaaagtgcaggcgggttggactctgcccaacggtctgcagattgataaagttaccgtgcccctcggcgtcgccgccattatttatgaatcacgtcccaatgttacggcggactgcgccgcccttgcatacaaagcaggctgctcgatacttttacgaggttcctcttccgcgctggaatccaataaagcaattgttaaggctatcaaagcggggcttgaaagcggcggcggaattgcggacgctgtcgctcttgcggaatcaggcagcagagacgaagttgacgaaatcctgaaagcccgcggttatatcgacgtagttcttccccgcggagggcatgagttaatccgccgtgttgtagaaaacgctcgtatccctgtgattgaaacgggagaaggcaactgtcacatctacgttgagccgagcgcagatatgaacaatgcgatagaaattatcgccaacgcaaaactgcaaaaacccggcgtgtgtaacgctgtggaaacaatacttgtacacaaagacgcgctctcggcgcttatgccgaaaatggcagcagcgcttgcgggaaaatgcgaattgcgatgtgacggcgtgtcaaaagccgcaatcggcgcaataccttccgcccttgtcattaaagacgctgttgaggaagattgggcgacagagttccttgattacattcttgcggtaaaaacggtttcctcctgtgatgaggcaatcgctcatatcaaccggtacgggactaaacattcagaagcaattctcaccaacgatttaagggcggcgaatgagttccgctcaagagtagacgcggcgtgcgtatatgtcaacgcttccacacgtttcacagacggcgggcaattcggcttcggagcggagttgggaatcagcacgcagaaattccacgcaagaggaccgatgggtcttgaagcccttacaacgataaaataccttatcaacggcagcggacaaatacggagttaa

SEQ ID NO: 60880 - protein, 421 aa, Unknown
  Obtained from environmental sample
  DOMAIN (9)...(412): Aldehyde dehydrogenase family
  misc_feature (1)..(421): Xaa is any amino acid
MADSLATIFNSLKQAQTKLAAQNRAGKDKALAAAAAAIDRDRAAILEANARDVEQARKGGMKESLVDRLLLNDKRIDGIIEGIEIVIRQEDPIGKVQAGWTLPNGLQIDKVTVPLGVAAIIYESRPNVTADCAALAYKAGCSILLRGSSSALESNKAIVKAIKAGLESGGGIADAVALAESGSRDEVDEILKARGYIDVVLPRGGHELIRRVVENARIPVIETGEGNCHIYVEPSADMNNAIEIIANAKLQKPGVCNAVETILVHKDALSALMPKMAAALAGKCELRCDGVSKAAIGAIPSALVIKDAVEEDWATEFLDYILAVKTVSSCDEAIAHINRYGTKHSEAILTNDLRAANEFRSRVDAACVYVNASTRFTDGGQFGFGAELGISTQKFHARGPMGLEALTTIKYLINGSGQIRS

SEQ ID NO: 60881 - DNA, 2148 bp, Unknown
  Obtained from environmental sample
  misc_feature (1)..(2148): n is a, c, g, or t
atggaacgtctcgaaggcaccatcgaaaccatcacctaccaaaacgacgacaccggctactgcgtcctgcgcctctctaccgccgcggggctctgtgtctgcgtgggcagggcgcccgtcgtgcgaatggggatgtgtgtagccctcgaaggcgactgggtgcagcacaaacgcttcgggcggcagttttcctttgagcgctacgagatcaccaggcccaccaccgaggagggcatcacccacttgctcgaatcggggctcataagcaacatcggcgccaagcgcgcgcaattaattgtcgagaagttcggcaccgaaacgttgaatatcatagacaacactcccgaaaggctctccgagattccgggcatcggcagaaagacgcttcgcaaaataaaagactcctgggcgcaacagaggcacatccgcgacctcgtgctcttcctgcaagagtacgacatatcggcggccacggccaaccgcctctacaaggtctacggggacgactcgaaaaggcggatttgcgaaaatccatattcgctgatagacgatatatggggaataggctttattaaggccgacgccatcgcggtcaagatcggcttcgacgccaactcttacaagaggataaaggcggggctaatctacgccctgcaaaacgccgccacggccggacacacgtacctgcccaaagcggaactcgaaacggcggcggctcagcttctaggcgtaactcccgaacaaattctctacacgctcgaccactgcgttaatcaagattatctcatttgtcaagaggagtgcgtctacctgccctacctatacgccgccgaaacgggggtagcgcagcgcttatcggaacgatttagcggcgatggcgcccgcagcggggaacgttccattagcgacaaggagatagacggcttcatcgcccgatacgagaagagaaccggctgggcaggcgcgccggaacagctcgaggccgtccgcatcgccgccaagagcggcatcttcatactcaccggcggacccggcaccggaaaaaccaccgtcctgcaggttatcgtggcgctcttcaatgagatggggctcacggtagaactcgccgccccgaccggacgcgccgccgcccgcatgggctccatctccggcatcgccgcccgcactatccaccgcttgctagagttcaaacccggcggcagagagggcggcttctccttccaacgcggcgaaacaaatcccataaacgccgacgccgtaatcctagacgaggtctcaatggtcgatattctgctaatgaggagttttatcgcggccgtcaggaacgatacaaaactcatattggtaggcgacaaaaaccaactgccctccgtgggccccggtaacgtgctcgccgacctcatcgcctgtccgcgcatcccgcacgttgagctcaaacgcgtcttccgccaatccgccaagagccgcatagtcacgccgccccacgaaatcataggcggcggcactccggaattctcaaactccgccgccgataactgcttcctcatgacagaaaacgatccggaaaaatgcctggaaaccatagtagacctagtcagccgccgcctcccggcccgctacggcctcaacccgtcggccgacatacaggtactctcccccatgcaccgcggaacgctgggcaccataagcctaaacgccgcattgcaaagcgccctaaacaaaaatgaaaagaaaatccgcatagggcaaaacacattcatactcggcgatagggtaatccaagccaaaaacaactacgaggccggcgttttcaacggcgacatcggcttcataacggagatagacgacggcaaggcaacaatcgtgtttgacaaaacggcggcggtctacgaggatcgcgacctcgaccagatcatccccggctactgcataagcatccacaagagccaaggctcggagttcagagcggtggtgattccggtctccacgcagcactacattatgctgcagagaaatctgatctacaccgggctcacacgggcaaaagagttgtgcgtgttcatcgggtcgcgcagagcgcttgatatggctgtgcagaatgataaggctttgacgcggaactctcggttgactttggggttgatgtag

SEQ ID NO: 60882 - protein, 715 aa, Unknown
  Obtained from environmental sample
  misc_feature (1)..(715): Xaa is any amino acid
MERLEGTIETITYQNDDTGYCVLRLSTAAGLCVCVGRAPVVRMGMCVALEGDWVQHKRFGRQFSFERYEITRPTTEEGITHLLESGLISNIGAKRAQLIVEKFGTETLNIIDNTPERLSEIPGIGRKTLRKIKDSWAQQRHIRDLVLFLQEYDISAATANRLYKVYGDDSKRRICENPYSLIDDIWGIGFIKADAIAVKIGFDANSYKRIKAGLIYALQNAATAGHTYLPKAELETAAAQLLGVTPEQILYTLDHCVNQDYLICQEECVYLPYLYAAETGVAQRLSERFSGDGARSGERSISDKEIDGFIARYEKRTGWAGAPEQLEAVRIAAKSGIFILTGGPGTGKTTVLQVIVALFNEMGLTVELAAPTGRAAARMGSISGIAARTIHRLLEFKPGGREGGFSFQRGETNPINADAVILDEVSMVDILLMRSFIAAVRNDTKLILVGDKNQLPSVGPGNVLADLIACPRIPHVELKRVFRQSAKSRIVTPPHEIIGGGTPEFSNSAADNCFLMTENDPEKCLETIVDLVSRRLPARYGLNPSADIQVLSPMHRGTLGTISLNAALQSALNKNEKKIRIGQNTFILGDRVIQAKNNYEAGVFNGDIGFITEIDDGKATIVFDKTAAVYEDRDLDQIIPGYCISIHKSQGSEFRAVVIPVSTQHYIMLQRNLIYTGLTRAKELCVFIGSRRALDMAVQNDKALTRNSRLTLGLM

SEQ ID NO: 60883 - DNA, 2664 bp, Unknown
  Obtained from environmental sample
  misc_feature (1)..(2664): n is a, c, g, or t
atgtggcgcaacgtctactacctgccgcagctcgaagacgcgaaactcgacctcttctacttagaccccgccaagggcgacactatacgccacgtcggttcctcgcttatctcaaacgcgatgggactcacggacgatcaggggcgggccagaattgagaatgtggagatattcaaggcggacaaacaagagcttattataccgccgtggggaacgggaataaacgggaacgagccgttcgccaacccggcgctcggcgatatggcgagcgacatgatctataggctgggcctcaggaacaccgctatgagggattacgtggcaaagttcgggatactgaccaacggcattatgcggcgcaccacgtacgacgacctcggatggaatataatgccgggtacggtgatagtcaagacgaactcggggactctccttgtggagggagaggactacgatttggattacgagatgggaattttggatctattgtcgacgcgggctaagtcggccgagtccattctcataacctaccagcgcgagtctgactttgtgctggagaaaaaggtattcgccggtctgcgcggcgagatgcgtttgccgttcatcagcgacaactcgttcatggcggcgagtattctctaccagagcgccgcgaccaccgccggagacataccgcagttgggcaacgaacccttcaacaaactgcacctcagtttcaacacaagtttggatatgcggccggagtggatgactaaggcgattaacgcgataccgcttatcggtacggaggaggagtcgtccgcgaagattgactttgaggtggtgcatagccgtatgaacacgaatacctccgcggagaggggcgcctacatagacgatttcgagcggacaaaggacgggtacacgcttagtatgcgccactcgatctggcacccgtcgcactacccgttcaagtacaagggcggcgtacaggctatcgccgacagtatgctgaacaaactccggataccggtttgggatttttactggtacacgcccaacgcctacgacgaaaagaataagatcaaccgcttctccgtgtggaggcgcgacccgaacaacagccgctacaacacctccgacacgtacatagacgtgctgcgcctgaacgcgactccggcgtcgagggagcaccctatagcggttcaggatctcttcaaaaactcctacgcgtcagtcacaacttcgtttggccgcagcggcctgaacatggagaaccaccgctacgtggaactcgtggtcaaccccaggggttccggggcgcttaggggcaagggcaaactgatgatccagataggcaccttcagccacgaccaagtgcgcgacggcgggccgcccaacgggaaatttgacttggaggactcgacctaccaaaacaagccggcgctgctctcaatgtacgacaaggggctcaacggccgcgatgtcgccaacaagttctacctgatacccaacgccggcggcaccgggtgggacacgctctcacgaacccaaaacaccgacctgttggtggcgccgcgcggacgcgacaatcccagcggagacttgtaccgcaaatacgacaaggacaatcttaccacattccgctttgtcaacggaacgtgggagaacagcgcctacgacgacgagaacatcgacctcgacggcataccgagaatcggcattaccgagacctactactcctacgagatcgacctcgacatcgacgcgtcgccgtacatggacaagacctcacgcgtagtggaggagaatgggtggaggtactaccgtattccgctgaaagaggtgttggacggaatatcggtaacgaaggactcggcgtccggcggcgcggactgggcgaaggtgcgcggtatgcggcttgtgtggtacggcttcgacgagcgcgtgttgacaagtgagaacgagctgatcatcgccggcatcgatctcgccggaagctactgggagccctccgtcggttccgagagcaaggttgaggccacaagcataagcaactacgaggacgaggtctacaacaacagcgtcttcggcctgatagtcaagcccaaggccggcgaggttacgccggaggagaaatcgctgcgcctcaactttttcaacatgaactccggcgacactgtcaccgtgcgccgccttttgggcggaagttcgcagaatatttccgggtacgattcggtgtctataatggtttacagcaaggcctcctacggggaggatctgaagttcgtcttccgtttcggcagcgacgactcgacctactacgagtacgccgccccgattgacaaggggatagggtggagccgtttcgcgttcagtttgcaggatctatccgacctgaagctctccgcggacgtggagaacaagcccataaacgtctcccgcgggcgtttgcgcgttgtggcgccgtcgggcaagcggccgaacttcacggcgataaactttatggcggtcggcgctatttgcggggcgcaggggcctagcgagggcgagatatgggtgaacgagcttgtggcggtcggcgggaggattctctccggcgtcgcggcgcgggtcaacatcgccacgcagtgggcggacttcatgacgctgggcgcggggatcagtacacgacgctcgccataa

SEQ ID NO: 60884 - protein, 887 aa, Unknown
  Obtained from environmental sample
  misc_feature (1)..(887): Xaa is any amino acid
MWRNVYYLPQLEDAKLDLFYLDPAKGDTIRHVGSSLISNAMGLTDDQGRARIENVEIFKADKQELIIPPWGTGINGNEPFANPALGDMASDMIYRLGLRNTAMRDYVAKFGILTNGIMRRTTYDDLGWNIMPGTVIVKTNSGTLLVEGEDYDLDYEMGILDLLSTRAKSAESILITYQRESDFVLEKKVFAGLRGEMRLPFISDNSFMAASILYQSAATTAGDIPQLGNEPFNKLHLSFNTSLDMRPEWMTKAINAIPLIGTEEESSAKIDFEVVHSRMNTNTSAERGAYIDDFERTKDGYTLSMRHSIWHPSHYPFKYKGGVQAIADSMLNKLRIPVWDFYWYTPNAYDEKNKINRFSVWRRDPNNSRYNTSDTYIDVLRLNATPASREHPIAVQDLFKNSYASVTTSFGRSGLNMENHRYVELVVNPRGSGALRGKGKLMIQIGTFSHDQVRDGGPPNGKFDLEDSTYQNKPALLSMYDKGLNGRDVANKFYLIPNAGGTGWDTLSRTQNTDLLVAPRGRDNPSGDLYRKYDKDNLTTFRFVNGTWENSAYDDENIDLDGIPRIGITETYYSYEIDLDIDASPYMDKTSRVVEENGWRYYRIPLKEVLDGISVTKDSASGGADWAKVRGMRLVWYGFDERVLTSENELIIAGIDLAGSYWEPSVGSESKVEATSISNYEDEVYNNSVFGLIVKPKAGEVTPEEKSLRLNFFNMNSGDTVTVRRLLGGSSQNISGYDSVSIMVYSKASYGEDLKFVFRFGSDDSTYYEYAAPIDKGIGWSRFAFSLQDLSDLKLSADVENKPINVSRGRLRVVAPSGKRPNFTAINFMAVGAICGAQGPSEGEIWVNELVAVGGRILSGVAARVNIATQWADFMTLGAGISTRRSP

SEQ ID NO: 60885 - DNA, 2157 bp, Unknown
  Obtained from environmental sample
  misc_feature (1)..(2157): n is a, c, g, or t
atggattcaattaaagaagatgacgatccgtattttcgtgatgaccccggaaatatcggcgaaatgcttcctatatacaagctggatctgaataacggcattgacgcgtggaagttatggcgtaccaatgacggacgtattctgccgaacagcgccagcagttttcacctgattgaaaatccgtttggaaaagacaatttattgattctttctaccagttttgatcctgttgccgtaaaaaaatctttcggcggttttggaataagaattcccataagtccagccgtagtgttaaacgataagacaaaaattgaattcgattttttttacccccaaaacgcggttggaaaatacatgcgctttgaaatttggtcaacttcaagcggcggggaagggagtcaggcaaatgccggtcttcaggggaccagcaaagcgcagatttatatccgctcatcagagatggaagacgccaataatgtaaaccttaattccagatgcggttactacaataatgaaacatggtataaaaaaactcttcacgcggaaattcccgtgtcaaacggaaaatgggaatatcttaatattgatcttcatacggaaaccggcgttaaactttccaacgatcttcttatgataggaaatgtaaggataatgcagaaggaccgtggcggacaaaaaattccggatgtaaataattcaaaaagtttttttcaggttgctcctgtcaagggaaaatataatccggaaaacggatattttcttacaggtacggccggaaaggggaagatagatactgattcattagaaggttatcatttcggaattttttttgatcagaataatcttatgccagagattcattattcggctccaaaatggcttaaagacgaatatcccgattttaaatttaagtctaataacgaaaagatcgaatggctttttccgaccgacgattatttaaacctgattaattctggtaaaaaaggcgaatataaattacacggccattgtcttgcgtggaatcaccagtctcctccgtggatggaacaaattattccggaaaatattgattccatagaatggaataaagaaggattgtattactcttatggcgccgccgcctcggaaccgttccaaaaggtaaaaaaagaaacggcccgacgcgtttattttaaccatatcctgtgtattatgcgccattttatgtctgtcgacgcaaagtacggctcaagcatagagcgcggtattataccgttccattcgttcgatgttataaatgtggaaattcacgaaaacaagcatgtcgaaattattcaaaaaaacaaagatgaatggaaaacggctttaagaaacctgtcatggctcattgcgatgacggataatgattataacgatataaaacagcattatatttacctgcttttcaaatttgcgcacattgccgttcctaacgcgcttatggcggcaaaatacaaaaaaggtttcagcgatccgaatgttgttccggattatatgaagctggattttcatgatgacaacggcagcatagacgcttatatcagcgaaaagccccctattctgatttacaacgattacgaaatagcaagctattccaagacaagaatcgcctgcaatatgatcagggaattaaataccgcgtgggtatttgatcctctttatgacggcagaaatttaattgagtgtatgggaatacaggggcacgaggctgtaagtccgactatggcaggcagaaatcaaacttatataacggcgtttgtcgggcttattgataaaggcctgctggattgtatatgctattccgagattgatattaaacaacccgataccgctccgggcggcggttcaaaagcgcccgaggtattaaaccaaaaacaagccgacgccattggttaccaatacgcgctgctttttaaggtgttcgaaaaatataaaaaatatattgatcatgttattatttggagtccttttggcgccggctttgcgaacggttatgttctttttgatcaagacaaaaaagcaagtcaggcgtattatgctgttatggatccggacagattcatcaaagggcattcgtatttagacaaattttttgcgggagaatatgataaagtcagagactacaacaaaaaatcttga

SEQ ID NO: 60886 - protein, 718 aa, Unknown
  Obtained from environmental sample
  DOMAIN (262)...(691): Glycosyl hydrolase family 10
  misc_feature (1)..(718): Xaa is any amino acid
MDSIKEDDDPYFRDDPGNIGEMLPIYKLDLNNGIDAWKLWRTNDGRILPNSASSFHLIENPFGKDNLLILSTSFDPVAVKKSFGGFGIRIPISPAVVLNDKTKIEFDFFYPQNAVGKYMRFEIWSTSSGGEGSQANAGLQGTSKAQIYIRSSEMEDANNVNLNSRCGYYNNETWYKKTLHAEIPVSNGKWEYLNIDLHTETGVKLSNDLLMIGNVRIMQKDRGGQKIPDVNNSKSFFQVAPVKGKYNPENGYFLTGTAGKGKIDTDSLEGYHFGIFFDQNNLMPEIHYSAPKWLKDEYPDFKFKSNNEKIEWLFPTDDYLNLINSGKKGEYKLHGHCLAWNHQSPPWMEQIIPENIDSIEWNKEGLYYSYGAAASEPFQKVKKETARRVYFNHILCIMRHFMSVDAKYGSSIERGIIPFHSFDVINVEIHENKHVEIIQKNKDEWKTALRNLSWLIAMTDNDYNDIKQHYIYLLFKFAHIAVPNALMAAKYKKGFSDPNVVPDYMKLDFHDDNGSIDAYISEKPPILIYNDYEIASYSKTRIACNMIRELNTAWVFDPLYDGRNLIECMGIQGHEAVSPTMAGRNQTYITAFVGLIDKGLLDCICYSEIDIKQPDTAPGGGSKAPEVLNQKQADAIGYQYALLFKVFEKYKKYIDHVIIWSPFGAGFANGYVLFDQDKKASQAYYAVMDPDRFIKGHSYLDKFFAGEYDKVRDYNKKS

SEQ ID NO: 60887 - DNA, 810 bp, Unknown
  Obtained from environmental sample
  misc_feature (1)..(810): n is a, c, g, or t
gtgcttcatcttctgtacagccgcttctggcacaaggttctctacgatctaggtcttgtgaataccgtcgagcctttccaaagattgatcaatcaggggatgatcctcggcgaggataaccagaaaatgagtaagagccggggcaatgtaattaatcccgacgatgttatcaaagaatacgggacagattcgctccgcctctatgagatgtttatgggcccgctggaagtcagcaaaccgtggaatatgtcgggcgtttcgggagtgtcgcgttttcttgagcggctttgggctataggcgaaaaaccactgtgcgacgctgaaccggggagcgacgcagccggaggcgccgctttgcaaaaacttttgcaccgtaccataaaaaagattacgcacgataccgaaaacctctgttttaataccgctatcagccagatgatgatctactcaagcgaactcgcgaaactcgcggaaattccgcgttcaatgtggcagccgtttgttataatggcaagcgtttacgctccgcatcttggcgaagagctttgggaaaaactcggaaataaaaataccgtctccgcctgccaatggcctgtttatgacgacgctttaacgcgcgatgacgaagtgaatatcgtagtgcaggtaaacggaaaaatccgcgataaatttacggctcctgtcggaacatccaaagatgaattggaaaaaaccgcattttctttgtccgatgttaagaagtggctggaagggcaaacggtaaaaaaagttatcgttgtacctgacaaattagttaatattgtgatataa

SEQ ID NO: 60888 - protein, 269 aa, Unknown
  Obtained from environmental sample
  DOMAIN (116)...(240): Anticodon-binding domain
  misc_feature (1)..(269): Xaa is any amino acid
MLHLLYSRFWHKVLYDLGLVNTVEPFQRLINQGMILGEDNQKMSKSRGNVINPDDVIKEYGTDSLRLYEMFMGPLEVSKPWNMSGVSGVSRFLERLWAIGEKPLCDAEPGSDAAGGAALQKLLHRTIKKITHDTENLCFNTAISQMMIYSSELAKLAEIPRSMWQPFVIMASVYAPHLGEELWEKLGNKNTVSACQWPVYDDALTRDDEVNIVVQVNGKIRDKFTAPVGTSKDELEKTAFSLSDVKKWLEGQTVKKVIVVPDKLVNIVI

SEQ ID NO: 60889 - DNA, 1068 bp, Unknown
  Obtained from environmental sample
  misc_feature (1)..(1068): n is a, c, g, or t
atggcaaaaacaagcgcagcagcagaaagcggcgccgcggcggcaggcgccaagaagaaaaagggcggaaaggagtataccggccggcagaaatccgccatcttcctcgttaccataggctccgagctttccgcggagattttcaaatacctcagggaagatgaaattgaaacccttacctttgagatagcccgcctggaaaaaattgactccgaggagaaagacgctatcctgcaggagttccaggaactcatgatggcgaaccagtttatctccaccggcggcatcgactacgcgagggaactgctggaaaaatccctgggaagccagaaggccattgacatcatcaaccgcctgacatcaagcctccaggtgcggcccttcgactttatccgccgcacggatcctacgcacctgttgaacttcatccagcaggagcatccccagaccatagcccttatcctggcctatcttgagcctaacaaggcttcggttattttgcagaatctgaaccacgacgtgcagagcgacgtggcccgccgtatcgcgacgatggaccgcaccagccctgaggtcctccgcgaggttgagcgggttcttgaaaagaaactttcgaccctgtccagcgaggattacaccacggcgggcggtgttgaaagcatcgttgaaattctcaatcttgtcgaccgcgcgtcggagaaacagatcattgaggccctggaagacgaagacccggaacttgccgaagagatcaagaagaggatgttcgtgttcgaggacatcgtcatgctggacgaccgctcgatccagaaagtcatgcgggaagtggactcgcaggaacttgccaaagcgctcaagagtgtggataccgaggtacaggacaagattttcaagaatatgtccaagcgcgcggctaccatgcttaaggaagacatggaatacatgggcccggtacggttaaaggacgttgaggaagcccagcagaaaatagtttcgatcatccggcatcttgaagacatcggtgaaattgttattgcccgctcgggtgaagacgaaatggttgtgtaa

SEQ ID NO: 60890 - protein, 355 aa, Unknown
  Obtained from environmental sample
  DOMAIN (237)...(346): FliG C-terminal domain
  misc_feature (1)..(355): Xaa is any amino acid
MAKTSAAAESGAAAAGAKKKKGGKEYTGRQKSAIFLVTIGSELSAEIFKYLREDEIETLTFEIARLEKIDSEEKDAILQEFQELMMANQFISTGGIDYARELLEKSLGSQKAIDIINRLTSSLQVRPFDFIRRTDPTHLLNFIQQEHPQTIALILAYLEPNKASVILQNLNHDVQSDVARRIATMDRTSPEVLREVERVLEKKLSTLSSEDYTTAGGVESIVEILNLVDRASEKQIIEALEDEDPELAEEIKKRMFVFEDIVMLDDRSIQKVMREVDSQELAKALKSVDTEVQDKIFKNMSKRAATMLKEDMEYMGPVRLKDVEEAQQKIVSIIRHLEDIGEIVIARSGEDEMVV

SEQ ID NO: 60891 - DNA, 978 bp, Unknown
  Obtained from environmental sample
  misc_feature (1)..(978): n is a, c, g, or t
atgaccaaagcggtatacagtccggacgagcttgttcttgttgacgagacagtcataatcaatcctcccacggactttttttcgacgcagaaagaaactgtcctcgcctccggtgatgaagaaattgaagcggatcatcagatggtggaggtgtacactggtccgaccgtagaggatctccgccgtgaagccgaggaattcaaagccgagtgggaacaggaaaagaaatcaatgctcgaggccgcccgggccgaagctgatgaaattgtgcagttggcggacatggcggtcgcaaaggaaaaacaggagaaaaccgctgaagcggagaatgttcttgtcaaggcgaaggaagaagcgcaaaggctggtaagcgaagcgcagcaactggctgagaaacttgaaacagacacccgtaaaacacttgacgacgaanaaaacgccgcccttaatcaggccagggaagaaggcatanataanggctatgccgagggcaagaccgaggtcgaccgtctgatagaagcgacccatgttgtacttgaacgggcgcaggacaagcgcggcgatattcttatccagaccgaagaggaagtgatcaggctggtgctgctcctggtcagaaaaattgtcaaggttatttcagaaaaccagcgcgaagtggtcatttccaatgttattgaggccctgaagaaagttaaagacaggggcaatataattatccgcgttaataccgcggatttaaaactgactacagagcatacaaaagagtttatcaaagagctggaaggggtaaaatcaatacaggtggcggaggattcttccgtggacgcgggtggctgcgttattgaaacggatttcggcgaaatagacgcccgcatagccagccagcttggcgagcttgagtcgaaaatactgcaagcgtccccgataaaatcaaaaccaaaaagcctgacgaggtcttcgttaaaaactgaaatttag

SEQ ID NO: 60892 - protein, 325 aa, Unknown
  Obtained from environmental sample
  misc_feature (1)..(325): Xaa is any amino acid
MTKAVYSPDELVLVDETVIINPPTDFFSTQKETVLASGDEEIEADHQMVEVYTGPTVEDLRREAEEFKAEWEQEKKSMLEAARAEADEIVQLADMAVAKEKQEKTAEAENVLVKAKEEAQRLVSEAQQLAEKLETDTRKTLDDEXNAALNQAREEGIXXGYAEGKTEVDRLIEATHVVLERAQDKRGDILIQTEEEVIRLVLLLVRKIVKVISENQREVVISNVIEALKKVKDRGNIIIRVNTADLKLTTEHTKEFIKELEGVKSIQVAEDSSVDAGGCVIETDFGEIDARIASQLGELESKILQASPIKSKPKSLTRSSLKTEI

SEQ ID NO: 60893 - DNA, 378 bp, Unknown
  Obtained from environmental sample
  misc_feature (1)..(378): n is a, c, g, or t
ttgcgggctatcatgccgagcagggtcgattttcccacgcctgaaccggcaaatatgccaagccgctggcccttgccaaccgccaaaaggccgtcgatggcccgcacgcccgtgacgatgcgctcggtaatccgtctgcgtttaaggggatccggcgggcttgccagcgcggggtacatcacaggggaatcaatatcccccttatcatcaataggagtccncagggcgttcaacacacgaccaagaagcttctttgacacaggcacttcaagtcggtttccctgcgcaataacgagattgcccacttccagcccgtcggtttcctcgaacaccataagctgcacgatttcgtttctaagcccgacaacctcggcataa

SEQ ID NO: 60894 - protein, 125 aa, Unknown
  Obtained from environmental sample
  misc_feature (1)..(125): Xaa is any amino acid
MRAIMPSRVDFPTPEPANMPSRWPLPTAKRPSMARTPVTMRSVIRLRLRGSGGLASAGYITGESISPLSSIGVXRAFNTRPRSFFDTGTSSRFPCAITRLPTSSPSVSSNTISCTISFLSPTTSA

SEQ ID NO: 60895 - DNA, 1053 bp, Unknown
  Obtained from environmental sample
  misc_feature (1)..(1053): n is a, c, g, or t
atgcaaacacaaagaccgctcccgcgactcgacgaaaaatttacgctagaccagttcgtcgtaggcgcaagcaacgaattcgcctacagcgcggccaaggccgtagccgccgccccgggtaagaccgacttcaaccccctgctgatctacggccggtcgggcatgggcaaaacgcacctcctgcagtccatcggcaaccacatcctgaaaaacgaccccaaacgctccgtaatctacacctcgtccgaggagttccgtattatgttcgtggaagcgctccaaaacggcaacatccgggagttctccaccctcttccgcgaaagcgacgtcctgctgatggacgatatccaattcctggccggctgggagaagtcgcaagaggaactattccatatatataataccctctatatgtccaaaaaacagatcgtcctcacctccgacgtcccccccgcctccctaaaaggcttggaaaaccgcctgacctcacgcttccaaagcggcctatcggtggacatcctgccccccgacctggagatgcgcgtcgccatcctaaacaaaaaagccgaaaactggaacctgagcctccccgaagaaatcctatactacatcggcgaaaacgtcccgtcaaacatccgggcgctcgaaggcgccatacgcaccataatcggcctggccatagtaaaaggcggcggcgaagacataactctcgacctagccaaagacgccctcaaagacatcatcaaagcgccggcggaaacctcaagggtatccatagaccgaataatagaaaaaaccgccgccttctactgcgtcccagtaaacaacgtgctcgaaaagaacaaaagaaaagaagtcgccctatgcaggcaagtggcaatgtacatctccaaaaaactgacaaaccacagcctaaaatccatcggcctgaacttcggcggaagagaccacaccacagtcatacacgccgtggatgtggtcgaggaacaaatcaaaaacgacccgaacaccgcacgggacgtagaagcaattatcgcgtcgctacgacagtaa

SEQ ID NO: 60896 - protein, 350 aa, Unknown
  Obtained from environmental sample
  DOMAIN (258)...(327): Bacterial  dnaA  protein helix-turn-helix domain
  misc_feature (1)..(350): Xaa is any amino acid
MQTQRPLPRLDEKFTLDQFVVGASNEFAYSAAKAVAAAPGKTDFNPLLIYGRSGMGKTHLLQSIGNHILKNDPKRSVIYTSSEEFRIMFVEALQNGNIREFSTLFRESDVLLMDDIQFLAGWEKSQEELFHIYNTLYMSKKQIVLTSDVPPASLKGLENRLTSRFQSGLSVDILPPDLEMRVAILNKKAENWNLSLPEEILYYIGENVPSNIRALEGAIRTIIGLAIVKGGGEDITLDLAKDALKDIIKAPAETSRVSIDRIIEKTAAFYCVPVNNVLEKNKRKEVALCRQVAMYISKKLTNHSLKSIGLNFGGRDHTTVIHAVDVVEEQIKNDPNTARDVEAIIASLRQ

SEQ ID NO: 60897 - DNA, 1005 bp, Unknown
  Obtained from environmental sample
  misc_feature (1)..(1005): n is a, c, g, or t
gtgacggtttttggaggtacgggagcgaccggcagcggcaattacgctcagggagcgacggttagcatatccgcggggacaccgccgtcgggtcagaagtttaagaattggacgacgtcaagcagcggggtgacgtttgccaacgctaatagcgcggcgactacgtttacgatgccggggaacgatgtgacggttgctgtgatctttgaggcggtatctacgcctacacccacgtacgctgtgacggtctccgggggtaccggtgcgaccggaggcggtaattatactcagggagcgacggttagcatatcagcggggacaccgccgtcgggtcagacgttcaagaattggacgacgtcaaacagcggcgtaacttttgccaatgcgaatagcgcggcgactacgtttacgatgccggggaacgcggtgacggttacggcgaactttgtcagttcaagcgttcaattgtatccgataaccgatgtcagggataataaaaagtacaatacggtgaagataggcagtcagacgtggatggcggagaatcttaattatgcgacgtcaagcggttcttggtgttatggcgacagcgccgataattgcgcgaagtacggtaggttgtacgattgggatgtggcgaaaacaatctgtccatcggggtggacgttgccggatacggcggattggcgtaaattgatgaatgtggccggtgattcatcggttgcgggcaggaagttgaaggcgacaggcggttggggtagcagcagtagttacaacggcacggacgattacggtttttcggctcttcccggcggcgaccgccacgccgacggtagtttcaaccaccgtaccagcagtgatattcagggcctctggtggtcaataacggagttcaacgacaagaacgcattcagttataatatgtcctatagtaactctatagtaaagggcggttattttgataaggtggcaggctattcggtgcgttgccttaagggggaatga

SEQ ID NO: 60898 - protein, 334 aa, Unknown
  Obtained from environmental sample
  SIGNAL (1)...(18)
  misc_feature (1)..(334): Xaa is any amino acid
MTVFGGTGATGSGNYAQGATVSISAGTPPSGQKFKNWTTSSSGVTFANANSAATTFTMPGNDVTVAVIFEAVSTPTPTYAVTVSGGTGATGGGNYTQGATVSISAGTPPSGQTFKNWTTSNSGVTFANANSAATTFTMPGNAVTVTANFVSSSVQLYPITDVRDNKKYNTVKIGSQTWMAENLNYATSSGSWCYGDSADNCAKYGRLYDWDVAKTICPSGWTLPDTADWRKLMNVAGDSSVAGRKLKATGGWGSSSSYNGTDDYGFSALPGGDRHADGSFNHRTSSDIQGLWWSITEFNDKNAFSYNMSYSNSIVKGGYFDKVAGYSVRCLKGE

SEQ ID NO: 60899 - DNA, 483 bp, Unknown
  Obtained from environmental sample
  misc_feature (1)..(483): n is a, c, g, or t
gtgcttggcaagggaaccagttttgaggcgttaagttttaatcctgacgttgtgaaactgtttgaattaaaacgctggaacttatataccattcttgcaaagtacggcataccgccccgtgtcgcaaatatctctgacaggtcaacggctttatccggcaaggataccaaagaacaacattccgcattttggcaatacacgttaattcccttacttagacaatttgaacaaacattagaaagccaattttttatgcgtttcaacctgaaagaaaaaggccgttttgacctttgggatataccggaactaatggaaagcgaagattcgcaaagcaggagagatattgcggaaataaacgcggggcttaaaacaataaatgaagtgcttaaagaacgtggaaaagagcctaaaccgtggggggatatttggtatagacctaaaaacatgattgcaactaacggtaaaaatggggatggggaataa

SEQ ID NO: 60900 - protein, 160 aa, Unknown
  Obtained from environmental sample
  misc_feature (1)..(160): Xaa is any amino acid
MLGKGTSFEALSFNPDVVKLFELKRWNLYTILAKYGIPPRVANISDRSTALSGKDTKEQHSAFWQYTLIPLLRQFEQTLESQFFMRFNLKEKGRFDLWDIPELMESEDSQSRRDIAEINAGLKTINEVLKERGKEPKPWGDIWYRPKNMIATNGKNGDGE

SEQ ID NO: 60901 - DNA, 702 bp, Unknown
  Obtained from environmental sample
  misc_feature (1)..(702): n is a, c, g, or t
atgcagaggggaactttagtagttagcagggcggttaataaccactcgtactacaaaaagcgttttgaagctctgggatttcctgacgtaacggttacggctcttgataaagatgccttatcttctcttatccgtaaacaaaaaccgaaacaattatttatgggggcaagattttatcaatgctgtacgccttttttaatggggcaattacataaagattttcctaaaataaatatgactgctgtttgtatcggcgaataccctgccgaacttggtatgtattttattgtaaacggaattaaatcatactttacaagttttgagggccttgaccaattctatatcggaattgacgaggtaagaaaaggcaatggttatatttcccctgcggcaatggctcgtatggatatgaggcaaactttcataatgcctgccggggatataactggcagggaaagggaagtgatacggcttatttgctgcggctataaggatttggaaattggcgataccctgcacatttcgagaaggactgtagatactcataaaacaaatatatttaccttgttaaatgtccgtaatgctgtcgaactggttattgccgccctgacgcttaaaattgtcaatctcgatgagctttatttctacccaaaagattatacgttaaatcctttaccggatacaaaaattaagaggagatga

SEQ ID NO: 60902 - protein, 233 aa, Unknown
  Obtained from environmental sample
  DOMAIN (145)...(202): Bacterial regulatory proteins, luxR family
  misc_feature (1)..(233): Xaa is any amino acid
MQRGTLVVSRAVNNHSYYKKRFEALGFPDVTVTALDKDALSSLIRKQKPKQLFMGARFYQCCTPFLMGQLHKDFPKINMTAVCIGEYPAELGMYFIVNGIKSYFTSFEGLDQFYIGIDEVRKGNGYISPAAMARMDMRQTFIMPAGDITGREREVIRLICCGYKDLEIGDTLHISRRTVDTHKTNIFTLLNVRNAVELVIAALTLKIVNLDELYFYPKDYTLNPLPDTKIKRR

SEQ ID NO: 60903 - DNA, 1599 bp, Unknown
  Obtained from environmental sample
  misc_feature (1)..(1599): n is a, c, g, or t
ttgtcaaatgaactttccgtgattcttgacatgcctcccgctgaaatacgcaataaaattaactcctctgaatccaatttcctttatttaaaaaagcagattgatgacgcgacggcaaaacagctttccgttgttcttgaaaataaagaaatcaagggtgtaatgattcagcctgttatcggaagattgtaccccgaaaaaaaactggcaagccagattatcggttttgtgggagacagaaaccaggggcttgagggcattgaatttgcatttaacgatattcttgatggaattgaaaataacggcaaaggctcgcaggttgtattaacaatcgatacttatgttcagcatattcttgagcaaattgcatcaaacgctatggagcagacggaagcggaagcggttatgctgcttgcaatggatccgcgctccggagatattcttggttctgtgtcgatgccgaattttgatcccaaccaaatccgcgattccgatgttaacagccgtatgaaccgtcctgtaatttgggcttatgaaccgggttctgtattcaaggttttttctctcgcggctcttatggattcaggggcaatttcaggtgattccgtttttacatgtaacggcgtttatgttacaagccgcggcagtacaattaactgtctgggttctcacggaagggtaactgtaagggaaataataattaactcctgtaatgcgggagccgcctacgcttccgatcatttgggaagcgccgctttttaccaactgttaagcaattttggttttggttcgcgcaccggagccggaagtccaggagagacaacaggttatcttgtcagcagtgaatactggtcggatcgttcaaaacccactctggcgatgggacaggaaattgcggtttccgcctaccagatgcttcaggcggcatccgctgttgcgaatgacggaattcttgttcatccgaaaattgtttcaaaaataatttcagcagacggtaaaacggtaacaccgtgggaaaccggggaaaaccgccgcgtcctgaaggcggaaaccgcaagagctatacgctcctacatggtagacgttacttcaagtatcggcaccggctggcgcgccgcagttgaggatatgtcccttgcggtaaaaaccggcacagctcaaataattgatcctgtaacaaggaaatattcggaaacagattttatcgcaagctgtattgccctgcttccctctgaatcaccttcgctgattctctaccttgcgataataaaaccaaaaggtgaaattctcggcggcaggatagccgctcccgtaatccgcgaagcggcggagtctttaattgattacctcggtattccgcgcggaaggaatccgcagattagccatccttcttcgataaatattcccgcagaccgccttccagctgtcgacggtcaggttcccgactttacgggacttgcaaagcgcgtacttcttcccctcctgctacgcaatgatataaacgtggaaatccgcggagacggctgggtgcgccggcagaccccgtccgccggaacgcctgtaacagacggcatgacgattgttcttgaactggagtaa

SEQ ID NO: 60904 - protein, 532 aa, Unknown
  Obtained from environmental sample
  DOMAIN (478)...(532): PASTA domain
  misc_feature (1)..(532): Xaa is any amino acid
MSNELSVILDMPPAEIRNKINSSESNFLYLKKQIDDATAKQLSVVLENKEIKGVMIQPVIGRLYPEKKLASQIIGFVGDRNQGLEGIEFAFNDILDGIENNGKGSQVVLTIDTYVQHILEQIASNAMEQTEAEAVMLLAMDPRSGDILGSVSMPNFDPNQIRDSDVNSRMNRPVIWAYEPGSVFKVFSLAALMDSGAISGDSVFTCNGVYVTSRGSTINCLGSHGRVTVREIIINSCNAGAAYASDHLGSAAFYQLLSNFGFGSRTGAGSPGETTGYLVSSEYWSDRSKPTLAMGQEIAVSAYQMLQAASAVANDGILVHPKIVSKIISADGKTVTPWETGENRRVLKAETARAIRSYMVDVTSSIGTGWRAAVEDMSLAVKTGTAQIIDPVTRKYSETDFIASCIALLPSESPSLILYLAIIKPKGEILGGRIAAPVIREAAESLIDYLGIPRGRNPQISHPSSINIPADRLPAVDGQVPDFTGLAKRVLLPLLLRNDINVEIRGDGWVRRQTPSAGTPVTDGMTIVLELE

SEQ ID NO: 60905 - DNA, 462 bp, Unknown
  Obtained from environmental sample
  misc_feature (1)..(462): n is a, c, g, or t
ttgcttggagtaattaacgacgttcttgatatgtccaaaatcgaagccaacaaatttgaaattattcctgtggaatttgagcttgagaaaatgctccggcgggtagtaaatgtagtcaatttcagcatagacaaaaagcgtcaaaaactatcagtacatattgaccattccattccacggacattgacaggagacgatcagcggatagcgcaggtcatcaccaacctgcttgggaacgctgttaaattcgcacccgaagaagacaccattactttttcagtgagtcttgtggaaaaaacaagcgacctctgtactctgcgggtttcggtaagcgataccggaatcggtataactcccgaacagcaggcgaaactttttaatcttttgaacaggctgaatccagcacaacccgtaaatacggcggtacgggacttggactcgctatttccaaaagcattgtag

SEQ ID NO: 60906 - protein, 153 aa, Unknown
  Obtained from environmental sample
  DOMAIN (64)...(152): Histidine kinase-, DNA gyrase B-, and HSP90-like ATPase
  misc_feature (1)..(153): Xaa is any amino acid
MLGVINDVLDMSKIEANKFEIIPVEFELEKMLRRVVNVVNFSIDKKRQKLSVHIDHSIPRTLTGDDQRIAQVITNLLGNAVKFAPEEDTITFSVSLVEKTSDLCTLRVSVSDTGIGITPEQQAKLFNLLNRLNPAQPVNTAVRDLDSLFPKAL

SEQ ID NO: 60907 - DNA, 852 bp, Unknown
  Obtained from environmental sample
  misc_feature (1)..(852): n is a, c, g, or t
atgggcggttcaatatggattgaatcagaaccggaaaaaggttctacttttttctttacaattcaacttaaacgcggtacgaatgaaaaacacaggcttttgtcatccgatataaattccaaaaatgtccgtatcctcgcggttgacgacgacaaggacgtattgctttattttaatgaaatagcgcaaggtttcggtctaacgtgtgatacagccttaagcggggaagaagcgaatcaacttataaaacaaaaaggcgactacaatatctattttatagactggaaaatgcccggcatggacggcatacaacttacccatgaaataaagacgcgctcgaaagaaaattccatcgtaacaatgatatccgccgccgaatggagcgtgattgtcgatgaagcgaaagcggcgggcgttgataaatttctgtccaaacctctgttcccttccgcaatcgccgaagtaattaacgaatgcctcggcgtagaccaacagcaggcggaaaaatcgcaagccgcggatattgtcggcatctatgcgggacgacgcttactactggttgaagacgttgaaattaaccgtgaaatagtactgaccctgctggaacctacaaagttggaaatagactgcgccgaaaacggcgtagaagcagtccgtatgtttaccgaagctccgcataaatacgaaatgattttcatggatatacaaatgccggaaatggacggctatgaagcgacacggcaaatcagggaattggaagcggaatttaataaaaacatttcagaagacaatagcgcaagtttcacngaaagtgaaaataaaaatatggagtttccgaaggaaactccttaa

SEQ ID NO: 60908 - protein, 283 aa, Unknown
  Obtained from environmental sample
  DOMAIN (182)...(270): Response regulator receiver domain
  misc_feature (1)..(283): Xaa is any amino acid
MGGSIWIESEPEKGSTFFFTIQLKRGTNEKHRLLSSDINSKNVRILAVDDDKDVLLYFNEIAQGFGLTCDTALSGEEANQLIKQKGDYNIYFIDWKMPGMDGIQLTHEIKTRSKENSIVTMISAAEWSVIVDEAKAAGVDKFLSKPLFPSAIAEVINECLGVDQQQAEKSQAADIVGIYAGRRLLLVEDVEINREIVLTLLEPTKLEIDCAENGVEAVRMFTEAPHKYEMIFMDIQMPEMDGYEATRQIRELEAEFNKNISEDNSASFTESENKNMEFPKETP

SEQ ID NO: 60909 - DNA, 321 bp, Unknown
  Obtained from environmental sample
  misc_feature (1)..(321): n is a, c, g, or t
ttgcgtacagaaaacggcatccgttatgtgtcaaaatggacaaacggcgtgatttccgcggaagtgaaagaatccattgattgcggcacacatacgctgtttatcgccgaggtgaatcaggcattttcgctgtcacgtgacgcaagtgttacatatcaatattattttgataatataaaaccaaagccccagccgccgaagggaaataaaaagggatttgtctgcaagatttgcggttatgtgcatgaaggcgatactttgccggatgattttatttgtccgttgtgcaagcatggcgctaaagactttgaaagaatttaa

SEQ ID NO: 60910 - protein, 106 aa, Unknown
  Obtained from environmental sample
  DOMAIN (70)...(103): Rubredoxin
  misc_feature (1)..(106): Xaa is any amino acid
MRTENGIRYVSKWTNGVISAEVKESIDCGTHTLFIAEVNQAFSLSRDASVTYQYYFDNIKPKPQPPKGNKKGFVCKICGYVHEGDTLPDDFICPLCKHGAKDFERI

SEQ ID NO: 60911 - DNA, 1038 bp, Unknown
  Obtained from environmental sample
  misc_feature (1)..(1038): n is a, c, g, or t
ttgaaggggggtatggcgacgatattggatagccggggacaggtggatcttttctcaattataacctgccttttagcggctttagttgtgagatgcgccggtaaactgactaaaaagccggcggaacctcaacatgatgtagtacaggaaaccgccgttgatgaggttccaaatgaaacggtccgggttctttcagagggacagcccggaaatcctcccatgtcaatcgaagtccagaccaacgcctcatataccgaggatgaacgtgagaatatatccgtttacgagaggtttaactccgcggtggtaaatatcaccaccgagaccatggcggtaaactggtttctggagccggtgccgcaggaaggcggctcaggttccggttcgattatagatacgcggggctacgtgctgaccaacaaccatgttatccggaacgcctacaaggtatatataaaccttgccgacggcagccagtacgaggggacggtggcgggcgccgatccggaaaacgacctggccgtggttaaattcgatcctcctgccggaactgtattgaagaccataccttacggcgattccggcaacctgaaagtgggtcagaaagtgctcgccatcgggaaccctttcgccatggagcgtacccttacagtcggcattgtttccggccttggaaggcccatccagattacccgccagcacattgtgcgggacatgatccagaccgacgcttccattaacccgggcaactcgggcggccccctgctggactcccgcggcaggatgataggcatcaacacgattatattttccccttccggcggttcagtcggagtcggttttgccattccgggtgaacaccgccaggcggggtggttaacgagcttatacagtacggcaaagtacggcgcggctggctcgacgcgacaatggtacagctctttccggcgctggtgcgttacgcgaaattttctgtcagttcgggtcttcttgtttcccgcacccgccggggcgggcttgcggacaaggccggactaa

SEQ ID NO: 60912 - protein, 345 aa, Unknown
  Obtained from environmental sample
  DOMAIN (112)...(293): Trypsin
  misc_feature (1)..(345): Xaa is any amino acid
MKGGMATILDSRGQVDLFSIITCLLAALVVRCAGKLTKKPAEPQHDVVQETAVDEVPNETVRVLSEGQPGNPPMSIEVQTNASYTEDERENISVYERFNSAVVNITTETMAVNWFLEPVPQEGGSGSGSIIDTRGYVLTNNHVIRNAYKVYINLADGSQYEGTVAGADPENDLAVVKFDPPAGTVLKTIPYGDSGNLKVGQKVLAIGNPFAMERTLTVGIVSGLGRPIQITRQHIVRDMIQTDASINPGNSGGPLLDSRGRMIGINTIIFSPSGGSVGVGFAIPGEHRQAGWLTSLYSTAKYGAAGSTRQWYSSFRRWCVTRNFLSVRVFLFPAPAGAGLRTRPD

SEQ ID NO: 60913 - DNA, 390 bp, Unknown
  Obtained from environmental sample
  misc_feature (1)..(390): n is a, c, g, or t
gtggttaacgagcttatacagtacggcaaagtacggcgcggctggctcgacgcgacaatggtacagctctttccggcgctggtgcgttacgcgaaattttctgtcagttcgggtcttcttgtttcccgcacccgccggggcgggcttgcggacaaggccggactaaggcagggcagcgatcctgtgcagtacgggcgcagcaccatctatctcggcggtgatattatcacttcggtggacggcatgaaggtcgccaccctgtccgatctttattccgcgctggagcacagcaagccgggcgacaaggtaaaggtcgggatactgcgcggcagcgaaaacctcacgctggaaatacctttagctgatcgcgaggaggtaatgaacaattga

SEQ ID NO: 60914 - protein, 129 aa, Unknown
  Obtained from environmental sample
  misc_feature (1)..(129): Xaa is any amino acid
MVNELIQYGKVRRGWLDATMVQLFPALVRYAKFSVSSGLLVSRTRRGGLADKAGLRQGSDPVQYGRSTIYLGGDIITSVDGMKVATLSDLYSALEHSKPGDKVKVGILRGSENLTLEIPLADREEVMNN

SEQ ID NO: 60915 - DNA, 558 bp, Unknown
  Obtained from environmental sample
  misc_feature (1)..(558): n is a, c, g, or t
atgatgcgctcggcggccttcctgttcgcaaacgccttcctccgcgccgaagtggaatatgacgcgcttacgggcatttacaacaggcggtactttgacgagaccatggagcacattataagttccttatccagatcagaaagtttgttaagcatgctgatgatcgacattgacttttttaaacggtacaacgacacctacggccatgtcgagggcgacaaatgcctgaaaaccgtggcgcaaaccctgtcccagtgcataacaagggccgatgactttgtcgccagatacggcggagaagaatttatcgtcgtcctgcccaataccgacgaacagggcgcgcggctgatcgccgacaaaatgcttgacaatatacggagcctcaatctgccgcatgaacaaagcgaagcggcggattatgtaacagtctctatcggcggcacaaccggtaaagtcctgcatacgcataacgccggtgattttgtaaaaagagccgacgagctgatgtataaatcaaagcaggaaggacgcaacagattctccttcggctggttctag

SEQ ID NO: 60916 - protein, 185 aa, Unknown
  Obtained from environmental sample
  DOMAIN (14)...(179): GGDEF domain
  misc_feature (1)..(185): Xaa is any amino acid
MMRSAAFLFANAFLRAEVEYDALTGIYNRRYFDETMEHIISSLSRSESLLSMLMIDIDFFKRYNDTYGHVEGDKCLKTVAQTLSQCITRADDFVARYGGEEFIVVLPNTDEQGARLIADKMLDNIRSLNLPHEQSEAADYVTVSIGGTTGKVLHTHNAGDFVKRADELMYKSKQEGRNRFSFGWF

SEQ ID NO: 60917 - DNA, 1893 bp, Unknown
  Obtained from environmental sample
  misc_feature (1)..(1893): n is a, c, g, or t
gtgataatgctccttgtttcggcgcgtattcacgcccaggacagggggctgcaagtgtttgccgccgagaacctcggcacccaggccgctatcggcagacagtacgccctgttcatcgccatagacgcgtaccgttactggaccccgcttaaaaaacccgtgtcggacgcgcggcagattcgggatattctgaagcgggattattacattgacgaagtgatcgaactgtacaacgagcaggcgaccaagcgggatatcatcaggacttttgacgatttgcagtcgaaactgggggtgcacgattccctgtttatttactacgcggggcacgggcaccttgacgaaaagtccaatgcggggttctggataccggttgacggcggggtcgaccaatacgcccaggacaactggctgcccaatagccagatacggggctttatctcgcgttttgaaacgatacacgtgtttttggtatccgacgcctgtttttcgggggacattctcaatactacccgcgccctgccgccgcagatcgacaacgcgtattaccgcaaggcttacgcgttaacgagccgccaggtgcttacctcgggttccagtgaaaccgttcccgaccagtcggaattttccgccgccctgataaattgcctgcgaaaaaacacctctcctctgcttgatccccttggcatctacaacgacgtgcggctttccgtaagtaaaaccacgcctttgtacggaaccttaaccgccgccagccatcaggaaggggcgacctttctcttcttcaggcggcaagccccgcctccgcctccgccccctcccgcgcgaaccacgtccacagcagtaggaagcattaccgtgacatccgacattgccggagttgtaatgatcgacggcgaggcgaccgggacaaggatcaaagcaggcggaaccgtaaccgtatccaacgtcagtaccggcgcgaccgaagtcgctgtaaaaggcgatgacggcaagatcgtcaaagcgccgcaaatggtaatggtaatgcaaggccagactgttgccgccacggttaaggccgccgccccgaatacgccggcgcccgcccctgcacccgcgccgcaacccgcgccggtagtacagcttgcggccccgccggaacgccccgttgtacccgaaatggtgcggatacaaggcggcactttccagatgggtagcaacaacgtcagtgaggaaaagcccgtgcatacggtaacggtgagtagtttttacatggggaaatatgaggtaacgcagaaagagtatcaggaaataatggggacgaatcccagcaattttaaaggggacaatctgcctgtggagaatgtaagctggtataatgcggtggagtactgcaacaagaggagccagaaggaagggctgaccccggcgtatncgatagataaaagccggaaggatccgaacaatagagacaaatatgacaacctaaaatggacggtgacatggaataagagcgccaacggctaccggctgcccaccgaggcggaatgggaatacgcctgcagagcggggacgacagcggcgtacaacgccggggcaaacataagcgacgataccggatggtacgacgcgaacagcggcggaaagactcgcccggcagggcaaaaaaccgccaacgactggggcctgtacgacatgcacgggaacgtggttgagtggtgctgggactggtacggagcttactccagcggggcgcagaccgatccggcgggccccagtgctggcgacaaccgggtgaagcgcggcgggtgttggctcgacaatgcctctagcgcgcgttcggtcggtcggagcagcttccacccgaatgacgggagctactacattggtttccggctggtgcgcccctga

SEQ ID NO: 60918 - protein, 630 aa, Unknown
  Obtained from environmental sample
  DOMAIN (34)...(255): Caspase domain
  misc_feature (1)..(630): Xaa is any amino acid
MIMLLVSARIHAQDRGLQVFAAENLGTQAAIGRQYALFIAIDAYRYWTPLKKPVSDARQIRDILKRDYYIDEVIELYNEQATKRDIIRTFDDLQSKLGVHDSLFIYYAGHGHLDEKSNAGFWIPVDGGVDQYAQDNWLPNSQIRGFISRFETIHVFLVSDACFSGDILNTTRALPPQIDNAYYRKAYALTSRQVLTSGSSETVPDQSEFSAALINCLRKNTSPLLDPLGIYNDVRLSVSKTTPLYGTLTAASHQEGATFLFFRRQAPPPPPPPPARTTSTAVGSITVTSDIAGVVMIDGEATGTRIKAGGTVTVSNVSTGATEVAVKGDDGKIVKAPQMVMVMQGQTVAATVKAAAPNTPAPAPAPAPQPAPVVQLAAPPERPVVPEMVRIQGGTFQMGSNNVSEEKPVHTVTVSSFYMGKYEVTQKEYQEIMGTNPSNFKGDNLPVENVSWYNAVEYCNKRSQKEGLTPAYXIDKSRKDPNNRDKYDNLKWTVTWNKSANGYRLPTEAEWEYACRAGTTAAYNAGANISDDTGWYDANSGGKTRPAGQKTANDWGLYDMHGNVVEWCWDWYGAYSSGAQTDPAGPSAGDNRVKRGGCWLDNASSARSVGRSSFHPNDGSYYIGFRLVRP

SEQ ID NO: 60919 - DNA, 1848 bp, Unknown
  Obtained from environmental sample
  misc_feature (1)..(1848): n is a, c, g, or t
ttggcagcgcttgaacatccccgcgcacgtccgggacatcctgagcagcaaccgaggcctgctcttccccgcaaaccgcgccgagctcctcaagcttgcaatgggcgggaccggcaacaaatcctacgacgtctgctacgacgtcccgggcaagggctcagtcgtagaggccaccgtcgtanagtgcaaaaacggcctatccgtcaattactccgagccatatatgcgccgccgcgaccccgattgcactgtggtgggcgactccaaaccctccgacaaggagcgttctccgaacgcttcggccgcgacttcgacaaggtacggtcggacaccttcgagtggctgaaagtgcaggaactgaccgccctcgccttcatgctgggcgagagcagccacggggcggtcatgatcgccccgcgcaacgccggcttctttgtcggcggtctcgccgaccttcaggggatgctcaacccattagaaataccggaaaactttcatatcgcctgcataatgtacgtggcgccgcccttccgccacacacacttcaacggcaagcaggtagtggtgcacaaccgcctcgaccaactccacgagatattctcctataatctatatcccggacccagcgccaaaaagggcgtgtacggggcgctcctcaccatcggcgagcaggagaagtggctcacgctccacgccgccaccgtgcaggtcgtcaccccctacgacaacatcacgaccatcatgcacgagggggccagcggcagcggcaagagcgagatgctcgaactcgtccaccgcgagtgggacgggcggcttctgttaggccgcaacactaagaccggctcgcggcgcataatctccatgaaccaaacatgctccctatatccggtcacagacgatatgtccatgtgcccgcacgaggtgcaagataaaagcggctacgtgcacgcctgcgacgccgaacaagcgtggttcgtccgcttgaaccacatcacccgctacggaaccgacccgcagttagagaacataaccgtccacgccaacgaaccgctgatattcctgaatatgcagggcgtccccgatgccaccgtgctcatctgggagcacatagaagactcaccgggcaaacgctgccccaacccgcgcgtgatcctgccacgccgcctcatgcccaactgcgtgaacggcgcggtggaagtgcacgtccgaaacttcggtttccgcacccccccgtgcactcgggagaagccctcatacggcatagcgggcttcctgcacgtgctgccccccgcgctcggatggatatggcgcctcatctccccgcgcggctacgacaaccccagcgtcaccgacgacgacgcgatgacgagcgagggcgtaggttcctactggcccttcgccaccgggctgcgggtagaccacgcgaaccttatcctgcggcaaatccaaaagacgccgcatgtgcgatacaccctgacccccaaccagcacgtcggcgcgtacgcggtcagtttcatgccgcagtggatagccagagagtacctcgcccgccgcggcacggccaagttccgccccgaacagctggtcccggccagatgccccctcctcggctacgccttcgccactatgcaggtcgaggggacgcacttgcagcatgacttcctgcgggtagacgaacagcccgacgtggggcaagacgggtacgacgccggagcgaagatacttaaggcgttcttcgacgcggaactgaagaaattcctcgtgccggaactgaacgaggtcgggcggaggattattgagtgctgtttggacaatgggacggttaaggactatgaggcgctgttgtag

SEQ ID NO: 60920 - protein, 615 aa, Unknown
  Obtained from environmental sample
  misc_feature (1)..(615): Xaa is any amino acid
MAALEHPRARPGHPEQQPRPALPRKPRRAPQACNGRDRQQILRRLLRRPGQGLSRRGHRRXVQKRPIRQLLRAIYAPPRPRLHCGGRLQTLRQGAFSERFGRDFDKVRSDTFEWLKVQELTALAFMLGESSHGAVMIAPRNAGFFVGGLADLQGMLNPLEIPENFHIACIMYVAPPFRHTHFNGKQVVVHNRLDQLHEIFSYNLYPGPSAKKGVYGALLTIGEQEKWLTLHAATVQVVTPYDNITTIMHEGASGSGKSEMLELVHREWDGRLLLGRNTKTGSRRIISMNQTCSLYPVTDDMSMCPHEVQDKSGYVHACDAEQAWFVRLNHITRYGTDPQLENITVHANEPLIFLNMQGVPDATVLIWEHIEDSPGKRCPNPRVILPRRLMPNCVNGAVEVHVRNFGFRTPPCTREKPSYGIAGFLHVLPPALGWIWRLISPRGYDNPSVTDDDAMTSEGVGSYWPFATGLRVDHANLILRQIQKTPHVRYTLTPNQHVGAYAVSFMPQWIAREYLARRGTAKFRPEQLVPARCPLLGYAFATMQVEGTHLQHDFLRVDEQPDVGQDGYDAGAKILKAFFDAELKKFLVPELNEVGRRIIECCLDNGTVKDYEALL

SEQ ID NO: 60921 - DNA, 690 bp, Unknown
  Obtained from environmental sample
  misc_feature (1)..(690): n is a, c, g, or t
gtggttcgtccgcttgaaccacatcacccgctacggaaccgacccgcagttagagaacataaccgtccacgccaacgaaccgctgatattcctgaatatgcagggcgtccccgatgccaccgtgctcatctgggagcacatagaagactcaccgggcaaacgctgccccaacccgcgcgtgatcctgccacgccgcctcatgcccaactgcgtgaacggcgcggtggaagtgcacgtccgaaacttcggtttccgcacccccccgtgcactcgggagaagccctcatacggcatagcgggcttcctgcacgtgctgccccccgcgctcggatggatatggcgcctcatctccccgcgcggctacgacaaccccagcgtcaccgacgacgacgcgatgacgagcgagggcgtaggttcctactggcccttcgccaccgggctgcgggtagaccacgcgaaccttatcctgcggcaaatccaaaagacgccgcatgtgcgatacaccctgacccccaaccagcacgtcggcgcgtacgcggtcagtttcatgccgcagtggatagccagagagtacctcgcccgccgcggcacggccaagttccgccccgaacagctggtcccggccagatgccccctcctcggctacgccttcgccactatgcaggtcgaggggacgcacttgcagcatga

SEQ ID NO: 60922 - protein, 229 aa, Unknown
  Obtained from environmental sample
  misc_feature (1)..(229): Xaa is any amino acid
MVRPLEPHHPLRNRPAVREHNRPRQRTADIPEYAGRPRCHRAHLGAHRRLTGQTLPQPARDPATPPHAQLRERRGGSARPKLRFPHPPVHSGEALIRHSGLPARAAPRARMDMAPHLPARLRQPQRHRRRRDDERGRRFLLALRHRAAGRPREPYPAANPKDAACAIHPDPQPARRRVRGQFHAAVDSQRVPRPPRHGQVPPRTAGPGQMPPPRLRLRHYAGRGDALAA

SEQ ID NO: 60923 - DNA, 372 bp, Unknown
  Obtained from environmental sample
  misc_feature (1)..(372): n is a, c, g, or t
atgggcactataaacctcacaaaggattggcagcgcttgaacatccccgcgcacgtccgggacatcctgagcagcaaccgaggcctgctcttccccgcaaaccgcgccgagctcctcaagcttgcaatgggcgggaccggcaacaaatcctacgacgtctgctacgacgtcccgggcaagggctcagtcgtagaggccaccgtcgtanagtgcaaaaacggcctatccgtcaattactccgagccatatatgcgccgccgcgaccccgattgcactgtggtgggcgactccaaaccctccgacaaggagcgttctccgaacgcttcggccgcgacttcgacaaggtacggtcggacaccttcgagtggctga

SEQ ID NO: 60924 - protein, 123 aa, Unknown
  Obtained from environmental sample
  misc_feature (1)..(123): Xaa is any amino acid
MGTINLTKDWQRLNIPAHVRDILSSNRGLLFPANRAELLKLAMGGTGNKSYDVCYDVPGKGSVVEATVVXCKNGLSVNYSEPYMRRRDPDCTVVGDSKPSDKERSPNASAATSTRYGRTPSSG

SEQ ID NO: 60925 - DNA, 591 bp, Unknown
  Obtained from environmental sample
  misc_feature (1)..(591): n is a, c, g, or t
atgctggtaattgactggtctcaatttttggaagaaggtctgccccctgttttaacagataacggcagaggacttgagcggttttcttccgtaacaataggcgtttttgacggagtacacctgggacatcaagcgctgataaaacgcgtggtttcgcataacacagattatgtgccggtcgtcgttactttcagagaaaatcacaaaataggagatgaagccgtcgatattctctcttttaaacagaaacttgcgatatttgaaaatctcggcgtaaaactcacgattgtaattgattttacagaatcattcaggcagatgaaaggaattgaatttttggaaattctggcaaaacgcgggaatgtcggtttttttgcggtaggaaaaaatttccgctgcggctgtcagcttgacacggatacagacgccatcagaaatttttttatttcgcgtaacattcaggttgagattacagacgaagtaacggatggttctatgccgataagctcaagccgtataagagcggctatcgcagacggcaacctgcagcttgcgcagtcaatgctgggccgcccgattgaccgagcttaa

SEQ ID NO: 60926 - protein, 196 aa, Unknown
  Obtained from environmental sample
  DOMAIN (27)...(172): FAD synthetase
  misc_feature (1)..(196): Xaa is any amino acid
MLVIDWSQFLEEGLPPVLTDNGRGLERFSSVTIGVFDGVHLGHQALIKRVVSHNTDYVPVVVTFRENHKIGDEAVDILSFKQKLAIFENLGVKLTIVIDFTESFRQMKGIEFLEILAKRGNVGFFAVGKNFRCGCQLDTDTDAIRNFFISRNIQVEITDEVTDGSMPISSSRIRAAIADGNLQLAQSMLGRPIDRA

SEQ ID NO: 60927 - DNA, 453 bp, Unknown
  Obtained from environmental sample
  misc_feature (1)..(453): n is a, c, g, or t
atgcaggtcgccgtaattgaatttgtgcgcaacatctgcgggctggaacgcgccaactcaagcgaatttgacgaaacttcgccgcaccgcgttatcgatcttatgccgggtcaggccggtatgctgggttcgggcggcactatgcgcttgggcgcgtacccctgtaaacttacgcaaggcacgctgttgcacaggctttataacacggaagaagtaggcgaacgccaccgccaccgttttgaattcaacaatgattaccgggaaattttgacgaataaaggacttgtcgtgtgcggcgcgtctccggacggcagccttgttgaagcggttgaactgtcagacaggcgtttttttgtcggggttcaatttcatcctgagtttaagagccgtccgaataaaccgcatcctctctttctggggcttgtaaacgcggcaaagagcagtacggtatga

SEQ ID NO: 60928 - protein, 150 aa, Unknown
  Obtained from environmental sample
  DOMAIN (1)...(144): Glutamine amidotransferase class-I
  misc_feature (1)..(150): Xaa is any amino acid
MQVAVIEFVRNICGLERANSSEFDETSPHRVIDLMPGQAGMLGSGGTMRLGAYPCKLTQGTLLHRLYNTEEVGERHRHRFEFNNDYREILTNKGLVVCGASPDGSLVEAVELSDRRFFVGVQFHPEFKSRPNKPHPLFLGLVNAAKSSTV

SEQ ID NO: 60929 - DNA, 1221 bp, Unknown
  Obtained from environmental sample
  misc_feature (1)..(1221): n is a, c, g, or t
ttgtttacgatattacatcaaagcccccggcaacggtggaatgggagtaggattatgacaaaatatgtttttgttacaggaggcgtcgtatcgggactgggcaaggggatcaccgccgcctcgttgggcaggctgctcaaacaacggggcttaaaggtcgcggcgcagaaactcgatccctatatgaacgttgatccgggaaccatgagcccgttccagcacggcgaggtttttgtcacggacgacggcgcggaaaccgatcttgacctgnggcattacgagcgttttattgatgaaaacctgacaaagctcagcaatctgacatccggccaggtgtaccggaatgtgcttgatcgcgagcgcgcgggcggctatctgggcagtaccgtacaggttattccccatgtcaccagtgaaataaaaagttttatttatgccggcgcggaaaaaagccgcgccgatgtcctgattaccgagatcggcggcacaacgggcgatattgaaagtcagccttttttggaagctatccggcagatctcccttgaaaaaggccgcgagaactgcttgtttatccatgtgacattgatcccatatttaaaagcatcgggcgaacacaaatcgaagcccacacagcactcggtcaaggaactacgcgccattggtatttcacctaacatcattatcgcgcgggctgacgagccaataagcgacggtattacagataaaatatcgcttttttgcaacgtgaagcccgattgcgtcatagagaatattaccattccattcctttatgaagcgccgcttttgctgcatcaaaacggcctggacaaggttgtctgccgcgaacttgggattgacgctcctgagcctgatttgaatgagtggagcgtcatggttaaaaaaatcggggagagaaaacgggaagtcaatatcgcgattgtcggaaaatatgttcagttacacgacgcgtatctttccattatagaaagcctgaaccacgcgggcattgaagccggaaccggggtaaacatccaatggattgacagcgaggacgtaacaaacgaaagcgcaagcctcttgttacgcgaaacagacggcatgatcattcccggcggcttcggtgaaagggggattgagggaaaaatcaccgcctgccgttacgcgagggaaaacgatataccctattgggaatctgtcttgaatgcaggtcgccgtaattga

SEQ ID NO: 60930 - protein, 406 aa, Unknown
  Obtained from environmental sample
  DOMAIN (20)...(295): CTP synthase N-terminus
  misc_feature (1)..(406): Xaa is any amino acid
MFTILHQSPRQRWNGSRIMTKYVFVTGGVVSGLGKGITAASLGRLLKQRGLKVAAQKLDPYMNVDPGTMSPFQHGEVFVTDDGAETDLDLXHYERFIDENLTKLSNLTSGQVYRNVLDRERAGGYLGSTVQVIPHVTSEIKSFIYAGAEKSRADVLITEIGGTTGDIESQPFLEAIRQISLEKGRENCLFIHVTLIPYLKASGEHKSKPTQHSVKELRAIGISPNIIIARADEPISDGITDKISLFCNVKPDCVIENITIPFLYEAPLLLHQNGLDKVVCRELGIDAPEPDLNEWSVMVKKIGERKREVNIAIVGKYVQLHDAYLSIIESLNHAGIEAGTGVNIQWIDSEDVTNESASLLLRETDGMIIPGGFGERGIEGKITACRYARENDIPYWESVLNAGRRN

SEQ ID NO: 60931 - DNA, 426 bp, Unknown
  Obtained from environmental sample
  misc_feature (1)..(426): n is a, c, g, or t
atggataaacaagcagttctcgcggcctttttcaagggagatctgccggatagcttccaaaaaaggctgactttcaatatcgcccgttgtgccgccgatctcggtaatcaggacatcggcgcggcttttttccgcgccggcataaataaaactttttatttcactggtgacatggggaataacctgtacggtactgcccagatagccgcccgcgcgctcgcgatcaagcacattccggtacacctggccggatgtcagattgctgagctttgtcaggttttcatcaataaaacgctcgtaatgccncaggtcaagatcggtttccgcgccgtcgtccgtgacaaaaacctcgccgtgctggaacgggctcatggttcccggatcaacgttcatatagggatcgagtttctgcgccgcgacctttaa

SEQ ID NO: 60932 - protein, 141 aa, Unknown
  Obtained from environmental sample
  misc_feature (1)..(141): Xaa is any amino acid
MDKQAVLAAFFKGDLPDSFQKRLTFNIARCAADLGNQDIGAAFFRAGINKTFYFTGDMGNNLYGTAQIAARALAIKHIPVHLAGCQIAELCQVFINKTLVMPQVKIGFRAVVRDKNLAVLERAHGSRINVHIGIEFLRRDL

SEQ ID NO: 60933 - DNA, 618 bp, Unknown
  Obtained from environmental sample
  misc_feature (1)..(618): n is a, c, g, or t
atgacagattggccgaggtccgctaagttaggcgacattccgtttctggcgcaggggacgatataccccgatgtcgtcgagtcgggcggcaagcacggcgcggtaatcaagagccatcacaacgtgggcgggcttccggaaaacctcaagtttacggggatcatagagccgttgtcgcggcttttcaaggatgaagtgcgcgagttaggcaaaaaacttaaactgcctgcctcacttgtaaaccgccagccctttcccgggccggggcttgccatccgcgtcatgggcgaagtgacggaagaaaagctggacattttacgccgagccgacgcaatactgcgcgaagaactggacgccctgaaacgaaggcccaatcaatacttctgcgtcatgacaaacacgcgttccgttggcgttaaaggggacgacaggacctatgattctgtaatagctgtcagggccgtaacgaccgacgattttatgacttgcgagtacgccccgttgccgcacaaattgttaagccggatatcctcacggatcacaagcgagataccgcaggccagccgggttgtttacgatattacatcaaagcccccggcaacggtggaatgggagtag

SEQ ID NO: 60934 - protein, 205 aa, Unknown
  Obtained from environmental sample
  DOMAIN (114)...(204): GMP synthase C terminal domain
  misc_feature (1)..(205): Xaa is any amino acid
MTDWPRSAKLGDIPFLAQGTIYPDVVESGGKHGAVIKSHHNVGGLPENLKFTGIIEPLSRLFKDEVRELGKKLKLPASLVNRQPFPGPGLAIRVMGEVTEEKLDILRRADAILREELDALKRRPNQYFCVMTNTRSVGVKGDDRTYDSVIAVRAVTTDDFMTCEYAPLPHKLLSRISSRITSEIPQASRVVYDITSKPPATVEWE

SEQ ID NO: 60935 - DNA, 903 bp, Unknown
  Obtained from environmental sample
  misc_feature (1)..(903): n is a, c, g, or t
ttgcatttgttttacgattccatatccgcaaaaaaagaatgcgaggattttctggatcgacattttgacatcataaacctttccaaaattcctacacgaaaaataaaatcaattaccgacgaaccgttgatctggcgttactttgttacgcctttgcccacaagactcgcctcaagccagctcgacgagcgggaattcacggccaaatgcgtgttccgcatcaacacaaggatcgaaggcgcttatgtgttttccagcggaaagaacatgggcgtattcaaggcagtcggcttccccgaagatgtcgggcggttttacaagctcgaagaatacgaggggtggtgctttactgcccacgggcgctatccgacaaacacgccgggctggtggggcggcgctcacccgttctcgcttctcgattatacggtggtacacaacggcgaaatatcctcttacgataccaaccggcgctcaattgaaatgtacggctataagtgcacgcttcagaccgacaccgaagtcattacctacataattgattatctgcacagaaaacaccagcttgccttcaaagaaatcgcttcggtcatcgcggctccgttctggcagactatcgaaggtatgaaaccaaacgatatggagacccatgagtacctgcgcatcatgttcagcgggcaactgataaccggcccgttttcaattcttgtgggctttgacggcggactgatggcgttaaacgacaggcttaagctgcgaagcatggtagtcggcgaaaaagatgaactggtttatatggcaagcgaggaagcggctatccgtatcatcgaaccgaaccttgataacgtgtgggctcccaaaggcggcgagcctgtgattgtcaacttaaacaggggtgtggcgtaa

SEQ ID NO: 60936 - protein, 300 aa, Unknown
  Obtained from environmental sample
  DOMAIN (44)...(269): Glutamine amidotransferases class-II
  misc_feature (1)..(300): Xaa is any amino acid
MHLFYDSISAKKECEDFLDRHFDIINLSKIPTRKIKSITDEPLIWRYFVTPLPTRLASSQLDEREFTAKCVFRINTRIEGAYVFSSGKNMGVFKAVGFPEDVGRFYKLEEYEGWCFTAHGRYPTNTPGWWGGAHPFSLLDYTVVHNGEISSYDTNRRSIEMYGYKCTLQTDTEVITYIIDYLHRKHQLAFKEIASVIAAPFWQTIEGMKPNDMETHEYLRIMFSGQLITGPFSILVGFDGGLMALNDRLKLRSMVVGEKDELVYMASEEAAIRIIEPNLDNVWAPKGGEPVIVNLNRGVA

SEQ ID NO: 60937 - DNA, 861 bp, Unknown
  Obtained from environmental sample
  misc_feature (1)..(861): n is a, c, g, or t
gtgggctcccaaaggcggcgagcctgtgattgtcaacttaaacaggggtgtggcgtaatggcattaaacttgttatatcccgaatacgaagtggtcaggaattacgacagatgcatcgtctgccgcgcctgtgaacgccagtgcgccaacgaagcgcacgaatatatcgccgacctgggcaaaatgctgtgcgatgacgcgaaatgcgtgaactgccaccgctgtgtttcgctctgccccacccgcgccctcaaggttgtgcaaagcggcaacacctacaagcagaatatgaactggaacggcaaaaccatcaatgaggtttacaagcaggccgactcgggcggcgtgctgctgtcaagcatgggtaatcctgaaaattacccggtgtactttgacaagatactcctgaacgcctcgcaggttaccaatccgtccatagaccccttgcgagagccgatggaaacaaggatatccctcggcgcgaagcccagaaacatagaacgggacggaagcggccggattatcaacaacctgccgccgcaactgcacctgtcgatgccggtgatgttctcggcgatgagctacggttccataagctacaacgcgcacgaaagcctggcgcgcgccgccgaggagcttggcatcctgtacaacaccggcgaaggcggcctgcatgaggatttttacaaatacggcaaaaacacgattgtgcaggtcgcgtcggggcgtttcggcgttcatccccagtatttgaactcgggcgcggcggttgagatcaagatgggccagggcgcgaaacccggtatcggggggcatctgcggggggcgaaaatagtcggtgacatttcccgcacagaatga

SEQ ID NO: 60938 - protein, 286 aa, Unknown
  Obtained from environmental sample
  DOMAIN (31)...(54): 4Fe-4S binding domain
  misc_feature (1)..(286): Xaa is any amino acid
MGSQRRRACDCQLKQGCGVMALNLLYPEYEVVRNYDRCIVCRACERQCANEAHEYIADLGKMLCDDAKCVNCHRCVSLCPTRALKVVQSGNTYKQNMNWNGKTINEVYKQADSGGVLLSSMGNPENYPVYFDKILLNASQVTNPSIDPLREPMETRISLGAKPRNIERDGSGRIINNLPPQLHLSMPVMFSAMSYGSISYNAHESLARAAEELGILYNTGEGGLHEDFYKYGKNTIVQVASGRFGVHPQYLNSGAAVEIKMGQGAKPGIGGHLRGAKIVGDISRTE

SEQ ID NO: 60939 - DNA, 705 bp, Unknown
  Obtained from environmental sample
  misc_feature (1)..(705): n is a, c, g, or t
atgatccccgaaggcagcgatgcgatttctcccgcgccccaccacgacatttattcgattgaagatttgcggcagttggtcttctctctgaaagaggcgaccaattatcaaaagccggtcattgtcaaaattgccgccgtccataatgttacggcgattgcaagcggcattgccagaagcggcgccgacattattgccatcgatggctttcgcggcggaacgggagccgcgccgacgcgcatacgcgaccatgtcggcattcccatagaacttgcccttgccggtgttgacaaacgcctgcgcgacgaaggaattcgcgacagcgtgtccatcgttgtcggcggcagcatccgttccagcgccgatattgtaaaagcgctcgctctgggcgcggactgcgtgtacatagccacgtcggcgctgattgcgctcggttgtcatctgtgcagaagctgccacggcggcaaatgcaactggggcatcgcgactcaggttcccgaactggtcaagcggcttaaccccgaccttggacacaaacgccttatcaatctgctgaccgcctggcagcatgaaattaaagaaatgatgggcggcatgggcattaattcgattgacggcctgaaaggaaaccgactgatgctgcgcggcgtgggcctcaacgaaaaagaacttgagatattaggcattaaacacgcgggagagtaa

SEQ ID NO: 60940 - protein, 234 aa, Unknown
  Obtained from environmental sample
  DOMAIN (1)...(202): Conserved region in glutamate synthase
  misc_feature (1)..(234): Xaa is any amino acid
MIPEGSDAISPAPHHDIYSIEDLRQLVFSLKEATNYQKPVIVKIAAVHNVTAIASGIARSGADIIAIDGFRGGTGAAPTRIRDHVGIPIELALAGVDKRLRDEGIRDSVSIVVGGSIRSSADIVKALALGADCVYIATSALIALGCHLCRSCHGGKCNWGIATQVPELVKRLNPDLGHKRLINLLTAWQHEIKEMMGGMGINSIDGLKGNRLMLRGVGLNEKELEILGIKHAGE

SEQ ID NO: 60941 - DNA, 423 bp, Unknown
  Obtained from environmental sample
  misc_feature (1)..(423): n is a, c, g, or t
ttggacgctgtgatggagaataacgccgacctctttgttgagacgataaaccgcctcttggcaagcatcccctatgacgactataccaaggcggcgcaaccaacgataagacgatcgggagtccccgcgagagagtggctataccgctcgacaatattggcgttcctgcacggttgcggcgtactcgcgttcagcgaaccgcacacaagcaagggacgctccgacttgctgttgtgccacaagggctccgcttgggtgatagagataaaagtcgcgtataacgacgactgcaaagcaaaagccgccgaggcccttaaacagataaacgacaatcaatacgccgacccgtacaaaaacgccaggaagcttgggatcgctatagacgataaaacgcggcgggttggggagtgggttgaggggtag

SEQ ID NO: 60942 - protein, 140 aa, Unknown
  Obtained from environmental sample
  misc_feature (1)..(140): Xaa is any amino acid
MDAVMENNADLFVETINRLLASIPYDDYTKAAQPTIRRSGVPAREWLYRSTILAFLHGCGVLAFSEPHTSKGRSDLLLCHKGSAWVIEIKVAYNDDCKAKAAEALKQINDNQYADPYKNARKLGIAIDDKTRRVGEWVEG

SEQ ID NO: 60943 - DNA, 1182 bp, Unknown
  Obtained from environmental sample
  misc_feature (1)..(1182): n is a, c, g, or t
atgagcaagataccgcgaaacatgaaagaaaacttcgattggctgaaaaacgaccgctatccgcgcgagtcgtatatgccgctagccgtgcctgcttggggctggtacaacaccctgttcgaccagatctgggacggcaacgggtcgctcaactacggtatcagatgggagaccgccaagtccataacgtttgaagaacgcaagcagatcgcgtctatgcttaacgaggcggtcaacgcgtggatgcgcccgattataggcatggagggctggccctttcaggaaatctccgtgaaggtttcgggatgggcggtcagcgacggcgccaagattctcgacaagcagccaaacgaggtagtatgggtaaacaatacttatgacgatccgggcccggcatccgccgaccatccccgcaacctcatagcgagcgcgcccaaggcgatgaccagagtaaataacctgacctcaataaagagcaacatgaactatcaatacggcggcgacccttacgcccgtgtcgatctgtatctgtggtgcacggagtatgacttcggcgcggcgggacacggcagctggtggggacagcgcctgccttcgaccgacatcatatccgcggccaaaagcggcggagccggttcgggcgtcctgctgcacgaaatagggcacgggttcggactgtatgacttctacggcgcggtaggcgttgacaaaccgccagcaacttccgacggcggcgttttcggaaaaggagacttgatgggcgtcatgtggaacggtaccggctccaaaaccctcaacgagtacgacacgtggcagatccgctactactgggactgggtcagaaccggcaccccccgcaacgcgaacagattcaggcctctgccgaaagacgacgacggggcgacgcctatcgcaagccgcgcaccgatcgtcgccaagaatggatcaacggcgttcaagtttgataatcgcgggacgctgagatataacttaggcggcgagcaaacggccagtttaaaaatnttcgacagccgcggaagattggtgcgaaccatgcaactgcgcgggacgcaaacaacggtaaacacaaacctgaatgtcgctacccaagcgctgatttggagagtggaaacgacgggcagggttatgggtcaaggtaaaatgcagtttgtgtcgagataa

SEQ ID NO: 60944 - protein, 393 aa, Unknown
  Obtained from environmental sample
  misc_feature (1)..(393): Xaa is any amino acid
MSKIPRNMKENFDWLKNDRYPRESYMPLAVPAWGWYNTLFDQIWDGNGSLNYGIRWETAKSITFEERKQIASMLNEAVNAWMRPIIGMEGWPFQEISVKVSGWAVSDGAKILDKQPNEVVWVNNTYDDPGPASADHPRNLIASAPKAMTRVNNLTSIKSNMNYQYGGDPYARVDLYLWCTEYDFGAAGHGSWWGQRLPSTDIISAAKSGGAGSGVLLHEIGHGFGLYDFYGAVGVDKPPATSDGGVFGKGDLMGVMWNGTGSKTLNEYDTWQIRYYWDWVRTGTPRNANRFRPLPKDDDGATPIASRAPIVAKNGSTAFKFDNRGTLRYNLGGEQTASLKXFDSRGRLVRTMQLRGTQTTVNTNLNVATQALIWRVETTGRVMGQGKMQFVSR

SEQ ID NO: 60945 - DNA, 429 bp, Unknown
  Obtained from environmental sample
  misc_feature (1)..(429): n is a, c, g, or t
gtgccgtggccctctcctcaggtggatggctcttgtaagattgcgggtgataaaaacatggtaaaagctgaatccgaaatggggagagtttatcttgattgggctgcctcttccccttatttaagtagtgacaattcggttccgtttggaaatccttcgtcccatcaccgcgaaggacgctatgcgaagcaagctcttgaagacgctagaaaacgatgcgcatccgttttgaacgtgcctcctgaaactctgtactttacgtcgggtggaaccgaatccaacggaatcgcgcttttttccaatttgacgcgtccgggaaaaagaagggtaatttcatcccttacggaacatgcttccgtcagagagggaatgaaaactttggacaaaatgggaaaatcaatcggtggtattaccgttgattccacatga

SEQ ID NO: 60946 - protein, 142 aa, Unknown
  Obtained from environmental sample
  misc_feature (1)..(142): Xaa is any amino acid
MPWPSPQVDGSCKIAGDKNMVKAESEMGRVYLDWAASSPYLSSDNSVPFGNPSSHHREGRYAKQALEDARKRCASVLNVPPETLYFTSGGTESNGIALFSNLTRPGKRRVISSLTEHASVREGMKTLDKMGKSIGGITVDST

SEQ ID NO: 60947 - DNA, 1086 bp, Unknown
  Obtained from environmental sample
  misc_feature (1)..(1086): n is a, c, g, or t
atgattattttctgccacaatttagttcaaaatgacagcgaactgataaaagcggataatttgtttgatgaattgcgggagattgccggctttgccgaaacaaggcgcatccaaaaccgcttaaaatcaggaaagcataaagttgttgaaaaagggcttatccagtttgactgccaggacggcatggccgataccgagcatttcaggcttaccgaaaccgcaaaagaagaattccttgcggatattaatttttctgaaaaagccaaacgcagcggaaaaaatattattcctgttgataaaattaccgaaaaaaacctttattacagcgataaaataaaaaatcgcataaacgagcttacggaactgcttggcgagaataatttttccggtattcaaaaacggcttacggaaaaaggaatgagaaccggttttgcctgtattttctcaggtcctcccggaaccggaaaaacggaaaccgcgtaccaaatagcgaaaaaaacaggcagggacataatgcttgtaaacatcgcggatacaaaaagcatgtggttcggtgaaagcgagaagcgcattaaatccctgtttgaccgctaccgcggcattgtaaaaagcggcggcctcgcgccaattttgttctttaatgaagcggacgccgttttgggaaaacgcagggaattgtcgcaaacgcgccaaggccccgatcagacagagaacgccattcagaacattattcttcaggaaattgaaaatctgaacggcatccttatagccacaacgaatatggctgttaaccttgacaaggctttcgagcgccgttttctttataaaattgaatttgaaaaacccaatacggactctaaaattcagatgtggcggaattttattcctgaacttgatgaaaacgaggcttcaaagcttgcggttaaatatgatttttctggcgggcagatagagaatatagcgcgtaaaaataccgtttcctatatcttaaagggaataaactcaaatttgtcaattctggaaaatttctgcatagaagaattgctggaaaaatccgccgttagaatagggttttgcagtgaataa

SEQ ID NO: 60948 - protein, 361 aa, Unknown
  Obtained from environmental sample
  DOMAIN (141)...(301): ATPase family associated with various cellular activities (AAA)
  misc_feature (1)..(361): Xaa is any amino acid
MIIFCHNLVQNDSELIKADNLFDELREIAGFAETRRIQNRLKSGKHKVVEKGLIQFDCQDGMADTEHFRLTETAKEEFLADINFSEKAKRSGKNIIPVDKITEKNLYYSDKIKNRINELTELLGENNFSGIQKRLTEKGMRTGFACIFSGPPGTGKTETAYQIAKKTGRDIMLVNIADTKSMWFGESEKRIKSLFDRYRGIVKSGGLAPILFFNEADAVLGKRRELSQTRQGPDQTENAIQNIILQEIENLNGILIATTNMAVNLDKAFERRFLYKIEFEKPNTDSKIQMWRNFIPELDENEASKLAVKYDFSGGQIENIARKNTVSYILKGINSNLSILENFCIEELLEKSAVRIGFCSE

SEQ ID NO: 60949 - DNA, 390 bp, Unknown
  Obtained from environmental sample
  misc_feature (1)..(390): n is a, c, g, or t
atgcaacaacccaccggtccattgtctgttttttgcgtaaagtatttgaacgcgatagctcttggcgatgacggcgcaaaaagtttgggcataaatgttaaacaaaagcgattgctttcgcttttggcagcagcggtgttagctgcaaccgccacttcgttttgcggaccgataggttttataggaatggcaactccgcatttggcgaggggatttttcaatagcgataatcagaggattttaattcccgcttcgcttttgacaggtgctttgcttgcgcttgcggcagggcttttgtcgcaggggttgtggggaattccgccgctgccgttaaatgcggtggcgagtttgatgggcgcaccggtggtgatttgggtgttggtgaggtga

SEQ ID NO: 60950 - protein, 129 aa, Unknown
  Obtained from environmental sample
  DOMAIN (1)...(129): FecCD transport family
  misc_feature (1)..(129): Xaa is any amino acid
MQQPTGPLSVFCVKYLNAIALGDDGAKSLGINVKQKRLLSLLAAAVLAATATSFCGPIGFIGMATPHLARGFFNSDNQRILIPASLLTGALLALAAGLLSQGLWGIPPLPLNAVASLMGAPVVIWVLVR

SEQ ID NO: 60951 - DNA, 1263 bp, Unknown
  Obtained from environmental sample
  misc_feature (1)..(1263): n is a, c, g, or t
ttgcttaggagccatatgaaaaaatgtacatttatgttggttggcaacgcaaatgagcttattctttccaagagatttcgcgaggatcacaagttctccccgaatagttttacgaggcaccgtcgcatgggtttcgtagacgtcatgggcctttgcctgaattttctcaggaagtcattgcagatagaaatcggccaatacatggagctgaccgatccagaaatagagaggccgattaccaagcaggcgttttccaaagccaggcataatatatcacctgatgccttcagggagctttttgaaatgacttgcagcacggtgtttggcattgatgctttcgacagatacaagggctatcgggttttcgcaatagacagcacgaatttgcgtcttccgccgagcaaggatattctgggcgtattcaagcgctgcaaaaaaaccaatccatgcccccatgcccgcgcaagcatactttgcgaggttgtgtcgggattcaccgcccatgcggccgtaggaaccattgaggtaggcgagcgagatttggcaatggagcatctcaattatcttgcgactttcaagcgaagcaaagatttaatcatttttgaccgcggctatccgtccaaggcattgctcaagcatttgagcgacaacggcttcaaatatctcatgcgcacccagaaaggcttcaatcccgaaattgacaacgcggacaagcgagatttttccttggaaatacatggttgcaaagtgagagctgtgaaattggcattgccaagcggcgaaacggaaactctcgtcacaaatcttggccggcaagaattcaaaacatccgaattcaaagagctttaccgccttcgctgggcggtggagacaaaatacaattctctcaagagcaagctggatatggaaaatttcagcggcaaaacgcttgtctctgttttgcaagatttttatgccacgttgtttctttcaaacatagcgaccacaatcaaatccgaagccaatgaaatcatacgcaaggaaaataatggaaaaacattgaagcatgaatatgtcgccaacgaaaatattttgattggaaagctcaaagacaagctgattttgcttatgctaaatgatgacgctgaaaaaagaagtgttctcttaaacaaactgatatcgcaaatgccttgctatcgtgtatccatagttaaaggcaggcaattcaagcgaaggctagatcctgtaagaagaaatcgaggaaaaccaaaaagtgctttataa

SEQ ID NO: 60952 - protein, 420 aa, Unknown
  Obtained from environmental sample
  DOMAIN (121)...(326): Transposase DDE domain
  misc_feature (1)..(420): Xaa is any amino acid
MLRSHMKKCTFMLVGNANELILSKRFREDHKFSPNSFTRHRRMGFVDVMGLCLNFLRKSLQIEIGQYMELTDPEIERPITKQAFSKARHNISPDAFRELFEMTCSTVFGIDAFDRYKGYRVFAIDSTNLRLPPSKDILGVFKRCKKTNPCPHARASILCEVVSGFTAHAAVGTIEVGERDLAMEHLNYLATFKRSKDLIIFDRGYPSKALLKHLSDNGFKYLMRTQKGFNPEIDNADKRDFSLEIHGCKVRAVKLALPSGETETLVTNLGRQEFKTSEFKELYRLRWAVETKYNSLKSKLDMENFSGKTLVSVLQDFYATLFLSNIATTIKSEANEIIRKENNGKTLKHEYVANENILIGKLKDKLILLMLNDDAEKRSVLLNKLISQMPCYRVSIVKGRQFKRRLDPVRRNRGKPKSAL

SEQ ID NO: 60953 - DNA, 312 bp, Unknown
  Obtained from environmental sample
  misc_feature (1)..(312): n is a, c, g, or t
atgggaaagaaaggcacggaacggcgtgtttacacgaaggaattcaaagccgaggcggcagcattggccgggaaaaaagaaaaaccgataagccggatcgcggctgatctgggaatcaacgagaacatgctgcgccgatgggtgcaggcttctcgggaatcggcgggaagcggcctgcaagcgttcccaggccatgggcggccaaaggatgcggagcttgccccctcgaggaaagagaacaaagcgctcagggaagccaatgaaatcctaaaaaaagcggcggtcatcttcgcgcaagcagacccccagtga

SEQ ID NO: 60954 - protein, 103 aa, Unknown
  Obtained from environmental sample
  DOMAIN (8)...(90): Transposase
  misc_feature (1)..(103): Xaa is any amino acid
MGKKGTERRVYTKEFKAEAAALAGKKEKPISRIAADLGINENMLRRWVQASRESAGSGLQAFPGHGRPKDAELAPSRKENKALREANEILKKAAVIFAQADPQ

SEQ ID NO: 60955 - DNA, 879 bp, Unknown
  Obtained from environmental sample
  misc_feature (1)..(879): n is a, c, g, or t
gtgacggcttatcggttcatgaaagcgaatcggaaccgatacgccgttaaggagatggccatgctttttggggtaagccgcagcgcctattacaaatgggccaggaacgggacctcgcagcggcggaaggcaggcgatgcggagcttgtacgccttattcttgaaatagcgacaaagcatcgccgccggtatggcagcccacgagtacgccgggaacttcgcgatgtctacggaaaacggcttagccttaagaaagtagcccgcctgatgcgggaaaacggccttaatgccagaaaaagcaggaagcatatcccgacaaccgactccaaccatgcccttgcagtctttgaaaacatactgtcaaggaagttttatgcccaatccggcggctctaagcaggtttccgacattacatacctgcctacgacaaatggctgggtatatcttaccatagtgcttgacctgtttgaccgtaaagtcattggctgggcgcttagccccggcatggaggcttcccagaccgccgttgccgcttttgaaatggcagccaaaaacaggagccctcaaagcggcatgatattccattcggacaggggcgtccagtattgcgcccaatccttccgcgacgttttgcgggaaagatgtcccgatgcccgccagagcatgagcaggaagggcaattgctgggacaacgcttgcgccgaatcgtttttcaaaacgcttaagggggagctggaaacattggacggcaggcattcggaggctgaagtaaggcagtcggtgtttttctacatcgaggcgtattacaaccgcattcgcatgcattcggcgcttgactatgttgcgcctaatgagtttagcttaggcaaccacgcttaa

SEQ ID NO: 60956 - protein, 292 aa, Unknown
  Obtained from environmental sample
  DOMAIN (125)...(288): Integrase core domain
  misc_feature (1)..(292): Xaa is any amino acid
MTAYRFMKANRNRYAVKEMAMLFGVSRSAYYKWARNGTSQRRKAGDAELVRLILEIATKHRRRYGSPRVRRELRDVYGKRLSLKKVARLMRENGLNARKSRKHIPTTDSNHALAVFENILSRKFYAQSGGSKQVSDITYLPTTNGWVYLTIVLDLFDRKVIGWALSPGMEASQTAVAAFEMAAKNRSPQSGMIFHSDRGVQYCAQSFRDVLRERCPDARQSMSRKGNCWDNACAESFFKTLKGELETLDGRHSEAEVRQSVFFYIEAYYNRIRMHSALDYVAPNEFSLGNHA

SEQ ID NO: 60957 - DNA, 471 bp, Unknown
  Obtained from environmental sample
  misc_feature (1)..(471): n is a, c, g, or t
atggacacctattattcgctgatcaggcctccgaaactctacatacgcccggatttcaccgagattcacggcctcaccgtggacgatgtaaaagacgcccccacattcgcgaatttatgggaaagcgccataaagccctttatcggcgaccttccccttgccgcccacaacgccccattcgacatgggcgtactctgggcggttcttgaatggtacgagctggacatcccggcactgccgtatttctgcactttaagcctggcccggcgtacctggccggaacttgaatctcatgctctagccaatttagcggaacacttcggcatagtctacgatgcccataacgccctcgctgatgcccagacttgcgggcaacttgtgcatatggcggctgataaattccgctgtacgaacgcgagcattgatcgcttgctcaccaccgctggggtggagatgagcgtactccagtaa

SEQ ID NO: 60958 - protein, 156 aa, Unknown
  Obtained from environmental sample
  DOMAIN (2)...(127): Exonuclease
  misc_feature (1)..(156): Xaa is any amino acid
MDTYYSLIRPPKLYIRPDFTEIHGLTVDDVKDAPTFANLWESAIKPFIGDLPLAAHNAPFDMGVLWAVLEWYELDIPALPYFCTLSLARRTWPELESHALANLAEHFGIVYDAHNALADAQTCGQLVHMAADKFRCTNASIDRLLTTAGVEMSVLQ

SEQ ID NO: 60959 - DNA, 369 bp, Unknown
  Obtained from environmental sample
  misc_feature (1)..(369): n is a, c, g, or t
ttgaatgtcgctttggtaataactgtttctgaaacaagatttaacaagtcgtcaatgcgctttgaatctacgcggagaattgatcccgcttctttaccggctttctttgcgtcttccgaagaagctgcgccggcttttggagccgctttagccgcaggagccgctgcagcaggcgcagccgccttagccgcaggagccgctgcaggcgcagccggagcggcggcgggagcaggtgcgggagccgctgcaggagcgggcgcaggcgcggcagaaacagcggaaatattagaaacatccgcgtctaaacttacgtcaggcaggatacaggctttttttaattttcccgtatcttccttagaagcgacataa

SEQ ID NO: 60960 - protein, 122 aa, Unknown
  Obtained from environmental sample
  misc_feature (1)..(122): Xaa is any amino acid
MNVALVITVSETRFNKSSMRFESTRRIDPASLPAFFASSEEAAPAFGAALAAGAAAAGAAALAAGAAAGAAGAAAGAGAGAAAGAGAGAAETAEILETSASKLTSGRIQAFFNFPVSSLEAT

SEQ ID NO: 60961 - DNA, 915 bp, Unknown
  Obtained from environmental sample
  misc_feature (1)..(915): n is a, c, g, or t
ttggcaaattacttgctaagaagttcacataattcaggaatttttagctttacatggatagcccgatcaatctgtatgatactcgccacaattgccccgtttgtcgattatgcgggtcacagaaataccgctctccttttagttataatcggggtgtttctatntcatcttttccgcggtgtcggaatgattggaaataatcctgttttaagtctattggcaagcggtccggatcgcggtagttacatgacgcaggttcagatcatcaatagcgctattggaatgttcgggagttttctgatagcgatggtgcttggcatggaaccgcctatttttgtgttttctattttattgattataggagtaatcacgggagtagtaagcgggtatgttatcagaaaagttcctgaacctccaattcaacaagaaacaggcgacggattaaaatcatcgtttaaaacaggaaaacaaaaaacgaagcttgctgatatttttaaggacgctttttccaatgatcatctgcggttttttttaattattttcttccttgtcattcttgtatcaggcgtttcaagaacgtttgttattgtttacgcgcgcgaagttttcggacacaatgacggcttaatttccctctacacagtctttggcgggcttggctatcttatgatcggtttaattgttaaatttttggtagatcgaatcggcgcgaagccgcttttccttgtttgtgtgattttaggacttataagtttaattcccgtcatttttattccgctaacggcgattgataacgtagcgggttccatactttttctggtgtttttattttttatgctgaacttcggctttcttggttccgaagggatcgcgcagacttatttttttggattagtcccgtctaaaaaacgctag

SEQ ID NO: 60962 - protein, 304 aa, Unknown
  Obtained from environmental sample
  misc_feature (1)..(304): Xaa is any amino acid
MANYLLRSSHNSGIFSFTWIARSICMILATIAPFVDYAGHRNTALLLVIIGVFLXHLFRGVGMIGNNPVLSLLASGPDRGSYMTQVQIINSAIGMFGSFLIAMVLGMEPPIFVFSILLIIGVITGVVSGYVIRKVPEPPIQQETGDGLKSSFKTGKQKTKLADIFKDAFSNDHLRFFLIIFFLVILVSGVSRTFVIVYAREVFGHNDGLISLYTVFGGLGYLMIGLIVKFLVDRIGAKPLFLVCVILGLISLIPVIFIPLTAIDNVAGSILFLVFLFFMLNFGFLGSEGIAQTYFFGLVPSKKR

SEQ ID NO: 60963 - DNA, 357 bp, Unknown
  Obtained from environmental sample
  misc_feature (1)..(357): n is a, c, g, or t
ttgcttcttttatcatatttattctataccgtaaattttaaaaaattacaagatataaatatagtaaaatctttacatttgtttccgcttacttgtattttgctttttagattgttaaagtttaaatatatgacgacgcagttatccccctaccgcttgagcaaggcgcgagacgtatacaattttttcaatgttttaaacgccgtttcgtggaatctgctggtgggaattattattactttatttgccctcagacttgacgcttcctcaacatatattgggcttatgagcgccgctttttacatcgcgttgtttctgcttccgcttggcaaattacttgctaagaagttcacataa

SEQ ID NO: 60964 - protein, 118 aa, Unknown
  Obtained from environmental sample
  misc_feature (1)..(118): Xaa is any amino acid
MLLLSYLFYTVNFKKLQDINIVKSLHLFPLTCILLFRLLKFKYMTTQLSPYRLSKARDVYNFFNVLNAVSWNLLVGIIITLFALRLDASSTYIGLMSAAFYIALFLLPLGKLLAKKFT

SEQ ID NO: 60965 - DNA, 1017 bp, Unknown
  Obtained from environmental sample
  misc_feature (1)..(1017): n is a, c, g, or t
atgataaaagaagcaattataatggccgctaagagggaggatctctcttatgaatgtgctgaaatggttatgaatgaaattatggaagggaaggccagcgaaatacagatggcggcttaccttgcggcaatgtccgtgaaaggcgagactattgatgaaattaccgcgtcagccgcgggaatgcgcaagcattgcgtcaggattttgcatgacatggacgtactggaaattgtcggcactggtggggatcattccaattcattcaatatatccaccacttccgcgcttgtaatttcagcagctgggtttcctgtcgcaaaacacggcaaccgcgccgctacaagcaaaacgggggcggcggatgttcttgaagccctcggggtcgatataacaattccgcccgaacaaagtttaaatcttttaaaaacgattaatctttgttttctctatgcgcagaattatcatatttcaatgaaatatgtcggtccggtaagacgtgagcttggcattcgcacaatttttaatatactcggtcctttggtaaatccggcgggcgctaacatggaattgttaggcgtgtatgaacttgatcttgtcgaaccaatggctaaagttttatgcaatcttggagtaaaaagaggaatggttgtttacggacaggacggattagacgaaatttctatgggcgctcccactactgtctgcgaagtacgcgacgggtttattaaaaactatgaagttgaacctgaacaattcggatttcaacgctgtaataaagaagagttgttgggcggaacgcccgaggaaaacgcaaaaataacaagaagtattcttgcgggcgaaaaaagtcccagacggaacgcagtgcttctcaattccgctgcggcaattcacattgcaaaacccgaaataagcataaaagacgccgttgccattgctgcggaaacaatcgactccggaaaagcaaacgaacagcttaaacttttcatctccatgtcgcagaagaaaaacccatag

SEQ ID NO: 60966 - protein, 338 aa, Unknown
  Obtained from environmental sample
  DOMAIN (1)...(66): Glycosyl transferase family, helical bundle domain
  misc_feature (1)..(338): Xaa is any amino acid
MIKEAIIMAAKREDLSYECAEMVMNEIMEGKASEIQMAAYLAAMSVKGETIDEITASAAGMRKHCVRILHDMDVLEIVGTGGDHSNSFNISTTSALVISAAGFPVAKHGNRAATSKTGAADVLEALGVDITIPPEQSLNLLKTINLCFLYAQNYHISMKYVGPVRRELGIRTIFNILGPLVNPAGANMELLGVYELDLVEPMAKVLCNLGVKRGMVVYGQDGLDEISMGAPTTVCEVRDGFIKNYEVEPEQFGFQRCNKEELLGGTPEENAKITRSILAGEKSPRRNAVLLNSAAAIHIAKPEISIKDAVAIAAETIDSGKANEQLKLFISMSQKKNP

SEQ ID NO: 60967 - DNA, 915 bp, Unknown
  Obtained from environmental sample
  misc_feature (1)..(915): n is a, c, g, or t
ttgccattgctgcggaaacaatcgactccggaaaagcaaacgaacagcttaaacttttcatctccatgtcgcagaagaaaaacccataggagtatatccctattgaaaaactcgcctgctattttaggtaaaatcgcatcaagcacgctgattcgtgtagaaaatgcaaaacaaaatctctctattgaacaggcgcaagagcaggcgattaagttagcctcggcggaacacgtcgataaaaaacatctgccctttgagaacgcgcttgccgcccccgggctttcatttatctgcgaggttaaaaaggcttccccatcaaaaggggttatcgcggaggattttccctatacagacatcgcacgggaatatgaagaggcaggtgctgccgctatttccgttttaaccgaaccggatttttttttaggaagtaaatcatatttacgtgaaatttccgccgccataaaaatcccgacgcttagaaaagattttattattgatcaataccaaatttacgaagcaaaattatggggggcaaaagcaatactgttaatctgtgcgctgttggaacaacaaacattagcggaatttattgcagtcgcaagagagttggctttggattgccttgtagaaatccacagcgaagaagaggcaaaggaagctcttgcagcgggagtgaaaatcatcggcattaacaatcgtgatcttaccacttttaatgttgatactggactgacatcacgtttaaaaaagcaactctcttcgggaatactgactgtcgcggagagcgggataaaaacggcggatgatatccgcgagttgagaaaaacaggcgtggacgctgttttaataggggaaagtttgataagagcgacggataggaaagcttttttaaaagagttgagaaatggcgcataa

SEQ ID NO: 60968 - protein, 304 aa, Unknown
  Obtained from environmental sample
  DOMAIN (41)...(300): Indole-3-glycerol phosphate synthase
  misc_feature (1)..(304): Xaa is any amino acid
MPLLRKQSTPEKQTNSLNFSSPCRRRKTHRSISLLKNSPAILGKIASSTLIRVENAKQNLSIEQAQEQAIKLASAEHVDKKHLPFENALAAPGLSFICEVKKASPSKGVIAEDFPYTDIAREYEEAGAAAISVLTEPDFFLGSKSYLREISAAIKIPTLRKDFIIDQYQIYEAKLWGAKAILLICALLEQQTLAEFIAVARELALDCLVEIHSEEEAKEALAAGVKIIGINNRDLTTFNVDTGLTSRLKKQLSSGILTVAESGIKTADDIRELRKTGVDAVLIGESLIRATDRKAFLKELRNGA

SEQ ID NO: 60969 - DNA, 384 bp, Unknown
  Obtained from environmental sample
  misc_feature (1)..(384): n is a, c, g, or t
atggaaaaagttttcaagcttaaagaacatggaaccacgttccagcgggagatttttgcgggtctcacaaccttcttgactatggcttacatcctggcggttaatccgggaatgttgggcttgattggcaatggcatgacaccgggatctatttttacggcaaccgcgatagcttcggcgattgctactctggtgatggcctttgccgcaaacctgccggtggccctggcgccaggtatggggcttaatgccttttttacatacacagtagtcatggggatgggttattcgtggcaggaagcccttacagcggtttttctggaaggtattctgtttgtcgtcctttcgtgtttaacgtacgggaagcgactcggccgattctga

SEQ ID NO: 60970 - protein, 127 aa, Unknown
  Obtained from environmental sample
  misc_feature (1)..(127): Xaa is any amino acid
MEKVFKLKEHGTTFQREIFAGLTTFLTMAYILAVNPGMLGLIGNGMTPGSIFTATAIASAIATLVMAFAANLPVALAPGMGLNAFFTYTVVMGMGYSWQEALTAVFLEGILFVVLSCLTYGKRLGRF

SEQ ID NO: 60971 - DNA, 366 bp, Unknown
  Obtained from environmental sample
  misc_feature (1)..(366): n is a, c, g, or t
ttgggcaacgggacaaaaatccgcattgccatcgcgcaccagatggggaatatcgccgccgtgctggacaaaatccgggccgcccgtgatgcgggaaaggaaacgccctaccacttcgtggaagtcatggcttgccgcggcgggtgcatcggcggcgggggccagccctacggctgtaccgacgcggtccgcaaggatcgaatgtccggcctttacaccgatgatgaaaaatcacagtaccgttgctcccatcaaaatccgtacatcaaccaggtgtacaaggaatttcttggcgagcccaacggcccaaaagcgcataagctgctccacacaaaatatgtggaacggcctttgtatataaagtaa

SEQ ID NO: 60972 - protein, 121 aa, Unknown
  Obtained from environmental sample
  DOMAIN (58)...(117): Iron hydrogenase small subunit
  misc_feature (1)..(121): Xaa is any amino acid
MGNGTKIRIAIAHQMGNIAAVLDKIRAARDAGKETPYHFVEVMACRGGCIGGGGQPYGCTDAVRKDRMSGLYTDDEKSQYRCSHQNPYINQVYKEFLGEPNGPKAHKLLHTKYVERPLYIK

SEQ ID NO: 60973 - DNA, 1773 bp, Unknown
  Obtained from environmental sample
  misc_feature (1)..(1773): n is a, c, g, or t
atgataaacttgaaaataaacggcgttccgatccaggtcgaggaaggaaccacgattctcgaagctgccaagaaggcgaatattatcattccttcgctttgctacaatcccgatcttccggcgtgggcttcctgcggcatctgcgtaatccgcgtggccggcagccccaagctgatccgcgcctgcacgactccggttgacgggagtctggaaggcaaggatattataacccatgacggcgagattatcgccacgcggcgcgtcgtgctggaaatgatcctttccaaccatcccaacgactgcctgcaatgcccgcgcaacaatatctgcgaactgcagacccttgccgcggaatttggcatacgccaatcgccctacaaaaaaattacggaagggctccccgttgatgattccaatccagcgattatccttaaccccgaaaaatgcatacgctgtggcaggtgcgtcaaggtctgccaggacgtgcagaatgtctgggcgcttgaattcctgggaagaggcattaagggaaagatcgccagcgccgccgacgttccgttaggcgacggcccgtgcatcaagtgcggtcagtgttccgcccactgcccggtcggcgcgatctacgagcgcgatgacacggcgaaagtctggaacgccctgcacgatcagaacctccatacggtagtgcagatcgccccggctgtccgcgtcgccatcgcggaagaattcgggcttgatccgggcacgattgtaaccaagaagatctacgccgcgctcaggcgcctcggctttaaaaccgtgtttgacacgaacttttccgccgaccttacgatcatggaagagggctccgaactgaaaaaacgccttgttacaaaaggtagctccatcccgctgataacatcctgctgcccggcctgggttgattatatggaaaaatattacccggacatgatcgataacttctcgacggcgaaatcgccgcagcagatgatgggcgcgatgataaaggcgtattgggcgaagaaggcgggcattgcccccgaaaaagtgtactcggtttctgtaatgccctgtaccgcgaaaaaatgggaaacccaccgcaacgatgatatgaagagcgccgggaaattcctcggcgtggacgctggctatgacgtggatatctcgattacttccagagagctcgctcgtatgataaaacaggccggtattgacgtcttaagtctttccgatgaggaagcggacagcccactggggccgtataccggcgcgggcaccatctttggcgctacaggcggcgttatggaggcggcggttcgcagcgcctacttccttgtcaacaacaaggaacttccggacgtgaatttcaaaaacgcgcggggctgnaangggttaaggaagcggaagttgatttgggcaacgggacaaaaatccgcattgccatcgcgcaccagatggggaatatcgccgccgtgctggacaaaatccgggccgcccgtgatgcgggaaaggaaacgccctaccacttcgtggaagtcatggcttgccgcggcgggtgcatcggcggcgggggccagccctacggctgtaccgacgcggtccgcaaggatcgaatgtccggcctttacaccgatgatgaaaaatcacagtaccgttgctcccatcaaaatccgtacatcaaccaggtgtacaaggaatttcttggcgagcccaacggcccaaaagcgcataagctgctccacacaaaatatgtggaacggcctttgtatataa

SEQ ID NO: 60974 - protein, 590 aa, Unknown
  Obtained from environmental sample
  DOMAIN (142)...(165): 4Fe-4S binding domain
  misc_feature (1)..(590): Xaa is any amino acid
MINLKINGVPIQVEEGTTILEAAKKANIIIPSLCYNPDLPAWASCGICVIRVAGSPKLIRACTTPVDGSLEGKDIITHDGEIIATRRVVLEMILSNHPNDCLQCPRNNICELQTLAAEFGIRQSPYKKITEGLPVDDSNPAIILNPEKCIRCGRCVKVCQDVQNVWALEFLGRGIKGKIASAADVPLGDGPCIKCGQCSAHCPVGAIYERDDTAKVWNALHDQNLHTVVQIAPAVRVAIAEEFGLDPGTIVTKKIYAALRRLGFKTVFDTNFSADLTIMEEGSELKKRLVTKGSSIPLITSCCPAWVDYMEKYYPDMIDNFSTAKSPQQMMGAMIKAYWAKKAGIAPEKVYSVSVMPCTAKKWETHRNDDMKSAGKFLGVDAGYDVDISITSRELARMIKQAGIDVLSLSDEEADSPLGPYTGAGTIFGATGGVMEAAVRSAYFLVNNKELPDVNFKNARGXXGLRKRKLIWATGQKSALPSRTRWGISPPCWTKSGPPVMRERKRPTTSWKSWLAAAGASAAGASPTAVPTRSARIECPAFTPMMKNHSTVAPIKIRTSTRCTRNFLASPTAQKRISCSTQNMWNGLCI

SEQ ID NO: 60975 - DNA, 1041 bp, Unknown
  Obtained from environmental sample
  misc_feature (1)..(1041): n is a, c, g, or t
ttgggaaaagatatcctcggatcaggttttgattttgacattgaaatccgcctgggcgcgggggcctttgtttgcggcgaggaaaccgcgctgattaaatcagtcgagggcaaccggggaatgccggtgcccaagcccccattcccggcgaataaaggactgtggggaaagcccactattatcaacaacgtggaaaccttcgcgaacgtcccggtgattaccgccaagggcggggcctggctcgcgaaacttggaaccgaaaaatccaagggaacaaaagttttcgcccttaccggaaaggtaaagaactccggccttgtggaagtgccgatgggaaccaccctgcgtgagatcatctttgaaatcggcgggggcatcaagaacggaaagaaattcaagggcgtgcagacgggcgggccttcaggcggcatccttaccgagaagtcccttgatttgcccattgactttgacacgcttacagctaacggctccatgatgggttccggcggcatgatcgtcatggacgaggacgactgcgtcgttgacgtcgcgcgtttctatatggacttctgcgttgacgaaagctgcggcaaatgttctccctgccgcatcggcacaacccagatactcaaactgctggaaaaaatcaccaacggcaacggcgaagatgaagacctcgacaaacttgaagagatcggcgtcgccatgaccaaggcaagcctctgtatgcttggcggcagcgcggcgaacccgaccctttccacgttgaggaatttccgcgacgagtaccttgagcatatccatgacaagaaatgccgcgccggcaagtgcaagaaactgctgcgcttcagcattgacgcggaaaaatgcattggctgcgggatgtgcgcgaagaaatgtcccgcaaactgcatcaaggcgctggatccggcgaaatatccgaacaagaaaaagcctccttacgctatcgatcagggcgcctgtattaaatgcggcgaatgtctgaaaaattgcaaatttaacgcggtttcgcggggctaa

SEQ ID NO: 60976 - protein, 346 aa, Unknown
  Obtained from environmental sample
  DOMAIN (321)...(344): 4Fe-4S binding domain
  misc_feature (1)..(346): Xaa is any amino acid
MGKDILGSGFDFDIEIRLGAGAFVCGEETALIKSVEGNRGMPVPKPPFPANKGLWGKPTIINNVETFANVPVITAKGGAWLAKLGTEKSKGTKVFALTGKVKNSGLVEVPMGTTLREIIFEIGGGIKNGKKFKGVQTGGPSGGILTEKSLDLPIDFDTLTANGSMMGSGGMIVMDEDDCVVDVARFYMDFCVDESCGKCSPCRIGTTQILKLLEKITNGNGEDEDLDKLEEIGVAMTKASLCMLGGSAANPTLSTLRNFRDEYLEHIHDKKCRAGKCKKLLRFSIDAEKCIGCGMCAKKCPANCIKALDPAKYPNKKKPPYAIDQGACIKCGECLKNCKFNAVSRG

SEQ ID NO: 60977 - DNA, 708 bp, Unknown
  Obtained from environmental sample
  misc_feature (1)..(708): n is a, c, g, or t
ttggatgaaatgatctaccgttggataccgagagagaaaagatcaattaacaatgaacaattagcaatgagcaatgaaggacaaaataattcgtcagataaagatactgcctcattattttctattcctggcgttgatattcaagaaggtatcgccatgaccggtggaacagttgacgcttatatgcaggtgttgaccatgttttgcaaagacgcgaaaaacaggctaccgttactgcaagaaataccggatgaggacggtttgccagtgttcattacgcaggttcacggcctaaaaagcgcgtcggcaagtcttggggtggaaaaaatttccgcgcaagccgcattgcttgaagccgcgggctatgcggcagacatggattttatccgcgaacatcttggcgcttttacacaacagcttggggaactggtgcgcaatattgagaaagccctggaacaaaaggagccaaaaaatcaaaagcctcttgccccttcagtcattattagccattctttattatttcaagaattatacgaagccttacagtcccaaaaaatcatcgaaattaaacgtatattgaaaacattagataaacaggcgcaagattcaaaactcaaagaaattctcgagcaaatttcagattatgtatttatgacggaattcgaaagcgcagtaaaaatagttaaagaattaatctccgaagaataa

SEQ ID NO: 60978 - protein, 235 aa, Unknown
  Obtained from environmental sample
  DOMAIN (63)...(146): Hpt domain
  misc_feature (1)..(235): Xaa is any amino acid
MDEMIYRWIPREKRSINNEQLAMSNEGQNNSSDKDTASLFSIPGVDIQEGIAMTGGTVDAYMQVLTMFCKDAKNRLPLLQEIPDEDGLPVFITQVHGLKSASASLGVEKISAQAALLEAAGYAADMDFIREHLGAFTQQLGELVRNIEKALEQKEPKNQKPLAPSVIISHSLLFQELYEALQSQKIIEIKRILKTLDKQAQDSKLKEILEQISDYVFMTEFESAVKIVKELISEE

SEQ ID NO: 60979 - DNA, 1452 bp, Unknown
  Obtained from environmental sample
  misc_feature (1)..(1452): n is a, c, g, or t
atgagccacgaaatccgcaccccaatgaacgccattacaggcatggcggaactgctgctgaggggagaactctcatgtgaagcgcggggttatgcgcaggatatcaaacaggcggggaataacctcgtttcgttaattaacgatattcttgatctttcaaaaatcgaagcgggaaaactggaaattgtccccgtcaaatatatgctttcatcccttatcaatgatacggtcaatataatccgcacgcggtttaaggaaaagccgatacggttttttaccaacattgacgggaatattcccaacagccttatcggtgatgaagtacggatgcgccagattctccttaacctcctgtccaacgcggtaaaatacacggaaaaggggcatgttggtttgaccattaccgcggacaaactcgacgataaacaggttttgctcaggatggatgtggcggataccggaaaaggaataaaaccggagcatcaggcgaacctctttgacgagtttgtccgggtagatataaagaaaaatcagggcattgaaggaaccgggctggggcttcccattaccagacggctctgtgcggccatggacgggaaattaatcatggaaagcgaatacggcaaaggcagcgtattcacggtaattgtcccgcagggcgttgaatcaaaagagcctttcgccgcggtggatgagcctgaacgaaagaaggttcttgtctatgaaagacggaccgtctacgccagggcagtaagctggtcattggaaaatatgggcatcccccatactgtggtgacaaatcaggacgactttaccgcggccctttaccaagcagaatggttctatgtattttcaagctacggtctttatgaaaagatcgcgccccttatgcaaaaaaatgatacggctttccggggaaggaaaaaaccttcccttgccctcatggtagaatggggaaccgaggcctacatacccggcgtgcgctttgtgtccataccggtacaatccctgtcgattgccaatgtgctaaacgacagggcggatgacaaaggttatatcaaaacttcaggtgtaatccgcttcactttccccagcgcgcggattctcgtggtggatgacatttcaactaacctcaaagtagtcgagggcctccttgccccctaccaggcggcggtagacacctgcctgaacggtttgcaggccatagaactggtaaaacaagccgctttccggaagcgcgaatacgatattgtattcatggatcacatgatgccggaaatggacggggttgaaacaacagcggtcatccgcctatgggaaaaagaacagcagaaaaaatcaggaattaggaaaaaacaaattcccattattgcgctgacagccaacgccgttgcggggatgcgtgaaatgtttatcgaaaacggcttcaatgatttattgccaaaacaatag

SEQ ID NO: 60980 - protein, 483 aa, Unknown
  Obtained from environmental sample
  DOMAIN (366)...(483): Response regulator receiver domain
  misc_feature (1)..(483): Xaa is any amino acid
MSHEIRTPMNAITGMAELLLRGELSCEARGYAQDIKQAGNNLVSLINDILDLSKIEAGKLEIVPVKYMLSSLINDTVNIIRTRFKEKPIRFFTNIDGNIPNSLIGDEVRMRQILLNLLSNAVKYTEKGHVGLTITADKLDDKQVLLRMDVADTGKGIKPEHQANLFDEFVRVDIKKNQGIEGTGLGLPITRRLCAAMDGKLIMESEYGKGSVFTVIVPQGVESKEPFAAVDEPERKKVLVYERRTVYARAVSWSLENMGIPHTVVTNQDDFTAALYQAEWFYVFSSYGLYEKIAPLMQKNDTAFRGRKKPSLALMVEWGTEAYIPGVRFVSIPVQSLSIANVLNDRADDKGYIKTSGVIRFTFPSARILVVDDISTNLKVVEGLLAPYQAAVDTCLNGLQAIELVKQAAFRKREYDIVFMDHMMPEMDGVETTAVIRLWEKEQQKKSGIRKKQIPIIALTANAVAGMREMFIENGFNDLLPKQ

SEQ ID NO: 60981 - DNA, 717 bp, Unknown
  Obtained from environmental sample
  misc_feature (1)..(717): n is a, c, g, or t
atgccgacaggcggcgggctatatttgcccccgaaaccccgcagcctattatcgcggcgtcaaattccatcattttattatatagtaattttttgtattagactatattatgatattatggcggaacgaaagaggctgttcatggagaaaaaagccggcagaaaagaccggatagaatccatcaaatgggcggcgcagaataattatgacacgctggtttttcctttggccgaatgtttcaaagggcttcaccgcgaatacatcaaactgataaaacgttacgagcttaacattgaggcgggcgggcgcgagctgtctttatttgttccgagaaaattgtttttattccaccgcgagcttttccgtatggagcagggcaggcggaaaaaaaagcatcatttttgcccgaccaatcataagacaacggccgttatcgcggaaaacgcgcaaaaaatatttgaaagttccatgcagtttgtaacccagcggcgcgtttttcacctgtggccggatgaagggcacgaaaatacatggtgcgcgtgccccgcctgccgcgctttcactccggcggaacaatatattatcgcggtaaataccgttgcggacgtgcttgcgaaactcgatcccaacgcgcggctttcgtatcttgattacggggaggagcaggggaagacggggattttgccgagaaagaatatgtttaaggttaagagatag

SEQ ID NO: 60982 - protein, 238 aa, Unknown
  Obtained from environmental sample
  misc_feature (1)..(238): Xaa is any amino acid
MPTGGGLYLPPKPRSLLSRRQIPSFYYIVIFCIRLYYDIMAERKRLFMEKKAGRKDRIESIKWAAQNNYDTLVFPLAECFKGLHREYIKLIKRYELNIEAGGRELSLFVPRKLFLFHRELFRMEQGRRKKKHHFCPTNHKTTAVIAENAQKIFESSMQFVTQRRVFHLWPDEGHENTWCACPACRAFTPAEQYIIAVNTVADVLAKLDPNARLSYLDYGEEQGKTGILPRKNMFKVKR

SEQ ID NO: 60983 - DNA, 441 bp, Unknown
  Obtained from environmental sample
  misc_feature (1)..(441): n is a, c, g, or t
atgatggaatttgacgccgcgataataggctgcggggtttcgggggcaaatatagcccgccgcctgtcggcatataacataaaaacagttattttggaaaaagccgcggacgtgtcatttgggacttccaaggccaattccggcattatccacggcggttttcatcacaataaaaaatacctgaaagcccgtcttgaaatgcagggcagcctgatgttcgaccagttaaggcgcgagttaaatttccccttccgcangtgcgggataatagtcgccgcccttcacgaagaggagatgaaggtagtcgaacatctgtatttgcagggggttgagaacggcgttatcggcatagagctttgttcccgccacaggattcttgagcttgagcccaactttccgcggacgccgtcggcggcctttacgcgcccggaggcggcataa

SEQ ID NO: 60984 - protein, 146 aa, Unknown
  Obtained from environmental sample
  DOMAIN (5)...(146): FAD dependent oxidoreductase
  misc_feature (1)..(146): Xaa is any amino acid
MMEFDAAIIGCGVSGANIARRLSAYNIKTVILEKAADVSFGTSKANSGIIHGGFHHNKKYLKARLEMQGSLMFDQLRRELNFPFRXCGIIVAALHEEEMKVVEHLYLQGVENGVIGIELCSRHRILELEPNFPRTPSAAFTRPEAA

SEQ ID NO: 60985 - DNA, 834 bp, Unknown
  Obtained from environmental sample
  misc_feature (1)..(834): n is a, c, g, or t
gtgataaactccgccggcctctttgccgacgaagtttcaaaaaaattcggcgcggaagaatttacgatcagcgcgagaaagggcgagtattttcttttggacaggctgacaaaagcctgcccgtcaaaggtggtctttcccgttcccactaacgtttcaaaaggaatgttggtaatccccactgttgagggaaccgtgcttgtcggccccaccgccgacgcgatcgaagacaaggatgatttttccaccacctcccagcaccttgagcgtatactcgtttcgggaaagaccatgataccgtccttaagccagaacgatgttataacttcttttgcggggcttcgcccgtatttaggggaagatttttatattgaggcttcggcgaaagtaccggcctttgttcaggtagcgggaatccaaagcccgggacttaccgcttcccctgccataggcgaatatgttaaaaatattttacttgaaatcggtcttgtactgacggaaaaaccgcattgggatccttatgttgaagaccgcccttgcgcacgtgaacttaacttcagccaactggacagtttgatcgcgaaagattccaaatggggcaacattgtctgccgctgtgaaaatgtcagcgaggcggaaatagtccaggctgtaaaactcggtcacacaactttagacggagtaaaatactttacgcgcgcgcagatgggacgctgtcagggcggcttttgcacatacaagatcatcaaaattattatgagggaaaccggcctttcatgggacgagataacaaagcacggcggaaagagccgcgtgttggaggccgcgctgtga

SEQ ID NO: 60986 - protein, 277 aa, Unknown
  Obtained from environmental sample
  DOMAIN (201)...(256): BFD-like [2Fe-2S] binding domain
  misc_feature (1)..(277): Xaa is any amino acid
MINSAGLFADEVSKKFGAEEFTISARKGEYFLLDRLTKACPSKVVFPVPTNVSKGMLVIPTVEGTVLVGPTADAIEDKDDFSTTSQHLERILVSGKTMIPSLSQNDVITSFAGLRPYLGEDFYIEASAKVPAFVQVAGIQSPGLTASPAIGEYVKNILLEIGLVLTEKPHWDPYVEDRPCARELNFSQLDSLIAKDSKWGNIVCRCENVSEAEIVQAVKLGHTTLDGVKYFTRAQMGRCQGGFCTYKIIKIIMRETGLSWDEITKHGGKSRVLEAAL

SEQ ID NO: 60987 - DNA, 669 bp, Unknown
  Obtained from environmental sample
  misc_feature (1)..(669): n is a, c, g, or t
ttgcacatacaagatcatcaaaattattatgagggaaaccggcctttcatgggacgagataacaaagcacggcggaaagagccgcgtgttggaggccgcgctgtgaaagaactgcaatacgacgcggtcgtaatcggcggtggagccgcgggaatggcggcggctcttgaacttgaagcgcaaggcttttcctgcgccattatcgagagggaagatcaccttggcggaatactcatgcagtgcattcacaacggtttcggccttcacgaattttccgaagaactgaccggtcccgaattcgcggaacgctttattgagcgcgtaacaaagtcaaagatagcggtctatcttgacaccaccgttacgcgtttttcttccgcaggcaataactgggtcaaggaactgtactgcntctctccctcaggggcaatgaggattcaaagccgcgccgtttggctcccgatggggtgcgggaacgcaacaggggcaatgtgcccatacccgggacancccccagaggaaataaaaccgctgntctcaaaaaangagagtggagccgggaggggctatntttccgggcaagggaatgagagggagtcgagacgccggagaaaaagggtgcaaagaaatggggcgagnacagaaaacggggcaagaaggagaaaataa

SEQ ID NO: 60988 - protein, 222 aa, Unknown
  Obtained from environmental sample
  misc_feature (1)..(222): Xaa is any amino acid
MHIQDHQNYYEGNRPFMGRDNKARRKEPRVGGRAVKELQYDAVVIGGGAAGMAAALELEAQGFSCAIIEREDHLGGILMQCIHNGFGLHEFSEELTGPEFAERFIERVTKSKIAVYLDTTVTRFSSAGNNWVKELYCXSPSGAMRIQSRAVWLPMGCGNATGAMCPYPGXPPEEIKPLXSKXESGAGRGYXSGQGNERESRRRRKRVQRNGAXTENGARRRK

SEQ ID NO: 60989 - DNA, 375 bp, Unknown
  Obtained from environmental sample
  misc_feature (1)..(375): n is a, c, g, or t
atgaaattgttatcatggaattgtaaagtaggttttactgggcaaaaagcagaatatataagaaaatatgatgctgatttatatattattcaagaatgtaccgaaaaagattttttaaatataaacaaacattttaagaattattcatttttttgtgataatattgatagtaaatatggcgttggattgttttccggcaaatatgaatttcaaatattacctgaacataatgtaaattttagatatattgtaccttataaaataattagtaatgattatgaatttaacttgttttcagtatggacaaaagataaagatgaaaataataaaaaaacaggagtatacagaacagacatggaaagcaataaattataa

SEQ ID NO: 60990 - protein, 124 aa, Unknown
  Obtained from environmental sample
  misc_feature (1)..(124): Xaa is any amino acid
MKLLSWNCKVGFTGQKAEYIRKYDADLYIIQECTEKDFLNINKHFKNYSFFCDNIDSKYGVGLFSGKYEFQILPEHNVNFRYIVPYKIISNDYEFNLFSVWTKDKDENNKKTGVYRTDMESNKL

SEQ ID NO: 60991 - DNA, 429 bp, Unknown
  Obtained from environmental sample
  misc_feature (1)..(429): n is a, c, g, or t
atgatgcctgctttatttaatttcgaggtgcataccccttacgggctttttttctccgataaagccgaagccatcatacttaccccgatggacggcgaaatcggagtatacgcccatcacgccgcttttaccgctcctgtcgttacgtgcaaacttcaaataaagaccgaaagcggcgaatggcgcaccgccttcatcgccgacggcattcttgaagtgaaagaccacaaaaacgtgcttatggtagacacagccgaatggcccgaagaaattgacaaagagcgcgcacttgcggacaagaaacaggccgaggaagatttggagaacgcgcatttgaagtttgaagtagatcgcgtgaaagcgagattgcggcgggcggattatcggttgatggtgtgggggatgaggaaagagggggaggggaattaa

SEQ ID NO: 60992 - protein, 142 aa, Unknown
  Obtained from environmental sample
  DOMAIN (5)...(87): ATP synthase, Delta/Epsilon chain, beta-sandwich domain
  misc_feature (1)..(142): Xaa is any amino acid
MMPALFNFEVHTPYGLFFSDKAEAIILTPMDGEIGVYAHHAAFTAPVVTCKLQIKTESGEWRTAFIADGILEVKDHKNVLMVDTAEWPEEIDKERALADKKQAEEDLENAHLKFEVDRVKARLRRADYRLMVWGMRKEGEGN

SEQ ID NO: 60993 - DNA, 1398 bp, Unknown
  Obtained from environmental sample
  misc_feature (1)..(1398): n is a, c, g, or t
atggcgaataaaggatgtataacacaaataatcggcccggttgttgatgttcgatttgagcagggacagattccgtctattctgagcgcgctgaaagtaaaaacggaaagcagaaccgttactctggaagttctgcagcatacaggcgataaccatgtgcgatgcgtggcaatgtccgccaccgaaggtttatcacgcggccttgaagccgaagataccggacagcctatcagcgtgcctgtgggaatagaagttcttgggcggatgtttagcgtaacaggcgatccgattgataacaagggttctttcagcgcagcgcagtacgattcaattcaccgtcccgctcctgattttgaagaacaacgcgccgcagtgcagatgctggagacgggaatcaaagtaatagatttaattgcaccttacgctaaaggcggaaaaatcggacttttcggaggggcgggcgttggaaaaaccgttgttattatggaattgatccgtaatattgcgactgaacattcgggctactccgtgtttgccggcgttggcgagcgttcgcgtgaaggagccgatctctggaaggagatgagcgagagcggcgttattgaaaaaaccgcgcttgtgttcggtcaaatgaacgaacctcccggagcgcgcatgagggttgcgctggcgggtcttactatggcggaacatttccgcgataaagacagacaggacgttctcctttttattgataatattttccgctttattcaggcgggcgcggaagtttccgccttgcttggacgtattccaagcgcggtcggttatcagccgacattggcaaacgagatgggcagtcttcaggaaaggatcaccagcacatcaaaaggatcgattacaagtattcaagcggtgtatgttcccgcagacgatttaacggaccccgctcccgcgaccacctttgcccaccttgacgcgacaaccactctttcccgcaaaatcgttgagctgggaatttatccttctgttgatccacttgcttccagttcccgtattcttgacgcaacgatagtcggagaagaacactacaatacagcccgccgcgttcaacaaattcttcagcgttacaaggaattgcaggacattatcgcaattctcggcatggatgagctttccgtcgaggacaaactgatcgtcgcaagagcacgtaaaatacagcgctttttcagccaacccttctttgtaggtgaaaaattcaccggtattcctggacgttatgtgccagtaaaggaaactgtcaaaggctttaagatgatccttgacggcgagtgcgactccattgcagaacaggatttctacatggcgggcagcatagacgatgttctgaaagggcgaaatgatgcctgctttatttaa

SEQ ID NO: 60994 - protein, 465 aa, Unknown
  Obtained from environmental sample
  DOMAIN (7)...(74): ATP synthase alpha/beta family, beta-barrel domain
  misc_feature (1)..(465): Xaa is any amino acid
MANKGCITQIIGPVVDVRFEQGQIPSILSALKVKTESRTVTLEVLQHTGDNHVRCVAMSATEGLSRGLEAEDTGQPISVPVGIEVLGRMFSVTGDPIDNKGSFSAAQYDSIHRPAPDFEEQRAAVQMLETGIKVIDLIAPYAKGGKIGLFGGAGVGKTVVIMELIRNIATEHSGYSVFAGVGERSREGADLWKEMSESGVIEKTALVFGQMNEPPGARMRVALAGLTMAEHFRDKDRQDVLLFIDNIFRFIQAGAEVSALLGRIPSAVGYQPTLANEMGSLQERITSTSKGSITSIQAVYVPADDLTDPAPATTFAHLDATTTLSRKIVELGIYPSVDPLASSSRILDATIVGEEHYNTARRVQQILQRYKELQDIIAILGMDELSVEDKLIVARARKIQRFFSQPFFVGEKFTGIPGRYVPVKETVKGFKMILDGECDSIAEQDFYMAGSIDDVLKGRNDACFI

SEQ ID NO: 60995 - DNA, 300 bp, Unknown
  Obtained from environmental sample
  misc_feature (1)..(300): n is a, c, g, or t
ttggctgaaaaagcgctgtattttacgtgctcttgcgacgatcagtttgtcctcgacggaaagctcatccatgccgagaattgcgataatgtcctgcaattccttgtaacgctgaagaatttgttgaacgcggcgggctgtattgtagtgttcttctccgactatcgttgcgtcaagaatacgggaactggaagcaagtggatcaacagaaggataaattcccagctcaacgattttgcgggaaagagtggttgtcgcgtcaaggtgggcaaaggtggtcgcgggagcggggtccgttaa

SEQ ID NO: 60996 - protein, 99 aa, Unknown
  Obtained from environmental sample
  misc_feature (1)..(99): Xaa is any amino acid
MAEKALYFTCSCDDQFVLDGKLIHAENCDNVLQFLVTLKNLLNAAGCIVVFFSDYRCVKNTGTGSKWINRRINSQLNDFAGKSGCRVKVGKGGRGSGVR

SEQ ID NO: 60997 - DNA, 1587 bp, Unknown
  Obtained from environmental sample
  misc_feature (1)..(1587): n is a, c, g, or t
atggctaagaatccggttaatgacgaattaatacctatatggattgccgactacgttctggcaggttacggcaccggcgcgattatggcggttcccgcccacgacgatagggactacgagttcgcggcgaagttcaacatccccataaagcaagtcgtcgctcccgttgacaaaagcgaaataccgcagggcgtcgcctttaccgcaaagggggtaagcgtcaactccggctttatcaccggattacctacaaacgaggccaagcgcaaaatgaacgcgtggctcgaggaacaccgccgcggtaaggccgccgtaagttataagctacgtgattggatcttttcccgtcaacgctattggggcgagccgatacctattgttcactgtccggtttgcggcgcggtacccgttccggaggacgcgttgccggttatgctccctgaagttgacaagtacgaaccgtccggcacaggcgagtcgccgctcgctaatatcgacgagtggatcaacactaaatgtccgaaatgcggcgccgacgcgaaacgcgaaacgaacacaatgccgcagtgggccggctcatgttggtactacctgcgttatattgacccaaagaacaaaaccgaaccgtggagcaaagaggccgaaaaacagtggatgaacgtagacctctacgtaggcggcgccgaacacgccgttctccaccttttatacgctcgcttttggcacaaagtgctgtatgacttgggctatgtatcgacgaaagaaccgtttaaaaaactgcgccaccagggtatagtcttggccgcgacgtaccgcgacgccgccggcaagtatcacgaattttccgaggtcgatttcgcggaaggcggcgcccgcctcaaatccaccggcgagaagttgacggccgaaatagagaagatggcaaagtctaaactcaacggcgtaaaccccgacgaggtagcggcgaaatacggcgccgacgtcctgcgcctctacgagatgttcatgggcgagtttgaactgcccaaaccgtgggacccaagggcgattgagggttgtagccgcttcctccgcagactgtataaacttgtggaagagtttgtcgaaaagggcggagtaggggacgatgtcaacgcccgcgtccgccacaagacaatcaaaaaggtaacgagcgaccttgaggccatgaagttcaacaccgcaatcgcggcgatgatggaatttgtcaacgctctcggctcaaacggcgcgtccaaagaggatttaatcgcgtttgtcaagctggtaagcccctacgccccgcatctcggcgacgaactgtgggagaaactcggcggggaaggcttcttagtcaacgcggaatggccgaagtgggacgaggcgatgacgctggacagcgtggtcgccgtagtggtgcaggtcaacgggaagctgcgaggggagttccaagcggcgcacgacgccggcgaggaagaactcaaagcggcggctatggcggtggataaggtcaaaccgtttgttgacggaaagacagtgagaaaggtcgtcgtcgttcaggggaggctggttaatattgtcgtcggatag

SEQ ID NO: 60998 - protein, 528 aa, Unknown
  Obtained from environmental sample
  DOMAIN (376)...(496): Anticodon-binding domain
  misc_feature (1)..(528): Xaa is any amino acid
MAKNPVNDELIPIWIADYVLAGYGTGAIMAVPAHDDRDYEFAAKFNIPIKQVVAPVDKSEIPQGVAFTAKGVSVNSGFITGLPTNEAKRKMNAWLEEHRRGKAAVSYKLRDWIFSRQRYWGEPIPIVHCPVCGAVPVPEDALPVMLPEVDKYEPSGTGESPLANIDEWINTKCPKCGADAKRETNTMPQWAGSCWYYLRYIDPKNKTEPWSKEAEKQWMNVDLYVGGAEHAVLHLLYARFWHKVLYDLGYVSTKEPFKKLRHQGIVLAATYRDAAGKYHEFSEVDFAEGGARLKSTGEKLTAEIEKMAKSKLNGVNPDEVAAKYGADVLRLYEMFMGEFELPKPWDPRAIEGCSRFLRRLYKLVEEFVEKGGVGDDVNARVRHKTIKKVTSDLEAMKFNTAIAAMMEFVNALGSNGASKEDLIAFVKLVSPYAPHLGDELWEKLGGEGFLVNAEWPKWDEAMTLDSVVAVVVQVNGKLRGEFQAAHDAGEEELKAAAMAVDKVKPFVDGKTVRKVVVVQGRLVNIVVG

SEQ ID NO: 60999 - DNA, 645 bp, Unknown
  Obtained from environmental sample
  misc_feature (1)..(645): n is a, c, g, or t
atgaaaaacattgtaatcgccacaggcaacgccggtaaagtcaaggagttcaaggagatgttcgccggcctcggcgtctccgttactagcctcgccgaccacgtaaacccgataccggacattgccgagaccggcgccacgttttacgagaacgcgaagatcaaggccgattgggtctatcaatacatgcggcaaatacgcggcgtgggtaatgaggtgtggtctttggccgacgattcagggcttgaggtagacgcgcttgacggcgcgccgggcgtgttgagcgcgcggtatggcggcgagggggcgaacgccgcgaagaataatgagaaactgctgaacgccctgcgcaatgttcctgatgaaaagcgtaccgctcgcttcaaatgcgttttggtttttaagacgggactcgatacatatctatcggccgagggcgtttgcgaggggcggattatcaacgaggctatcggtagcaacggctttgggtatgacccgctgttcgtccccaacggttttgacaggacgatggcgcaactaacgccggaagagaaaaacaacatcagccataggggggcggcgcttaggggtctgtgtgcggttatgaaagatgttgcttttgactttgccgttgacgttgactga

SEQ ID NO: 61000 - protein, 214 aa, Unknown
  Obtained from environmental sample
  DOMAIN (4)...(202): Ham1 family
  misc_feature (1)..(214): Xaa is any amino acid
MKNIVIATGNAGKVKEFKEMFAGLGVSVTSLADHVNPIPDIAETGATFYENAKIKADWVYQYMRQIRGVGNEVWSLADDSGLEVDALDGAPGVLSARYGGEGANAAKNNEKLLNALRNVPDEKRTARFKCVLVFKTGLDTYLSAEGVCEGRIINEAIGSNGFGYDPLFVPNGFDRTMAQLTPEEKNNISHRGAALRGLCAVMKDVAFDFAVDVD

SEQ ID NO: 61001 - DNA, 1404 bp, Unknown
  Obtained from environmental sample
  misc_feature (1)..(1404): n is a, c, g, or t
atgtataatgccgcttcgatgaatgcgaatgaatttatctgccacgaagaaattatggcttccattaattgggtggaggaaaacaaacacaacgagaacttaattcgtcagctaatgcaaaaggcttctgaaaacaagggattaaaccaccgtgaggcggctcttgttttggaagcgggcgataaagacgaaattttccgtcttgcaaggcggataaaagaaacgttttacggaaacagaattgtcctttttgcgccgctgtacctttccaattattgcgtaaacggctgtttgtactgcccttatcattcgcaaaacaaaacaatggcgcgaaaaaaactttcacaggacgaaatccgcagggaagcaatcgcgttacaggatatggggcataagcgccttgcgatagaagctggtgaagacccggtgaacaacccaattgaatatattgttgagtcaatgaaaacgatatacagcataaaacataaaaacggcgcgatacgccgcttgaatgtaaatattgccgccacaactgtagatgattataaacttctcaaggacgccggtatcggaacatatattctgtttcaggaaacatataacagggaaaagtataaagaactgcatccctccggtcccaaatcggactatgactggcacaccgaagctatggacagggcaatgcagggcggaatagacgacgtaggcttaggcgttttattcggtcttggtcagtatctttatgaatttatagcgatacttatgcacgcagaacatctggaagcggcgcacggcgtcggtccccacaccataagcgttccgcgcatacgcgccgcagaaggaataaatcccggctctttcaaaaacggcatagacgacgatacatttgaaaggattgccgcctgtcttagaatcagcgtcccatataccggaattattgtctccacaagggaaagcgaagaatccagaaaaaaagttttggaacttggagtgtcccaaatcagcggcggttcccgcaccagcgtcggcggctacgaaaaagaagaagaagaaaacacaaaacaatttaaaatcaacgataatcgcccccttgatgaagtggtaaactggcttataaaagataaatttattcccagtttttgcactgcatgttaccgcgaaggacgcacaggcgaccgttttatgtcgctgtgcaaatcagggcagatacaaaattgctgtctgcccaacgcgcttatgactttgcaggagtacctgattgattacgcggcaagcggcacaagagactcaggagaagaattaataaagagcgaaattgaacatataccgaatgaaaaaatgcgctcgcttgtcattaatcgtttggaagaaatcaaacatggaaacagagatttcagagtgtga

SEQ ID NO: 61002 - protein, 467 aa, Unknown
  Obtained from environmental sample
  DOMAIN (87)...(257): Radical SAM superfamily
  misc_feature (1)..(467): Xaa is any amino acid
MYNAASMNANEFICHEEIMASINWVEENKHNENLIRQLMQKASENKGLNHREAALVLEAGDKDEIFRLARRIKETFYGNRIVLFAPLYLSNYCVNGCLYCPYHSQNKTMARKKLSQDEIRREAIALQDMGHKRLAIEAGEDPVNNPIEYIVESMKTIYSIKHKNGAIRRLNVNIAATTVDDYKLLKDAGIGTYILFQETYNREKYKELHPSGPKSDYDWHTEAMDRAMQGGIDDVGLGVLFGLGQYLYEFIAILMHAEHLEAAHGVGPHTISVPRIRAAEGINPGSFKNGIDDDTFERIAACLRISVPYTGIIVSTRESEESRKKVLELGVSQISGGSRTSVGGYEKEEEENTKQFKINDNRPLDEVVNWLIKDKFIPSFCTACYREGRTGDRFMSLCKSGQIQNCCLPNALMTLQEYLIDYAASGTRDSGEELIKSEIEHIPNEKMRSLVINRLEEIKHGNRDFRV

SEQ ID NO: 61003 - DNA, 615 bp, Unknown
  Obtained from environmental sample
  misc_feature (1)..(615): n is a, c, g, or t
atggatattcaagttcaggagcttattgacaagataaaaaaagacgggattgaaactgcttcgcaggaagccgcgcaaatcaagaaagacgccgagacggaagcccgccgtatcgttgatacagccaaaaaagaagcgctggatattatcaaccgcggcaagcaggacgcggaacgttccgaaaaggcgggggccgccgctctggaacaggcttcccgtaacctgatccttgcctttaaggacgagattcaggctctgctggacaagcttatcggcgagcatgtttcatcgcactacggcgacgacgtgttaaaagccgcgctgcctgaaatcattaaagcgtgggctgcgaaaggcaccgacaatctttccgtgcttgtgccggaaagcgagctgtccaagcttcagtctttcttcagcgaaaaacttaccggggaactctggaaaggcgtggaattaaaatccagccgcaaactggcttccggtttccatatttcaaacaagcaaggttcaatttattatgacttctccgcggaagcggtggcggggcttctttcggcctacttaaatccgaaacttgcggaaatcttaaaaacatcatcaaaaggaatttaa

SEQ ID NO: 61004 - protein, 204 aa, Unknown
  Obtained from environmental sample
  DOMAIN (26)...(198): ATP synthase (E/31 kDa) subunit
  misc_feature (1)..(204): Xaa is any amino acid
MDIQVQELIDKIKKDGIETASQEAAQIKKDAETEARRIVDTAKKEALDIINRGKQDAERSEKAGAAALEQASRNLILAFKDEIQALLDKLIGEHVSSHYGDDVLKAALPEIIKAWAAKGTDNLSVLVPESELSKLQSFFSEKLTGELWKGVELKSSRKLASGFHISNKQGSIYYDFSAEAVAGLLSAYLNPKLAEILKTSSKGI

SEQ ID NO: 61005 - DNA, 1365 bp, Unknown
  Obtained from environmental sample
  misc_feature (1)..(1365): n is a, c, g, or t
gtgtcccaatcaattaaagataagacaccgcctcatgacgatgaattggaacaggctgcgttaggcagtctgttggcggataacgaagccgtatccgccgccattcaatttcatcttagctttaatgatttttactcccgcgcgaattcccgcatctttgaagctatcatgagtctcgactcaaaaggacttcgccccgacattcagactgtagttcaggaattaaaacaaatgggcaagctggacgaagccggcggcgcgtcctatgtttcaagccttacaaccgttattccctcaagcgcgaatattgaatattacgcgcaaatggtaaaaaattattccgttaaaagatcgcttttaagcgtagcgtcggaaatcggcgtggaagtatacgatgagtcaaaagaagccgccgaaatactggaagacgttcaaaggattatttttaagttaagcgatgaaagacaggttttcacatcaagaaaaatcagcgaagtattaaaagaaactattttaatccttgacaatgtaatgaagtccaaaaaccccataaccggcatttctaccggttttgaaaaactggatcaattaacgtcgggttttcagcgcgaggaatttatcgtaataggcgcgcgtccgtctgtgggaaaaaccgcccttgcgcttaatatggcttccaatatggcgttccaccagaaaatacccaccgcgttcttttctttggaaatgtcaaatatcgcgcttgcccagcgtatcataagcagcgaggcaaaagttcaggcgcagaatttaaggagcggttttttaagcacgggcgattataaaaaaatagtggatgttatgagtcttttgtatgaaggaccgttttatatcgttgatattccgaatatggaccttttaagccttcgcactcaggcgcggaaactgcgttcccagcagaatgtcgagataatttttgtcgattatttggggcttatcgcgtacgaaggcggcaaattacagcgttttgagcagatttccaatatttcccgcgcccttaaaagtcttgcccgagaactgcatatcccgatagtggttctctgccagcttaaccgcgacgcccaatgggaaacccccacgctggcgaatttaagggattcaggctcgatagagcaggatgccgacttagtgttgttcttaaaccgcgaacagcccaagaaaaacaagaaggacaatgaagaggaaaaacccgtttcttttgacagaataccgacagatttgataatcgcgaagcaaagaaacggaccaacaggcgtagttaagctggaaatgaacgcaaaatacgctaaatttgagcctccggaaaaggaaatttccaatgaataa

SEQ ID NO: 61006 - protein, 454 aa, Unknown
  Obtained from environmental sample
  DOMAIN (9)...(112): DnaB-like helicase N terminal domain
  misc_feature (1)..(454): Xaa is any amino acid
MSQSIKDKTPPHDDELEQAALGSLLADNEAVSAAIQFHLSFNDFYSRANSRIFEAIMSLDSKGLRPDIQTVVQELKQMGKLDEAGGASYVSSLTTVIPSSANIEYYAQMVKNYSVKRSLLSVASEIGVEVYDESKEAAEILEDVQRIIFKLSDERQVFTSRKISEVLKETILILDNVMKSKNPITGISTGFEKLDQLTSGFQREEFIVIGARPSVGKTALALNMASNMAFHQKIPTAFFSLEMSNIALAQRIISSEAKVQAQNLRSGFLSTGDYKKIVDVMSLLYEGPFYIVDIPNMDLLSLRTQARKLRSQQNVEIIFVDYLGLIAYEGGKLQRFEQISNISRALKSLARELHIPIVVLCQLNRDAQWETPTLANLRDSGSIEQDADLVLFLNREQPKKNKKDNEEEKPVSFDRIPTDLIIAKQRNGPTGVVKLEMNAKYAKFEPPEKEISNE

SEQ ID NO: 61007 - DNA, 639 bp, Unknown
  Obtained from environmental sample
  misc_feature (1)..(639): n is a, c, g, or t
ttgaagcaattgaatgttcaagatactattgtcacgaccgacgcaatgggttgccagacagacattgcaaggctaatcaggaagaaaaaggccgattatatgcttggcttgaagggcaatcagggtactttgcatgatgacgttgagctgtacttcgatgatccgaagttacgcgcaggatgcgcgtaccacaaagcagtggacaaggctcatggtgcggtagaaacacgcgagtattggcaaacggatgacatagcgtggctgcaacagggaaaggcatgggccggactttcatccatcgttatgacaaaaaacactattgtcagaggcagcgataccacaacggaagtacgatactttatcagtagcctgcctctaaacgtggaggaagcggctcgtgcgatccgcggccattggatggtggaaagctatcactggcaccttgatgttacttttcgggaagatgccaaccatacccttgataaggctgctgcatataacttgaacatcgtgaaaaagatggccattaacacgctgaggctggtggatgtcggcatagcaagaataagcatgaaaaacaagcgttacattatcagcatgaactttaggcgttatttggatatcctcatggccctttaa

SEQ ID NO: 61008 - protein, 212 aa, Unknown
  Obtained from environmental sample
  misc_feature (1)..(212): Xaa is any amino acid
MKQLNVQDTIVTTDAMGCQTDIARLIRKKKADYMLGLKGNQGTLHDDVELYFDDPKLRAGCAYHKAVDKAHGAVETREYWQTDDIAWLQQGKAWAGLSSIVMTKNTIVRGSDTTTEVRYFISSLPLNVEEAARAIRGHWMVESYHWHLDVTFREDANHTLDKAAAYNLNIVKKMAINTLRLVDVGIARISMKNKRYIISMNFRRYLDILMAL

SEQ ID NO: 61009 - DNA, 306 bp, Unknown
  Obtained from environmental sample
  misc_feature (1)..(306): n is a, c, g, or t
gtgttcttcgctgagtttgcaaacgcaagcgaatggattgaggtatacctgtttgcggcagcccacgaggagccgttgaggaaatacctggaactgccgcatgggataccttcgcacgatacgatacagcgggtattcgcaatggtatcgcctgaatgcctgcaagagtttcgcaggcggtggaacggaaacggcgggcaaaaagcgaaccacatagtaagcgccgtggacaacggtgggttttgtattggcgaggtactggtggatgacaaatccaacgaaatcacggcgattcctgagctttga

SEQ ID NO: 61010 - protein, 101 aa, Unknown
  Obtained from environmental sample
  misc_feature (1)..(101): Xaa is any amino acid
MFFAEFANASEWIEVYLFAAAHEEPLRKYLELPHGIPSHDTIQRVFAMVSPECLQEFRRRWNGNGGQKANHIVSAVDNGGFCIGEVLVDDKSNEITAIPEL

SEQ ID NO: 61011 - DNA, 837 bp, Unknown
  Obtained from environmental sample
  misc_feature (1)..(837): n is a, c, g, or t
ttgttattgggtagccgtcccatttcgactagaaaaattattaggcaatgcgattacttgacaccggaagaaaccaaggcaatagtcgcttactgcaccagtaatcccctgaaaggctaccggatgcagtgttgggagatggtagaccaaaatgtggcgtttgtgtcctgcagcagcgtctataacgtcataaaacgccataatttggacaaaaaatgggcggaattgaccgaagaggcgaagaaaggttttgaccagcctctgacggttcacgagcaatggcacatagatttctcttacatcaagatacaaaactccttttattattttattggcatccttgacggctatagccggaaaatgctcaacgggaggctttgcaaaaactatggaggggtgtcaactgctgaaatactggttgccgaaaccaaagagatgtacccacaggcagtctgtccacggctgataagcgacaacggaagccagttcatatcaaaggattttgaagagctgcttgcgcttctggaattctcccacacgtttacatccgcgaaccatccgcagagcaacggcaaactggagcggttccaccgcaccttgaaaaccgaacatgtaaggagggcatcgtatctggaataccaagacgcctgcataaggctggcggaatggatcgcatattacaacagcgaaaggcttcacagcgcgatctggtatctaacgccgaatgacgttttttacggcagggcggcgaagcggcttgcagaacgcaaagaaaaactgcacactgcatttatcaagagacaggaatattggcggacacaaaattccgcatcctga

SEQ ID NO: 61012 - protein, 278 aa, Unknown
  Obtained from environmental sample
  DOMAIN (86)...(246): Integrase core domain
  misc_feature (1)..(278): Xaa is any amino acid
MLLGSRPISTRKIIRQCDYLTPEETKAIVAYCTSNPLKGYRMQCWEMVDQNVAFVSCSSVYNVIKRHNLDKKWAELTEEAKKGFDQPLTVHEQWHIDFSYIKIQNSFYYFIGILDGYSRKMLNGRLCKNYGGVSTAEILVAETKEMYPQAVCPRLISDNGSQFISKDFEELLALLEFSHTFTSANHPQSNGKLERFHRTLKTEHVRRASYLEYQDACIRLAEWIAYYNSERLHSAIWYLTPNDVFYGRAAKRLAERKEKLHTAFIKRQEYWRTQNSAS

SEQ ID NO: 61013 - DNA, 1272 bp, Unknown
  Obtained from environmental sample
  misc_feature (1)..(1272): n is a, c, g, or t
atggagcaaatgaggctggatatgcatagcagacagaaaatccttaaagcaaattttgaggactatcaaagggcatctaagaaagggcgcaaagaattactggacaggcttgtgcctgtaaccggcttgaaccggagctacctagcgacggcgcttggcaactatggcaagaaagggaatttagaaaggccgcctgcaaaaggcaggagggagccgcgccctgcggggaaacgcgggggccgccctgtcaaatacggggaagacttcgtgaaggttctgaccaggatttgggacgagtatggcaaaccctgcgggaagcttttggttccgatgattcgcggcatgatagattttctaacggagtctgagagccccgattacggaataaccaaggaaatcaggaaactgcttttggaagtgagcacggcggaagcggacatactgttgaagccggcgcggaaagcgcttgaaatcaagggcgtaagcacgaggagggccgttcaaacgcctttgagaagccaaattcctgtcaggacatactttgaccgggacacggttaagcctggaaagtttgcatttgacacggttgcgcactgcggaggctcctcaagcgggcagttttgcaagactttgacaggaacagacgtatattccgggtggtatgaaggacgcgccctgctaaacgcggctaactgctgggtgaaggccgccatttccgacatagatgccacccttcctttcccgatgacaggcgctcattacgacaacggcatggaattcataaacgaaccgctgcttagctggtgcattgatcggcacattgaggccactcgtaccaggccgtaccacaaaaacgataactgctacgcggagcagaaaaactacgacgcggtcaggaaaaccgtcggctacttccggtttgacactgccgaagagtgcgccgccctggctgaagtgtacctctggctttgccctttgtataattactggatgccttcgtttcgcctaacggacaaggaaaaacaggatgacggccgctataagaaagtctacgaaaaagagcctaaaacaccgtacgagcgactgatggaatcgcctgacgtatcgccggagtgcaaaacggaactggaacgcaggagggccgggcaaaaccctgttgagctgaaccggaaattgaatgaggctgtcgggctgctcttgaaaataaaccaagaaaaattgtacgttaaaaaagcctcctgtcagggggatggtcaggcacccgctgcctga

SEQ ID NO: 61014 - protein, 423 aa, Unknown
  Obtained from environmental sample
  DOMAIN (183)...(363): Integrase core domain
  misc_feature (1)..(423): Xaa is any amino acid
MEQMRLDMHSRQKILKANFEDYQRASKKGRKELLDRLVPVTGLNRSYLATALGNYGKKGNLERPPAKGRREPRPAGKRGGRPVKYGEDFVKVLTRIWDEYGKPCGKLLVPMIRGMIDFLTESESPDYGITKEIRKLLLEVSTAEADILLKPARKALEIKGVSTRRAVQTPLRSQIPVRTYFDRDTVKPGKFAFDTVAHCGGSSSGQFCKTLTGTDVYSGWYEGRALLNAANCWVKAAISDIDATLPFPMTGAHYDNGMEFINEPLLSWCIDRHIEATRTRPYHKNDNCYAEQKNYDAVRKTVGYFRFDTAEECAALAEVYLWLCPLYNYWMPSFRLTDKEKQDDGRYKKVYEKEPKTPYERLMESPDVSPECKTELERRRAGQNPVELNRKLNEAVGLLLKINQEKLYVKKASCQGDGQAPAA

SEQ ID NO: 61015 - DNA, 2481 bp, Unknown
  Obtained from environmental sample
  misc_feature (1)..(2481): n is a, c, g, or t
ttgaataaattcttccccttttatccttttactatcttgacttttatgaataattataggaatattataactatgagtgattatcttgatcctaataatgaagaactgctcaaggattttttcagtgaggctcaaatgcaagtagatactcttgaacaaaacgtgctagttcttgaaaatgaaggtgcgaataaagacgccgttgacgagattttccgtgcggttcatacccttaagggtgggtccgcaaccgtggaatttatggaactctctcattttgcccacttggtagaagatgtgtttgacgctattcgttctgatcaattgtcagttaacgaggatgttgttgatactcttcttcaggctattgacgtaattaaagcaatgcttgacaagcggatgagcggttctgtctatgaggatgatatttccgagataacggggaaacttaatgcgttgttacctgaaggagcgggaagtaaaaagggcgctgcaaaaaaaccggcagccgccgcgccggctcctgcgcctgtagccgctcctgctccagtcgccgcaccggctcctgccgcatccggcgcaagtcagggtttaagcgaaagagaaattcaagaattaaaagattctgttgacggcggaatgccgatatacaaagtttctgtaaaatttgatgaaaatagtttgatgaataccgtaggcggtattcaggtttatgccgttcttaaaggagttggaaccgtcttaaaaactgttcccgaatttgaacagctttatgccgataactttttccctgttgtagattattatgtcgcttctaaggaagatacgggaaaattaaaaaaatcctgtatactgcctgatgtaagtttagacgcggatgtttctgatatttccggtggtgctcctgccgcgtctgcgcccgctcctgtagcggctcccgcgcctgcgcccgccgccgctccggcagcggctgcgcctgcagcggctcctgcggctaaggcggctgctcccgccgctcctgcggctaagcctgctccaaaagccggcgcagcatcttcggaagacgcaaagaaagccggtaaagaagcgggatcaattctccgcgtagattcaaagcgcattgacgatttgttaaatcttgtttcagaaacagttattaccaaagcgacattcaatcagatcagcttgcagtttggagaacttacggcacagttacgcggtatagaaaatcaataccgtgacaaagtaaaagacctgtttgacaatctgcccgattaccttgaaagcatacaggacggaaaatcggtaaaagatattcgtaaagaaattaccgaaaattacagcgatatgtttacaatgtttgatccttttgaagcggcattcaagggcagtatagcgaaattccgctctacttcgcagaaccttgggcgcatcacaggcgaacttcaggaaggcgtcatgcgtatccgcatggttcccatcagtcagatattcagccgtttcccgcgccttgtacgcgatctttcaaaaacgcttaataaaaaaatcaatctggttatcgaaggtgaagacacagaacttgacaaatcggtagtcgaagatcttcttgatcctattatgcactcggtgcgtaactctatcgaccacggaattgaatccgcggaagttagaaaagccgccggcaagccggaagaaggcatggtactcttaaaagccgccaacgaaggtaacatgatcgttatcgaaattgcggacgacggcggcggtattgaggttgaagcggtaaaggcaaaagccgtagaacgcggaattatcagcccgaacaaagttcttaccgacgttgaagccttcaatcttatttttgaacccggcttctcgacatcaaaacagataaccgctatttcaggacgcggtgtcggacttgacgttgtacgccgctcgattgacagtcttaacggtactgttacagtcaactcggaattgggcaagggaacaaagtttacaattaaattgcctcttactcttgctattattcaaggtcttctggttaaagttggaccggaaatctattcaataccgattacatcggttatcgaaagtttgcgaatcaaaccggaagaaattaaaaagattgacaattacgaagtctttaatatccgcagtgatgttatttcattgctcaggcttaaccgcttgtttggaataaagacggaagaacaaacggaatatcatttcattgtaattgtcggaacggctgagaaaaaaatgggctttatggtagacagcctaatcggcgaggaagacgtcgttatcaagccgctaagggatcagtttacaaattctccgggaattgccggggcttcaatattgggagatggatcggtttctcttatcattgatgttggtcagttgttggatttaggacttaaaaaagaaatggagcagcgccgaatccgcgaagcttcaccgggtggcaggtaa

SEQ ID NO: 61016 - protein, 826 aa, Unknown
  Obtained from environmental sample
  DOMAIN (364)...(489): Signal transducing histidine kinase, homodimeric domain
  misc_feature (1)..(826): Xaa is any amino acid
MNKFFPFYPFTILTFMNNYRNIITMSDYLDPNNEELLKDFFSEAQMQVDTLEQNVLVLENEGANKDAVDEIFRAVHTLKGGSATVEFMELSHFAHLVEDVFDAIRSDQLSVNEDVVDTLLQAIDVIKAMLDKRMSGSVYEDDISEITGKLNALLPEGAGSKKGAAKKPAAAAPAPAPVAAPAPVAAPAPAASGASQGLSEREIQELKDSVDGGMPIYKVSVKFDENSLMNTVGGIQVYAVLKGVGTVLKTVPEFEQLYADNFFPVVDYYVASKEDTGKLKKSCILPDVSLDADVSDISGGAPAASAPAPVAAPAPAPAAAPAAAAPAAAPAAKAAAPAAPAAKPAPKAGAASSEDAKKAGKEAGSILRVDSKRIDDLLNLVSETVITKATFNQISLQFGELTAQLRGIENQYRDKVKDLFDNLPDYLESIQDGKSVKDIRKEITENYSDMFTMFDPFEAAFKGSIAKFRSTSQNLGRITGELQEGVMRIRMVPISQIFSRFPRLVRDLSKTLNKKINLVIEGEDTELDKSVVEDLLDPIMHSVRNSIDHGIESAEVRKAAGKPEEGMVLLKAANEGNMIVIEIADDGGGIEVEAVKAKAVERGIISPNKVLTDVEAFNLIFEPGFSTSKQITAISGRGVGLDVVRRSIDSLNGTVTVNSELGKGTKFTIKLPLTLAIIQGLLVKVGPEIYSIPITSVIESLRIKPEEIKKIDNYEVFNIRSDVISLLRLNRLFGIKTEEQTEYHFIVIVGTAEKKMGFMVDSLIGEEDVVIKPLRDQFTNSPGIAGASILGDGSVSLIIDVGQLLDLGLKKEMEQRRIREASPGGR

SEQ ID NO: 61017 - DNA, 372 bp, Unknown
  Obtained from environmental sample
  misc_feature (1)..(372): n is a, c, g, or t
ttgaatgtcgctttggtaataactgtttctgaaacaagatttaacaaatcgtcaatgcgctttgaatctacgcggagaattgatcccgcttctttaccggctttctttgcgtcttccgaagatgctgcgccggcttttggagcaggcttagccgcaggagcggcgggagcagccgccttagccgcaggagccgctgcaggcgcagccgctgccggagcggcggcgggcgcaggcgcgggagccgctacaggagcgggcgcagacgcggcaggagcaccaccggaaatatcagaaacatccgcgtctaaacttacatcaggcagtatacaggatttttttaattttcccgtatcttccttagaagcgacataa

SEQ ID NO: 61018 - protein, 123 aa, Unknown
  Obtained from environmental sample
  misc_feature (1)..(123): Xaa is any amino acid
MNVALVITVSETRFNKSSMRFESTRRIDPASLPAFFASSEDAAPAFGAGLAAGAAGAAALAAGAAAGAAAAGAAAGAGAGAATGAGADAAGAPPEISETSASKLTSGSIQDFFNFPVSSLEAT

SEQ ID NO: 61019 - DNA, 504 bp, Unknown
  Obtained from environmental sample
  misc_feature (1)..(504): n is a, c, g, or t
ttgcccaattccgagttgactgtaacagtaccgttaagactgtcaatcgagcggcgtacaacgtcaagtccgacaccgcgtcctgaaatagcggttatctgttttgatgtcgagaagccgggttcaaaaataagattgaaggcttcaacgtcggtaagaactttgttcgggctgataattccgcgttctacggcttttgcctttaccgcttcaacctcaataccgccgccgtcgtccgcaatttcgataacgatcatgttaccttcgttggcggcttttaagagtaccatgccttcttccggcttgccggcggcttttctaacttccgcggattcaattccgtggtcgatagagttacgcaccgagtgcataataggatcaagaagatcttcgactaccgatttgtcaagttctgtgtcttcaccttcgataaccagattgatttttttattaagcgtttttgaaagatcgcgtacaaggcgcgggaaacggctgaatatctga

SEQ ID NO: 61020 - protein, 167 aa, Unknown
  Obtained from environmental sample
  misc_feature (1)..(167): Xaa is any amino acid
MPNSELTVTVPLRLSIERRTTSSPTPRPEIAVICFDVEKPGSKIRLKASTSVRTLFGLIIPRSTAFAFTASTSIPPPSSAISITIMLPSLAAFKSTMPSSGLPAAFLTSADSIPWSIELRTECIIGSRRSSTTDLSSSVSSPSITRLIFLLSVFERSRTRRGKRLNI

SEQ ID NO: 61021 - DNA, 348 bp, Unknown
  Obtained from environmental sample
  misc_feature (1)..(348): n is a, c, g, or t
atggcgaatgcaaatgcaaacacaaacacaatagtaagagacttagaacaggtaaacgccgatttacaggaacaaaaagagcgggtagataatgttgattttaaaatggtcacattctctcttgcaggtaaagattacggcgttgatattatgagcgtaaaagaaatcgcgaaagccgataagtttacattcgtacccaatgccgcctcctatgtccggggcgtgtataacctgcgcggcgatattattccaatagtcgatttaaggcagttttttcatttacctatagaaagaaaaaccgaaggcttggataatatgctgatccttcatattaatgatcaggtatag

SEQ ID NO: 61022 - protein, 115 aa, Unknown
  Obtained from environmental sample
  misc_feature (1)..(115): Xaa is any amino acid
MANANANTNTIVRDLEQVNADLQEQKERVDNVDFKMVTFSLAGKDYGVDIMSVKEIAKADKFTFVPNAASYVRGVYNLRGDIIPIVDLRQFFHLPIERKTEGLDNMLILHINDQV

SEQ ID NO: 61023 - DNA, 501 bp, Unknown
  Obtained from environmental sample
  misc_feature (1)..(501): n is a, c, g, or t
ttgcggtattcagaaagcgtagtcgcgcctatgcactgtatgtcgcctcgggaaaggcccggtttaagcatattggaagcgtcaattgttccttccgcccctccggcgccgattatggtatgtatctcgtcgatgaacagaataacatttccggcctgtgtaatttccctggtgattttttttattctttcctcaaattcgccccggtacttggttccggcgactattgaacccatgtccagggagagtatgcgtttgcctgaaagagcttccggggcgtttccggaaacaagcagttgggcaagtccctcgacaatggcggttttacccacacccggctccccgaccaggatagggttattcttcgtccgtctggcaagtatccgtacaatacggctcatctctttttccctgccgattacaggatcgagttttccggtttttgcgagagaagacagatcgcgggagaaattatccagcgtaggggtaagcacagggtaa

SEQ ID NO: 61024 - protein, 166 aa, Unknown
  Obtained from environmental sample
  misc_feature (1)..(166): Xaa is any amino acid
MRYSESVVAPMHCMSPRERPGLSILEASIVPSAPPAPIMVCISSMNRITFPACVISLVIFFILSSNSPRYLVPATIEPMSRESMRLPERASGAFPETSSWASPSTMAVLPTPGSPTRIGLFFVRLASIRTIRLISFSLPITGSSFPVFAREDRSREKLSSVGVSTG

SEQ ID NO: 61025 - DNA, 315 bp, Unknown
  Obtained from environmental sample
  misc_feature (1)..(315): n is a, c, g, or t
ttggtaggatcgaaggccggacaaacggcaacaccaacccctgcaaatgtactgtcgcgcgccgaggtggagtcaatcgtcgaagccaaagtaaaagcgaagggcagtccctccaactggaaggtttcgattgtcgatcttatgtcggctttggacatgaacagcagccttgccgcgcgcaagacgcttgccgccaagctcaactattccggcagtgacgccgacggttccgccgaaaagaacatgtggcttcatgcggaattgctgaaagttcttgcccaaaacggaggcaagataccggcgaacctgttatag

SEQ ID NO: 61026 - protein, 104 aa, Unknown
  Obtained from environmental sample
  misc_feature (1)..(104): Xaa is any amino acid
MVGSKAGQTATPTPANVLSRAEVESIVEAKVKAKGSPSNWKVSIVDLMSALDMNSSLAARKTLAAKLNYSGSDADGSAEKNMWLHAELLKVLAQNGGKIPANLL

SEQ ID NO: 61027 - DNA, 1071 bp, Unknown
  Obtained from environmental sample
  misc_feature (1)..(1071): n is a, c, g, or t
gtgcacccctatgacacgctgccaactgtttccagaaccggatacaaattcgacggctggtttaccgcggctactggcgggactaaagtagatggaaatacaaaagtgtccaacgccgcgaatcacacgctttacgcgcgctggaccggcaacagtgtaacggttaccttccataggaatggcgggacttccgcttcaatcccggcaataactaccgtatacaacagcagagtaactttgcccacgcctcccaccaggccggactatacttttgaaagctggaataccaaggctgacggcaccgggacgggctttaacgcgaacacgcccgttacagcgaacatcgaagtgcacgccaagtggaaggcgatcataaaagccgtaacgattaaattcgacgccgcaggcggcacgcccgtccccgcaagcaagacgctaaataccggctcccccttccagctgccgcctgtaaccaaacccggatacaccttatcgggttggtttaccgcgcccaatggcgggagtaaaatagagccatcaagcaaagtgacagaccattgcacgctttacgcgcgctggactgtcaaaaacataagggtttccttcaacgccgcaggtggcacgcccgccccgccgttcaaagatataccgtttggttcagcctatggcgcgctgccaaatgtttccagagacaaattcaccttcggcggctggtttaattcacgtggggagcaagtaagtgcaggtacagccgttactgatccgaacaaccacacgcttagtgcacgctggactgccattcctcaagcggctccgccgcctgcgccgccgaaacctgctcccgctccggcagctaaatgtgtcataaccttccataggaatggcgcaccttgcaacgcgatcccgcaaataacagccgcctgcaacagcaggatatctatgccctcgcctcctacctggccaggccatactttcgccggctggaatactaatgataaaggaagcggtagcgcttttacgggaagcgtacctaattcatcgaccttcgcggtgtgggctatatggaagtaa

SEQ ID NO: 61028 - protein, 356 aa, Unknown
  Obtained from environmental sample
  misc_feature (1)..(356): Xaa is any amino acid
MHPYDTLPTVSRTGYKFDGWFTAATGGTKVDGNTKVSNAANHTLYARWTGNSVTVTFHRNGGTSASIPAITTVYNSRVTLPTPPTRPDYTFESWNTKADGTGTGFNANTPVTANIEVHAKWKAIIKAVTIKFDAAGGTPVPASKTLNTGSPFQLPPVTKPGYTLSGWFTAPNGGSKIEPSSKVTDHCTLYARWTVKNIRVSFNAAGGTPAPPFKDIPFGSAYGALPNVSRDKFTFGGWFNSRGEQVSAGTAVTDPNNHTLSARWTAIPQAAPPPAPPKPAPAPAAKCVITFHRNGAPCNAIPQITAACNSRISMPSPPTWPGHTFAGWNTNDKGSGSAFTGSVPNSSTFAVWAIWK

SEQ ID NO: 61029 - DNA, 534 bp, Unknown
  Obtained from environmental sample
  misc_feature (1)..(534): n is a, c, g, or t
atgagcggagtttggggaagtttggcggtggatgacgagggaactccaacgcagaaaaccgttctgattgagaacgggattttgaaaaattttttgagcgatattgttggcgcaaaggaattggatttgccccttacaggcagcgcacgcagagaatcttataaatatgcaccggttagcagaatgagaaacacattcatagcagctggcaattccactttgcaagatatgatagctacagttgataacgggctttatgccgcaaaaatggcgggaggctctgttaaccccgcaaccggggaatttaattttgcggttgaagaaggctacgagataaaaaatggcaaattgggagaggcggttcgcggtgcaacccttattgggctaggtcatgaaattttgccaaagataagcatggtgggcaacgaccttgaactcgcagctggcatgtgtggcgcaagctcagggcacgttccagtaactgttgggcagccttcaataaaggtggactcaattttggtgggtgggcgttaa

SEQ ID NO: 61030 - protein, 177 aa, Unknown
  Obtained from environmental sample
  misc_feature (1)..(177): Xaa is any amino acid
MSGVWGSLAVDDEGTPTQKTVLIENGILKNFLSDIVGAKELDLPLTGSARRESYKYAPVSRMRNTFIAAGNSTLQDMIATVDNGLYAAKMAGGSVNPATGEFNFAVEEGYEIKNGKLGEAVRGATLIGLGHEILPKISMVGNDLELAAGMCGASSGHVPVTVGQPSIKVDSILVGGR

SEQ ID NO: 61031 - DNA, 1839 bp, Unknown
  Obtained from environmental sample
  misc_feature (1)..(1839): n is a, c, g, or t
atgatggaaaagcaaataaaaaaagttttatacggcggggattacaaccccgaacaatggccgagggaaacatggccggaagatatgcgtcttttgagccttgcggatatcgacatactgactatcaatgtattcagttgggctttattacagccttcgcaggacgagtatgatttctccgtccttgacgcggtgattgaaactgtaagcaaggcgggcatgaaaatatgccttgctaccggaacggcggctcgtcctgcatggatggcgcgtcagttccctgaagtattacgggtaaataccgacggcgcaaaacaaaaattcggcgggcggcagggtttctgccccaacagccctgttttccgcaagtattcaacacttctggcgcgtaaactggcggaacgttacgggaaactggataaccttatcgcgtggcacatttccaacgaatacagcggtctttgttattgcgaaaagtgcgaaaaggcttttcgcgagtggctgaaaaaaaagtacaaaactctctcagcgttaaacacagcgtggaacacttcgttttggggacacacttactacgattgggatgaaattgtttctccaagccatttaagcgaagaatggcctgtaaaccgcaccacttgccagatacattccattgattaccgccgttttaattcagaagtgcagttagaatgctgtcttgccgaatatgatgtacttaaagaaataacccctcaaattcccataactacaaatttgatgggaacattctgggatctggattattttaagtggggtaaaaaaatggattttatctcatgggacaactatccttctcccggtacgccgtatacccgtaccgccatgaaccacgccctcatgcgcggctgcggcgacggaaaaccgttttacttaatggaacaaacgcccagcgtaacaaactggcagccttataattctttgaaacgccccggcattatgcggctgtggagttatcaggcattagcccatggttccgatacggtgatgttttttcagatgcgcagatcacgaggctgctgcgaaaaatttcacggggctattatcgatcattacgccagtgaaaacacaagggtattcagggaaaccgccgagcttggagcggaactcaaaaaacttggagactcattcttgggaagccgcctttcaagcgaggcggctgttctctttgactgggataactggtgggcgtcaacattttccgcgggtcccacgcgcgacatgaattatatcgaagaggttttccgtttttatgacgcgcttgcgcggcagaatatttcaacggatattatcggttttgaaactccattggacagttacaaagtgttgtttgctccgattctgtacatgataaaacccggtgttgccgaaaaattgacagcatttgtcaataacggaggcatattggttacgacctacttttccggcatggccgacgaaaatgatttagtaacaacaaaaggctaccccggagaactgcgctccctctgcggcctgtgggtggaagaaacagacgctctgccggcggatcaatttaacagattgatcattaatgacggctctcttgccggaacatggaaaacggatttattatgcgacattatccatcccgaaggcgctcaaactatcgcctgttacacggatgatttttacgcgggaacccccgccgtttgccgcaacagttaccggcaaaggctgtgtttggtatttcggctcgcgccccgaaacggctcttatagaccgctttaccgacgaaatttgcggcgaatgcggtataaagcccgtatttccccgcagtga

SEQ ID NO: 61032 - protein, 612 aa, Unknown
  Obtained from environmental sample
  DOMAIN (397)...(606): Beta-galactosidase trimerisation domain
  misc_feature (1)..(612): Xaa is any amino acid
MMEKQIKKVLYGGDYNPEQWPRETWPEDMRLLSLADIDILTINVFSWALLQPSQDEYDFSVLDAVIETVSKAGMKICLATGTAARPAWMARQFPEVLRVNTDGAKQKFGGRQGFCPNSPVFRKYSTLLARKLAERYGKLDNLIAWHISNEYSGLCYCEKCEKAFREWLKKKYKTLSALNTAWNTSFWGHTYYDWDEIVSPSHLSEEWPVNRTTCQIHSIDYRRFNSEVQLECCLAEYDVLKEITPQIPITTNLMGTFWDLDYFKWGKKMDFISWDNYPSPGTPYTRTAMNHALMRGCGDGKPFYLMEQTPSVTNWQPYNSLKRPGIMRLWSYQALAHGSDTVMFFQMRRSRGCCEKFHGAIIDHYASENTRVFRETAELGAELKKLGDSFLGSRLSSEAAVLFDWDNWWASTFSAGPTRDMNYIEEVFRFYDALARQNISTDIIGFETPLDSYKVLFAPILYMIKPGVAEKLTAFVNNGGILVTTYFSGMADENDLVTTKGYPGELRSLCGLWVEETDALPADQFNRLIINDGSLAGTWKTDLLCDIIHPEGAQTIACYTDDFYAGTPAVCRNSYRQRLCLVFRLAPRNGSYRPLYRRNLRRMRYKARISPQ

SEQ ID NO: 61033 - DNA, 1014 bp, Unknown
  Obtained from environmental sample
  misc_feature (1)..(1014): n is a, c, g, or t
atgagcgcagaaaacagcgtaatggtatacattcaacaaaacggtgggaaagccgccgaggtgagcctggagcttgtgtccaaggcacgtgaactcgcggacaagctgggggcggaggttagcgccgcgcttttcggcgacaaggtgtcgggggaagccgcccgccttgccagttacggggccgaccgcgtgtatgttatggaagacccccgcctcaaattttacacgcccattccctacagcaagctgatgatacaggtggtctccgagaggaagccgcagatcgtgctgtacggcgcgaccaccgagggccgcgacctcgctccccgcgtggcgtcccacctgaaagtgggattgaccgcggactgtaccgatctgcagatcggagatcacaaacaacaggataccgaatacaagaatattctttaccagatacgccccgcttttggcggcaacattatcgccacaatcgtgtcgcccgagaaaaagccccagatggcgacggttcgcgagggcgttatgcgaatggcagcgcccaatacttcgcgcaaggccgaagtcgtgaatgtttccgcgaaactcaacccggaagatttcccgagcgagataatcgagcgtgttatggaagaaaagaccgtcaaccttaaaggcgcgcaaattatcgtgtccggcggcatgggagtgggaagcaaggaaaatttcgcccttatccgtgaacttgcccagactttgggagccgaagttggcgcttcccgcgctgccgttgatcagggctttatcggcaaggaacatcaggtggggcagacgggaaccacggtcaggccgaagctgtacattgcctgcggtatttccggggcgattcaacacagggcgggcatggacgcttcttccaggatcattgcgattaacagcgatcctgaagcgccgattttcggcattgcccattacggaatagtgggggatttgaacgaggttatccccctgatgatcaaagcgtacaaggccagagtgtag

SEQ ID NO: 61034 - protein, 337 aa, Unknown
  Obtained from environmental sample
  DOMAIN (6)...(202): Electron transfer flavoprotein domain
  misc_feature (1)..(337): Xaa is any amino acid
MSAENSVMVYIQQNGGKAAEVSLELVSKARELADKLGAEVSAALFGDKVSGEAARLASYGADRVYVMEDPRLKFYTPIPYSKLMIQVVSERKPQIVLYGATTEGRDLAPRVASHLKVGLTADCTDLQIGDHKQQDTEYKNILYQIRPAFGGNIIATIVSPEKKPQMATVREGVMRMAAPNTSRKAEVVNVSAKLNPEDFPSEIIERVMEEKTVNLKGAQIIVSGGMGVGSKENFALIRELAQTLGAEVGASRAAVDQGFIGKEHQVGQTGTTVRPKLYIACGISGAIQHRAGMDASSRIIAINSDPEAPIFGIAHYGIVGDLNEVIPLMIKAYKARV

SEQ ID NO: 61035 - DNA, 645 bp, Unknown
  Obtained from environmental sample
  misc_feature (1)..(645): n is a, c, g, or t
gtgataaccatgggtccgccgtcggcctcgacagtgctaaaggaatgcctttaccggggagcggattttaccgccctggtttccgaccggggctttgccggagcggatacccttgccacatcctacgcgcttaaatgcgcgataaacaaagccggcgcttttgaccttgtgctatgcgggcggcaggcgatagacggagacaccgcgcaggtaggcccccagaccgccgaaaagctgggcgtcaaccagatcacctgcgtttccaaaatcgaagccttggatgccgcaaagaaagagatcattgcggttcgttcaattgaaggaggttgggaaagggttaaggcgaaactgcccgtcctggttaccttcaacgccgaaggcgaaatgcccaggcccgcgtcggcaattaagagcatgacctacaaacgcgcggttcccgttcctgacgtcaacccgatggccctttggaacattcccgccattaacgccgatccgctccaatgcggccttgccggttctcccaccaaggtgaagcatatcaattccgtggtgctaaccgccgcggacatcaggtacatcgatcccggcgaagctggaattgcggagctgatccacggcctcatcgcggatcatactttcggttaa

SEQ ID NO: 61036 - protein, 214 aa, Unknown
  Obtained from environmental sample
  DOMAIN (2)...(161): Electron transfer flavoprotein domain
  misc_feature (1)..(214): Xaa is any amino acid
MITMGPPSASTVLKECLYRGADFTALVSDRGFAGADTLATSYALKCAINKAGAFDLVLCGRQAIDGDTAQVGPQTAEKLGVNQITCVSKIEALDAAKKEIIAVRSIEGGWERVKAKLPVLVTFNAEGEMPRPASAIKSMTYKRAVPVPDVNPMALWNIPAINADPLQCGLAGSPTKVKHINSVVLTAADIRYIDPGEAGIAELIHGLIADHTFG

SEQ ID NO: 61037 - DNA, 834 bp, Unknown
  Obtained from environmental sample
  misc_feature (1)..(834): n is a, c, g, or t
atgaagtggaagtatttaaatttatgggcggaggctgaaatgggcgcggctttggatcttttaacgcttggagagcgttcattcagttcccgttttatccttggctcaggcaagtactccttgagcctcatcaaggccgcggtggagaacgccggcgcacagatgatcaccgtcgccctgagacgcgcaaatgtcgggggcagagaaaatatccttgagtatattcctccggaagtaactattctgccaaatacatccggagccaggaatgccgaagaggcggtcaagattgcccgctttgcgcgggaactctgcggagagccttttattaaaattgaggtcatccgtgatacccggtatctgctgccggataattacgagacaataaaagccaccgagatcctcgcgaaagaaggatttatagtcatgccctatatgtttcccgatttgatggcggcgcgggatcttgtaaacgccggagccgcctgcgtcatgcccctggcggcgcctattggttccaaccgcggactatgcggcaaggattttatccgtatccttctggatgagattgcgcttcccattatcattgacgcaggaatcgggagaccttcccaggcatgcgaagtaatggagatgggagccgacgctgtcatggcaaacaccgccattgccaccgccggagatattcccgctatggctgaagcgtttaagaaagcgattgaagcgggcaggcaggcttttctcagcggtacaggcagggttcttgaaaagggcgcgtccgcgtcttcaccgttaaccgggttccttgcagagtcaggtggcgaaaatgaatga

SEQ ID NO: 61038 - protein, 277 aa, Unknown
  Obtained from environmental sample
  DOMAIN (20)...(270): Thiazole biosynthesis protein ThiG
  misc_feature (1)..(277): Xaa is any amino acid
MKWKYLNLWAEAEMGAALDLLTLGERSFSSRFILGSGKYSLSLIKAAVENAGAQMITVALRRANVGGRENILEYIPPEVTILPNTSGARNAEEAVKIARFARELCGEPFIKIEVIRDTRYLLPDNYETIKATEILAKEGFIVMPYMFPDLMAARDLVNAGAACVMPLAAPIGSNRGLCGKDFIRILLDEIALPIIIDAGIGRPSQACEVMEMGADAVMANTAIATAGDIPAMAEAFKKAIEAGRQAFLSGTGRVLEKGASASSPLTGFLAESGGENE

SEQ ID NO: 61039 - DNA, 1200 bp, Unknown
  Obtained from environmental sample
  misc_feature (1)..(1200): n is a, c, g, or t
ttgcagagtcaggtggcgaaaatgaatgaaccgccgcctgccttatactcgtattttgaaggtatggaacaaatcaaaagcacagtcatggaagaaacgctgaaagccgcggcgggctatacgtcatcagtatatacccgtgagtatatacgccgggcgctggatgagatgcggaaggatcagggacagggttgttctatcgaagattttggcatcttcctctcccccgcggcctcgccatttcttgaagaaatggcgcatgcggcccggaaagagaagctaaggcgttttggcaattcaataagtctttttacccctctctatatttccaattattgtgaaaatgcctgtgtatactgcggctttaaagccaataatccaatccgccgttcaaagcttgaatttgaggaaattgaaattgaaatgaaggcgattaaagccaccggccttgaagagattctcattcttacaggcgaaagcgccaaacattcaaatttggaatacattggccgcgcctgtgcgcttgcaaggaagtatttccgtgtagtaggtctggaggtttatcccatgaactgcgctgattacgcataccttaaaacccagggagcggactttatcacggttttccaggaaacctatgatcccgaactatacggaaaactgcaccccgcaggccgtaaacggagttttgcctatcgtttcaatacccaggagcgggcgatccttggaggactccggggagtcgcctttgcgagcctcctcggactgggagaatttcggcgcgatgtttttgcaaccggaatccacgcatgggcgattcaacggaagtacccccacgcggaaatttctttttcatgccctcgtttaagacctattgtcaataacaatgacaaaaatttcaaacccattaatgtaagcgaagccgaattactccgggttatttgcgcattccgcctctttatgcccagctcggggattaccatttcctcaagggaaaacgcccggttccgggatcatgcctgcgagatcgccgttacgagaatttccgccggggttgacgtgggcattggcggtcacagcggcgcttccagcggggacgagcagtttgaaatcagcgattcccgaaacgtagaggaaatataccagatgctgctttcccggggacttcagccggtaatgagcgattacgttgatgtttga

SEQ ID NO: 61040 - protein, 399 aa, Unknown
  Obtained from environmental sample
  DOMAIN (107)...(270): Radical SAM superfamily
  misc_feature (1)..(399): Xaa is any amino acid
MQSQVAKMNEPPPALYSYFEGMEQIKSTVMEETLKAAAGYTSSVYTREYIRRALDEMRKDQGQGCSIEDFGIFLSPAASPFLEEMAHAARKEKLRRFGNSISLFTPLYISNYCENACVYCGFKANNPIRRSKLEFEEIEIEMKAIKATGLEEILILTGESAKHSNLEYIGRACALARKYFRVVGLEVYPMNCADYAYLKTQGADFITVFQETYDPELYGKLHPAGRKRSFAYRFNTQERAILGGLRGVAFASLLGLGEFRRDVFATGIHAWAIQRKYPHAEISFSCPRLRPIVNNNDKNFKPINVSEAELLRVICAFRLFMPSSGITISSRENARFRDHACEIAVTRISAGVDVGIGGHSGASSGDEQFEISDSRNVEEIYQMLLSRGLQPVMSDYVDV

SEQ ID NO: 61041 - DNA, 513 bp, Unknown
  Obtained from environmental sample
  misc_feature (1)..(513): n is a, c, g, or t
gtgttaagggaaaaggatctttcattgaaagattatcttgatcttgcaagggatgtccttgagatttgtaccagcaggaaagttcaatttattgttcatggcctgcctcaggcggctccggatttgggctgcccttttcttcatctgccgtgggcggcgtttaaggaaaatcgcataagttcaaatggcatttattcttttggagtttctgttcatagtacggaagaagcggatattgccatagctcatggagcttcatggcttattggcggccatatttatacaacccaaagcaaagacggtcttgaaggcaggggaccggaattccttacggaactctgtaagatgtcttctgtccccgtgtacgggatcggcggcattaatgaatataacataaccgaaattgtaaaaaccggcgcggcaggagcctgcctgatgtcctctttgatgcaaagccccgatccttccgcgctgatatccgcgttgaaaaacatgagtaaaacatatatttag

SEQ ID NO: 61042 - protein, 170 aa, Unknown
  Obtained from environmental sample
  DOMAIN (2)...(149): Thiamine monophosphate synthase/TENI
  misc_feature (1)..(170): Xaa is any amino acid
MLREKDLSLKDYLDLARDVLEICTSRKVQFIVHGLPQAAPDLGCPFLHLPWAAFKENRISSNGIYSFGVSVHSTEEADIAIAHGASWLIGGHIYTTQSKDGLEGRGPEFLTELCKMSSVPVYGIGGINEYNITEIVKTGAAGACLMSSLMQSPDPSALISALKNMSKTYI

SEQ ID NO: 61043 - DNA, 354 bp, Unknown
  Obtained from environmental sample
  misc_feature (1)..(354): n is a, c, g, or t
atgaaaacggcattgagtatcgcagggtctgattgcagcggcggcgcgggcatacaggcagatctaaaaacattttcggcgcacggcgtttttggcatgacggctgttacatcggttgtcgcggaaaatacgttccgggtaatcgaatatcaggatattcgtccggaccttatcgaaaagcaaattgacgcggtgtttgaagatattccgcccgacgcggtaaaagtcggaatgctttcatgcagtcaaaccatgctggctgtcgcgggaaaactgcgggagtggaaacctcgcttcccttcggaagtgtgcagcgtggttatgatccnggtgatgtncgcgcctcggccataa

SEQ ID NO: 61044 - protein, 117 aa, Unknown
  Obtained from environmental sample
  DOMAIN (11)...(112): Phosphomethylpyrimidine kinase
  misc_feature (1)..(117): Xaa is any amino acid
MKTALSIAGSDCSGGAGIQADLKTFSAHGVFGMTAVTSVVAENTFRVIEYQDIRPDLIEKQIDAVFEDIPPDAVKVGMLSCSQTMLAVAGKLREWKPRFPSEVCSVVMIXVMXAPRP

SEQ ID NO: 61045 - DNA, 387 bp, Unknown
  Obtained from environmental sample
  misc_feature (1)..(387): n is a, c, g, or t
atgggccgtcacgggggcggcgctttctccggcaaggatccgtccaaggtagaccgttcagcggcctacgccgcccgttatgtcgccaagaacgtggtggcggccaaacttgccgaccgctgcgaagttcagcttgcctatgccatcggcgtgccgttccccgtttcaatcatggtggacacattcggaaccgcgaaagccgacgagaaacacattgcgtccgccgtggaaaaagtctttgatctttctcccgcgggcatcatcaagacttttgatctgcgccgcccgatttatcaaaagaccgcgtcctatggtcattttggccgcgccgaatttccctgggaaaaaaccgacaagacagaggctctgaaaaaagcgattaagtag

SEQ ID NO: 61046 - protein, 128 aa, Unknown
  Obtained from environmental sample
  DOMAIN (1)...(116): S-adenosylmethionine synthetase, C-terminal domain
  misc_feature (1)..(128): Xaa is any amino acid
MGRHGGGAFSGKDPSKVDRSAAYAARYVAKNVVAAKLADRCEVQLAYAIGVPFPVSIMVDTFGTAKADEKHIASAVEKVFDLSPAGIIKTFDLRRPIYQKTASYGHFGRAEFPWEKTDKTEALKKAIK

SEQ ID NO: 61047 - DNA, 651 bp, Unknown
  Obtained from environmental sample
  misc_feature (1)..(651): n is a, c, g, or t
atgaagcgtaaaattgactacagcctgtatctagtaacagaccgggaattaatggctgtcgccagcattgaagaatgtgttgagcaggcggtttgcggcggctgtacggtggtgcaactgcgggaaaaaaccgcgtcctcgtgcgagttttatgaaacggcggcgcgggtgcgcaaaattacggctgatttgggcgtaccgctgattatcaatgaccgcgccgatattgcgttagcggtaaacgcggacggcgtacatatcgggcaggatgatttaccctttgacgcggcgcgccgcataatgggaaaagacgcgattatcggcgtttcggcaaacaatgtaactgaagccctggccgccgccgctctgggcgctgattatctgggcgtaggcgcgatgttcgcaaccgataccaaaaaagacgctgacagtacaactatggatgaactgcggcgcatacgcgctgaaattaaaattcccattgtggcaatcggcggcattaacaaaaacaatgtgccgctttttgcggggacgggaattgatggtatagccgttgtttccgccatcgttgctcaaaaagacgcaagaagcgcggcgcgtgaactgaaagcattgtttcacagtacaatggggaaaaatgaaggcgtataa

SEQ ID NO: 61048 - protein, 216 aa, Unknown
  Obtained from environmental sample
  DOMAIN (9)...(189): Thiamine monophosphate synthase/TENI
  misc_feature (1)..(216): Xaa is any amino acid
MKRKIDYSLYLVTDRELMAVASIEECVEQAVCGGCTVVQLREKTASSCEFYETAARVRKITADLGVPLIINDRADIALAVNADGVHIGQDDLPFDAARRIMGKDAIIGVSANNVTEALAAAALGADYLGVGAMFATDTKKDADSTTMDELRRIRAEIKIPIVAIGGINKNNVPLFAGTGIDGIAVVSAIVAQKDARSAARELKALFHSTMGKNEGV

SEQ ID NO: 61049 - DNA, 810 bp, Unknown
  Obtained from environmental sample
  misc_feature (1)..(810): n is a, c, g, or t
atgaaaacggcattgagtatcgcggggtctgattgcagcggcggcgctggtcttcaggcagatttgaaaacattttcggcgcacggcgtttttggcatgacggctgttacatcggttgtcgcggaaaatacgttccgggtaatcgaatatcaggatattcgcccggaccttatcgaaaagcagattgacgcggtttttgaagacattccgcccgacgcggtaaaagttggaatgctttcatgcgttcaaaccatgctggcagtcgcgggaaaactgcgggaatggaaaccccgcaatgtggttattgacccggtgatgtacgcgaaaaacggcgctcccctgatggagatggacgctatcagcacgttgattaaagaagtgactccgttggcggatttgataacgccgaatattcccgaagccgaaaaaatgtcgggaatggcgattaaaacgcataacgatatgcgggaagcggcgcggcgtattcacgcgatgggctgccgcgcggttgtcgtcaaaggcgggcatatcgaaggggacgcgaccgatattttgtttgacggaaaagaatttcatgaatacacgtcgccgcgggtagataccaaacacacccacggaacaggctgtacgttttcttcggcgattgcttcaaatctcgcgcttgggctttcgcttcataaagcggtcgggagcgcgaaggcgtatataaacatggcgattacccatgcgccgggactgggaaaaggcaacgggccaacgcatcatttttacgcgttatatgaagccaggaaggatggcgggatatcatga

SEQ ID NO: 61050 - protein, 269 aa, Unknown
  Obtained from environmental sample
  SIGNAL (1)...(20)
  DOMAIN (11)...(254): Phosphomethylpyrimidine kinase
  misc_feature (1)..(269): Xaa is any amino acid
MKTALSIAGSDCSGGAGLQADLKTFSAHGVFGMTAVTSVVAENTFRVIEYQDIRPDLIEKQIDAVFEDIPPDAVKVGMLSCVQTMLAVAGKLREWKPRNVVIDPVMYAKNGAPLMEMDAISTLIKEVTPLADLITPNIPEAEKMSGMAIKTHNDMREAARRIHAMGCRAVVVKGGHIEGDATDILFDGKEFHEYTSPRVDTKHTHGTGCTFSSAIASNLALGLSLHKAVGSAKAYINMAITHAPGLGKGNGPTHHFYALYEARKDGGIS

SEQ ID NO: 61051 - DNA, 651 bp, Unknown
  Obtained from environmental sample
  misc_feature (1)..(651): n is a, c, g, or t
ttgatgtttgagtttattgctgtcacaaaccgccgtctctgttcccaagggaacggcgtgtacgttaacaccgcgttcttgaacgcgcagtttctggcgcaaatcgaaaagatagccgcctcgggggttaaggcaatcgtgttaagggaaaaggatctttcattgaaagattatcttgatcttgcaagggatgtccttgagatttgtaccagcaggaaagttcaattcattgttcatggcctgccccaggcggccatggatttaggctgtccttttcttcatctgccgtgggcggcgtttaaggaaaatcgtataagttcaaaaggcattttttcttttggagtttctgttcacagtaccgaagaagcggatcttgccatagctcgcggagcttcatggcttattggcggccatatttatgcaacccaaagcaaagacggccttgaaggcagggggccggaattccttgcggagctctgtaagttgtcctctgtccccgtgtacgggatcgggggaattaatgaacataacataaccgaaattgtaaaaaccggcgcggcgggagcatgcctgatgtcttctttgatgcaatgtcccgatccttccgcgttgatatccgcgctgaaaaacataagtaaaagaaatatttag

SEQ ID NO: 61052 - protein, 216 aa, Unknown
  Obtained from environmental sample
  DOMAIN (5)...(195): Thiamine monophosphate synthase/TENI
  misc_feature (1)..(216): Xaa is any amino acid
MMFEFIAVTNRRLCSQGNGVYVNTAFLNAQFLAQIEKIAASGVKAIVLREKDLSLKDYLDLARDVLEICTSRKVQFIVHGLPQAAMDLGCPFLHLPWAAFKENRISSKGIFSFGVSVHSTEEADLAIARGASWLIGGHIYATQSKDGLEGRGPEFLAELCKLSSVPVYGIGGINEHNITEIVKTGAAGACLMSSLMQCPDPSALISALKNISKRNI

SEQ ID NO: 61053 - DNA, 366 bp, Unknown
  Obtained from environmental sample
  misc_feature (1)..(366): n is a, c, g, or t
atgctcatagaggctcagaagaataaagatcccgaattgaggaacataggcgtatctttgcatttggctgctcgctacggtcatgttaaaaatgttgaggctcttgttgaaaacggagctaatataaatgcaaaaaatttggaaggctttaccccattgcacgaagctgcaaaagaaggcagaaaaccagttgtggaatatctgctttccaaaaaagctgatgtaaacatcgttgatgcaaacggctacaacgcgatggattgggcggaacaatatggcataggcgcaccgttccccgaagttgccaaactccttgcaaaagctggtagctctcataccaaagcttggaaagaaaccaaaaaataa

SEQ ID NO: 61054 - protein, 121 aa, Unknown
  Obtained from environmental sample
  DOMAIN (15)...(47): Ankyrin repeat
  misc_feature (1)..(121): Xaa is any amino acid
MLIEAQKNKDPELRNIGVSLHLAARYGHVKNVEALVENGANINAKNLEGFTPLHEAAKEGRKPVVEYLLSKKADVNIVDANGYNAMDWAEQYGIGAPFPEVAKLLAKAGSSHTKAWKETKK

SEQ ID NO: 61055 - DNA, 750 bp, Unknown
  Obtained from environmental sample
  misc_feature (1)..(750): n is a, c, g, or t
atgacttggaggggggacacagccgaaacaagaagacacccaacaactttcaacggaaaaacctacaacgccgcttggattgccctttggaaatatcctcgccctttgcaaaaaaaacacgaacccatagcagcctatgcccacggcaaggattatcacatcagcatattaaaagaattagccaaacaagttgaggggcaaccctttgtggattccttgcccattgcagaaagagaacttgcgacaatggcagggcttggctttataggcaaaaacacaatgctaataaacccaaaattcggcagcgcatttttcataggaggaatactattcancgaagaaataaaaacacaaaacaactctcaactccgggctctcaactctcaactctacactaaatgcactaaatgcactaaatgcagaaaatgcatagatgcctgccccaacaaagctctaaccgaagatggttttttggatgctcgcaaatgcgcaagctatttgactattgaacataaaggcgagtttaacgaagaacaaaaagagtgggcaaaacacagcatttttggttgcgatatttgccagagagtttgcccatacaacgcaaagcacttagcggaaacagagccttatttttccccagacgaaagtgagtggaaaaagaaaactataaaagaaagcccgctgcaaagagcgggcactaaaaatctaaagagaaattattttttggtttctttccaagctttggtatga

SEQ ID NO: 61056 - protein, 249 aa, Unknown
  Obtained from environmental sample
  DOMAIN (130)...(153): 4Fe-4S binding domain
  misc_feature (1)..(249): Xaa is any amino acid
MTWRGDTAETRRHPTTFNGKTYNAAWIALWKYPRPLQKKHEPIAAYAHGKDYHISILKELAKQVEGQPFVDSLPIAERELATMAGLGFIGKNTMLINPKFGSAFFIGGILFXEEIKTQNNSQLRALNSQLYTKCTKCTKCRKCIDACPNKALTEDGFLDARKCASYLTIEHKGEFNEEQKEWAKHSIFGCDICQRVCPYNAKHLAETEPYFSPDESEWKKKTIKESPLQRAGTKNLKRNYFLVSFQALV

SEQ ID NO: 61057 - DNA, 693 bp, Unknown
  Obtained from environmental sample
  misc_feature (1)..(693): n is a, c, g, or t
ttggtgcattctggcaatgcgcgggctgtggtaactgcgcccttgtgcaaagaggcagtggaaaaaaccattccaaaatntcagggacatacggaatttataggcgaaatgtgcggcgataaagagcctgtgcttgcgcttgttcacggaaagtgggtggttgctcacgttagcactcatgtttctttggcagaagctataaaaaaagcaaagccggaaagaattgtaaaagtgggtcgcttgttaaatgagttcttgcaaaaagcaaaagggattaaaaatccaaaaataggcgttgccggaataaatcctcacgctggagaaaatggtttgtttggcaaagaagaaatgctaagtattatgcctgccgtaaaaaaactccgctcaatgaaaatagatgccattggacctctcccagccgatgttgtttttccacagttgcacagcggcatatatgacggggttattgccatgtatcacgaccaagggcatattgtgactaaaactctggcatttaatttaggcaaaggattggttggtggcgtaaatactacgcttgggctaaacgttttgcgcacaagcgtggatcacggaactggctttgacatagcttggcaaaacaaagcagaccctacatcgctaaaagatgccctattgcttgccgacaaactagctttagggctcaatgtatag

SEQ ID NO: 61058 - protein, 230 aa, Unknown
  Obtained from environmental sample
  DOMAIN (1)...(222): Pyridoxal phosphate biosynthetic protein PdxA
  misc_feature (1)..(230): Xaa is any amino acid
MVHSGNARAVVTAPLCKEAVEKTIPKXQGHTEFIGEMCGDKEPVLALVHGKWVVAHVSTHVSLAEAIKKAKPERIVKVGRLLNEFLQKAKGIKNPKIGVAGINPHAGENGLFGKEEMLSIMPAVKKLRSMKIDAIGPLPADVVFPQLHSGIYDGVIAMYHDQGHIVTKTLAFNLGKGLVGGVNTTLGLNVLRTSVDHGTGFDIAWQNKADPTSLKDALLLADKLALGLNV

SEQ ID NO: 61059 - DNA, 783 bp, Unknown
  Obtained from environmental sample
  misc_feature (1)..(783): n is a, c, g, or t
atgagaaatataaaagcggcggtttgcgttaaatgcggcgcggaatttgaagcccctggagatatttacacttgtcccaaatgcggcggcatcctggagattgtacttgactatgattatataaaaacccagattagccgggaaaagtttgccggaaaaaaagatttttccatgtggcgctatctggaattccttcccattgaggaacgctcaaggcttggccctttacgggtgggctggtcgcccctgtataaagcctctacgttaggtgaaacactcggccttaaaaacctttatatcaaggatgacgggttaaatccaacttccagcctcaaggacagggcctcggcaatagcggcggcgagagcgcttcactccggcaaggacacggtcgcctgttcctcaacgggaaacgccgcctcatcgctggccggagccgccgcctctctgggtcttaaatcggtaatcttcgtgcccgaacgcgcgccccagggcaagctgacccagcttttgatatttggcgcgaccgttgtcagcgtaaaaggcgattatgaagcgactttccgtctttcagcgcaggctatcgagaaatacggctggtacaacaggaacgcggcgatcaacccttatttatccgagggtaaaaaaacagtgtccatggaaatcgccgaacaactgggctttattgccccggattttgttgcggtttctgtcggcgacggctgtactatagccggtgtctggaagggctttaaagacctgtacggcaaccggccttattga

SEQ ID NO: 61060 - protein, 260 aa, Unknown
  Obtained from environmental sample
  DOMAIN (74)...(260): Pyridoxal-phosphate dependent enzyme
  misc_feature (1)..(260): Xaa is any amino acid
MRNIKAAVCVKCGAEFEAPGDIYTCPKCGGILEIVLDYDYIKTQISREKFAGKKDFSMWRYLEFLPIEERSRLGPLRVGWSPLYKASTLGETLGLKNLYIKDDGLNPTSSLKDRASAIAAARALHSGKDTVACSSTGNAASSLAGAAASLGLKSVIFVPERAPQGKLTQLLIFGATVVSVKGDYEATFRLSAQAIEKYGWYNRNAAINPYLSEGKKTVSMEIAEQLGFIAPDFVAVSVGDGCTIAGVWKGFKDLYGNRPY

SEQ ID NO: 61061 - DNA, 441 bp, Unknown
  Obtained from environmental sample
  misc_feature (1)..(441): n is a, c, g, or t
atgcggacaaggtttgcgttttccggaattgcgcctgcgccaatgccggcggccttctgcgccgaggccacatccttgaggccgttacccgtaactatcgataccacaagcgcgtcacgggggataagaccgttagccgccgcctttgccagccccgcggttccggtaacgccggcaggctcgccgaaaaccccggcgctttttcccaacaaacgcattgccgcgagtatttcatcatcgctgacattaacggcgatgccgttcgattcccgtattgccatcatggccttgtccccgttgcgcggcactcccacggcaatactgtccgcaagggtgttttcttccattttttcaatagcggtattatttttgacagcgcggttaatggggcagcagccttcggctttgtacgctgataagacggggcagctttgtcaataa

SEQ ID NO: 61062 - protein, 146 aa, Unknown
  Obtained from environmental sample
  SIGNAL (1)...(21)
  misc_feature (1)..(146): Xaa is any amino acid
MRTRFAFSGIAPAPMPAAFCAEATSLRPLPVTIDTTSASRGIRPLAAAFASPAVPVTPAGSPKTPALFPNKRIAASISSSLTLTAMPFDSRIAIMALSPLRGTPTAILSARVFSSIFSIAVLFLTARLMGQQPSALYADKTGQLCQ

SEQ ID NO: 61063 - DNA, 399 bp, Unknown
  Obtained from environmental sample
  misc_feature (1)..(399): n is a, c, g, or t
atggaagaaaacacccttgcggacagtattgccgtgggagtgccgcgcaacggggacaaggccatgatggcaatacgggaatcgaacggcatcgccgttaatgtcagcgatgatgaaatactcgcggcaatgcgtttgttgggaaaaagcgccggggttttcggcgagcctgccggcgttaccggaaccgcggggctggcaaaggcggcggctaacggtcttatcccccgtgacgcgcttgtggtatcgatagttacgggtaacggcctcaaggatgtggcctcggcgcagaaggccgccggcattggcgcaggcgcaattccggaaaacgcaaaccttgtccgcattgatccggatatggctttgcttataaaagaattttcaaaacgcgggctgtaa

SEQ ID NO: 61064 - protein, 132 aa, Unknown
  Obtained from environmental sample
  misc_feature (1)..(132): Xaa is any amino acid
MEENTLADSIAVGVPRNGDKAMMAIRESNGIAVNVSDDEILAAMRLLGKSAGVFGEPAGVTGTAGLAKAAANGLIPRDALVVSIVTGNGLKDVASAQKAAGIGAGAIPENANLVRIDPDMALLIKEFSKRGL

SEQ ID NO: 61065 - DNA, 2292 bp, Unknown
  Obtained from environmental sample
  misc_feature (1)..(2292): n is a, c, g, or t
ttgtatttatccaactttctttctccctataaagtatgggaaacgggtaacatttttgtcattgaccatgaaggggtagccgtcgccgtaaaccagtatgattaccgggtacaggaacggcataactatattgattggggcaaacgggatccggcataccggaaaatgggtgaagttttccagcacattattgaaaacaaagagggcataaaacaatacccctataacgggtccgagaggtactgcgcctttgataccgtctacgggaccgacaactggtctgtattgataagcgccccgttttcggaaagcccccttacccatatcaggcagatgctctttatctgcgccgcgataattatggggctggggataatagccgcgctgctggccgccaacagcattgcggctccttatgaaaaaatgacggaactgagaaccaccgccgaggcggcgtccgcttcaaaaacccgcttcctggcaaatatgagccatgaaatgagaacgccgcttaatgccattatagggctttcagaactggaactgggatctgcgaaactacagggggaatcttttaccaatgtcgaaaaaatttatacggcgggcatgacgctcctggggatcatcaatgatcttttggacatatccaaaatagaatccggtaaattgttaatgattccggtaatatacgatgtccccagcatgataaacgacacagtcaatctgaatgtagtccgcattggcagtaagccggtgcagttcaggctctatgtagataaagctctgccttccaagcttaaaggcgacgagctgcggatcaaacaggtattcaacaatctgctctcaaacgcttttaagtataccgattccggatttgtagactggcatatttcctctgtccgcgagggcgaccagataaaaattgtcagcacaatccgtgacacggggataggcatacacaaggacgaccaggaaaaacttttcaaggattattatcaggccaacctcaaggcaaactactatttggaaggaacgggccttgggctttccataaccaagaaccttgtcaaactgatgaatggttccatcaattttgaaagcgaataccgcaaaggctcgtcctttaccgttgaattttaccaggatgtcgttaatgacgacgtaatcggcgaagaggctgcggaacacctgtcgcggttccgtttctcagcccagcgccgcagccgtaatcagaggcttctgcgggctgatatgtcttatgccactgttctcatcgtggacgacgtagtctccaatctggacgttgccagaggaatgttgaaaccgtacaagataggcgtggaatgtgttacatcgggcaaggaagcgataaaccgcgtccttgacggaaaggtacactatgacgcaatttttatggatcacatgatgcccgggatggacggcattcaaacaacgagaattatacgcgaggagatcaacagcgaatacgcgaaaaacgttcccattatagcgcttacagctaacgccctgctgggcaacgacgcgctgttccttgaaaacggcttccaggcttacctgtccaagcctattgatattatcaggctggatcaaattttaaatcaatgggtacgggataaaaagaaagaaaaagagctgaagggaagtctccaggacacaaaatcggaaagaccggttaaaaccggcgctcaaataaagaaatacctgattccaggagtcaataccgcggaagctcttgagcgctttgatgacgacgatgaggtctatttccaggtgcttaaatcttttgtcacctacaatccaaaacaacttgaaacgcttaaaacagcgggcgaagatcatgacgcgtaccgccttgccgcccacagcatgaagggttcaagtagaaacattggcgcggaagaactgggtaatcaggcggaaatgctggaaaaagcggccactcacgaggactgggactatataaacgccgtaaacgcggattttatcaaagccgctgaaaaacttattgcggatattaacgattttctgaaaattgttatgcctaatgatcccgagtcgaagaaaccggaaaagaaaaatccggatcccgaaatactggataaaatactggaagcctgtgaaaattatgacattgtcgccctgcgggaggcgatagacgccctggctgaattccgttacccgacttttccggatcttgcgcaatggacaaaagaacagtccaacaaatccaattttaccgtgatacaaaagagaatagcgtcgattcgatag

SEQ ID NO: 61066 - protein, 763 aa, Unknown
  Obtained from environmental sample
  DOMAIN (597)...(674): Hpt domain
  misc_feature (1)..(763): Xaa is any amino acid
MYLSNFLSPYKVWETGNIFVIDHEGVAVAVNQYDYRVQERHNYIDWGKRDPAYRKMGEVFQHIIENKEGIKQYPYNGSERYCAFDTVYGTDNWSVLISAPFSESPLTHIRQMLFICAAIIMGLGIIAALLAANSIAAPYEKMTELRTTAEAASASKTRFLANMSHEMRTPLNAIIGLSELELGSAKLQGESFTNVEKIYTAGMTLLGIINDLLDISKIESGKLLMIPVIYDVPSMINDTVNLNVVRIGSKPVQFRLYVDKALPSKLKGDELRIKQVFNNLLSNAFKYTDSGFVDWHISSVREGDQIKIVSTIRDTGIGIHKDDQEKLFKDYYQANLKANYYLEGTGLGLSITKNLVKLMNGSINFESEYRKGSSFTVEFYQDVVNDDVIGEEAAEHLSRFRFSAQRRSRNQRLLRADMSYATVLIVDDVVSNLDVARGMLKPYKIGVECVTSGKEAINRVLDGKVHYDAIFMDHMMPGMDGIQTTRIIREEINSEYAKNVPIIALTANALLGNDALFLENGFQAYLSKPIDIIRLDQILNQWVRDKKKEKELKGSLQDTKSERPVKTGAQIKKYLIPGVNTAEALERFDDDDEVYFQVLKSFVTYNPKQLETLKTAGEDHDAYRLAAHSMKGSSRNIGAEELGNQAEMLEKAATHEDWDYINAVNADFIKAAEKLIADINDFLKIVMPNDPESKKPEKKNPDPEILDKILEACENYDIVALREAIDALAEFRYPTFPDLAQWTKEQSNKSNFTVIQKRIASIR

SEQ ID NO: 61067 - DNA, 954 bp, Unknown
  Obtained from environmental sample
  misc_feature (1)..(954): n is a, c, g, or t
atgggcgtgttgccctgtgagcgaacttggtatacgaagaacgcagaaaacagcgccggcatccatgaggaaaagcctatgaaatccgcgcccaaggctctggtattgggaggccatacaggtcttctcgggcaagcccttatggatgcgcttagccgttccgcatggcaggccgtcccttttggacgcgaggacgggcagattctggatgtggattttctggcccgtaaaatcaagcgtatcgcgccggatgtcattttcaacaccattgcctggacgcaggtggatgaggcggaactgcacccctccgaggccatggccttgaatcggggttttgtttccagccttgcgcgcgtcatcaagggcgcctccatccgtctggtgcagtacagtacggattttgtgttcgacggcgccaaacagaccccatataccatcgaagacgcgccaaaccccgaatccgtctatggcgcgaccaagctggcgggtgaacaggctcttggcgtcctgccgccggagcaatactgcatcgtgcgtaccgcctggcttttcggcccggggcggaaaaatttcgtgtccaccatcctcgctgcctgccgcaagaacgacagcatcaaggtggtgcatgatcagacaggttcgcccacctatacccgcgatctcgcgcaatggagcctgaaattggcggagcttgaagccggaggcgtcttccacgccgtgaacggcggacaggccacttggtgcgatctggcctgtgaagcggtcagtctggcggaagccacgtgccgcgtggaacccatcagttccgcgcaatggccgcaaaaggccaagcggccgcccttctccgtgctggacgccggccgcctgacccaagtgacaggccttgtgccccgcccctggccgctggcgttgcgggaatacctgtacagcgaatacctgcctctacattcctga

SEQ ID NO: 61068 - protein, 317 aa, Unknown
  Obtained from environmental sample
  DOMAIN (33)...(243): NAD dependent epimerase/dehydratase family
  misc_feature (1)..(317): Xaa is any amino acid
MGVLPCERTWYTKNAENSAGIHEEKPMKSAPKALVLGGHTGLLGQALMDALSRSAWQAVPFGREDGQILDVDFLARKIKRIAPDVIFNTIAWTQVDEAELHPSEAMALNRGFVSSLARVIKGASIRLVQYSTDFVFDGAKQTPYTIEDAPNPESVYGATKLAGEQALGVLPPEQYCIVRTAWLFGPGRKNFVSTILAACRKNDSIKVVHDQTGSPTYTRDLAQWSLKLAELEAGGVFHAVNGGQATWCDLACEAVSLAEATCRVEPISSAQWPQKAKRPPFSVLDAGRLTQVTGLVPRPWPLALREYLYSEYLPLHS

SEQ ID NO: 61069 - DNA, 303 bp, Unknown
  Obtained from environmental sample
  misc_feature (1)..(303): n is a, c, g, or t
atggatcagatcggcacgagaagtggtgcacacgctgctggacatcctcggcaaagccggagcctgatccgtttcgtacaggacaggcccggacacgacaggcggtacgccatggattattccctggcggaacaagaactcgggtatgcgccgcactgggatttcccgtcgggccttgccgccacggcggaatggtacgcccaaaatgccgcgtggctggatggggtggaatccggcgcataccgcggttttatccaggcatggtatggagacaggctgaaggatgggcgtgttgccctgtga

SEQ ID NO: 61070 - protein, 100 aa, Unknown
  Obtained from environmental sample
  misc_feature (1)..(100): Xaa is any amino acid
MDQIGTRSGAHAAGHPRQSRSLIRFVQDRPGHDRRYAMDYSLAEQELGYAPHWDFPSGLAATAEWYAQNAAWLDGVESGAYRGFIQAWYGDRLKDGRVAL

SEQ ID NO: 61071 - DNA, 1344 bp, Unknown
  Obtained from environmental sample
  misc_feature (1)..(1344): n is a, c, g, or t
atggggtttccctggaacgagatcacccagttgccggaattaaaaacccttaccgtagatttctacagaaatatccccctgccggaagcaataggaaacctaaaaaaactggaaacattgataatttccttaaaatacaaagacgttgattccaagcccttgcccaaatccttatcggggcacggcgcgttaaaaaatgtcagcatcacttcattctttaacaaagaaaagagccatgcccttatcgatacggcggatctgcttgttacatgccccaaattggaatctcttattttgtccggccttaaacttgactgcaaaaagggcgccctttataaacttacaggcttaaaacaacttgagttacggcatttgcacgtaaacggaaacatatttgagaaaattactacccttaccaaacttgaaaagctggtaatcctgggaagcgaattcaacgcggcatcgatacctgatatttttaacagcatgcctgaactgcgtatatttactttttccggcagttatgtacgcgctcttccgccttcgctctacactttgaaaaatttgacagaaattgaaattgacagcgccggcattaccacgataagcgaaaaaataggcgacttgaaaaacttaagaaaatttcattttcaggacaacgctctggaagctttgcccgacgccctttttaccctgccaaacctcgcgattttgaatatcgaagacaaccttatcgtccaaaaagaactgataaaaataaatgaaaaactaatcaatctttcaaagaacgggcaaaaggtagagttcttttacaaggggcagggatttaaccataaaataaaacgtcttcgttcttttttaggctcgacaaaagtggatgtagaaacttattacaaatactgcatagaagccgtaaacgaagatcctcacgccattcaatatgtagataaagcaaaattagataacaaccagcattactacgcggctatttgcggcgcggctgtgtacaaaaactgttttgccctggaatatataaatatagacgcgcttggccgctcgacatatttcagcgtctgcatgcaggcggcaaaaagctccaacataggttatgtttttaaattcatcaaagacgatctgttagacgaaaaagaatacatcaaagtatgcatagaagccgcgcttcacaacgacgcggcgaatttccttacaaaaataaacgcgaaacgcttcagccgcgaagactacgaacgcatctgctgggtatccgtactccacaaccccgccacaatcgcgttcatggacaatccttcggatgagcttttaaagttagcgaagaagaaataa

SEQ ID NO: 61072 - protein, 447 aa, Unknown
  Obtained from environmental sample
  misc_feature (1)..(447): Xaa is any amino acid
MGFPWNEITQLPELKTLTVDFYRNIPLPEAIGNLKKLETLIISLKYKDVDSKPLPKSLSGHGALKNVSITSFFNKEKSHALIDTADLLVTCPKLESLILSGLKLDCKKGALYKLTGLKQLELRHLHVNGNIFEKITTLTKLEKLVILGSEFNAASIPDIFNSMPELRIFTFSGSYVRALPPSLYTLKNLTEIEIDSAGITTISEKIGDLKNLRKFHFQDNALEALPDALFTLPNLAILNIEDNLIVQKELIKINEKLINLSKNGQKVEFFYKGQGFNHKIKRLRSFLGSTKVDVETYYKYCIEAVNEDPHAIQYVDKAKLDNNQHYYAAICGAAVYKNCFALEYINIDALGRSTYFSVCMQAAKSSNIGYVFKFIKDDLLDEKEYIKVCIEAALHNDAANFLTKINAKRFSREDYERICWVSVLHNPATIAFMDNPSDELLKLAKKK

SEQ ID NO: 61073 - DNA, 1353 bp, Unknown
  Obtained from environmental sample
  misc_feature (1)..(1353): n is a, c, g, or t
gtgttcgtgtggttcgtggtaaaaaaaagaaaattaataaatgttacaaagcatcaaaaccatcttgaaattccctgcattttcatatattctaaccccatgaataataaccctgttgcggcgtatcttgccgcggtttcgcctgataaaattaatacgagtttgttggcttacctttgtaatttgactgaggttgccaaagttataccggatattgcttcctctatcgtgaaggaattggaaaatcagcggaagagggtgaagcttattgcaagcgagaattactgctctgtcgcggtgcagttggctatggggaaccttttgaccgacaaatacgcggagggcgtgccttaccacaggttttacgcgggaaacgaaaatgtggacgctatcgaagccctcgcggcgcaggagagcttgcaattgttcggggcggaatacgccaatgtgcagccgcactgcggagcggacgcaaatctgctggcgtactgggctattctcagcacacgaatcgaaagtcctgcgctggaaaaatggggcgaaaccaatctgtacaaacttgacgatgcccaatggaaggagctaagggcttctctggggaaccagcgccttttagggctggattactattcgggcggacacctaacgcacggttaccgtaataatctttcgggacgaatgtttgacatacacagttattccgtttccgaaaaagacggtctcttagattacgatcaaattgaaaggcaggcttgtgaagtgcgtcctcttattctgcttacgggttattcggcgtacccaagaaaaatcaactttaagcggatgagggaaattgcggacaaggtcggcgctgtatttatggttgatatggcgcactttgccggtcttgtggcgggaaaagtttttacaggtgagtacgaccctgtaccttgggcgcatattgtaaccagcaccactcataagaccctgcgtgggccccgctcgggaattgttctctccaaaagcgaatttgccgaagctttagacaagggctgtccccttacaatgggcggtccgctgccccatgtgatagcggcaaaagcaatctctttccgcgaagcggcttcccccgaatttaaacagtacgcacaaaaaattgtaaataactgtcaggcgcttgccgcttcctgtattaagaacggacttgaagtgctgacaggcggaacagacaatcatttattactgatcaatattcacaaagccaatcttaccggcaggcaggcggaaagcgcattgcaggaatgcaacataactgttaacccgcacagccttnccccgcgatcaaacggntccgtggtacacatcgggggttag

SEQ ID NO: 61074 - protein, 450 aa, Unknown
  Obtained from environmental sample
  DOMAIN (65)...(449): Serine hydroxymethyltransferase
  misc_feature (1)..(450): Xaa is any amino acid
MFVWFVVKKRKLINVTKHQNHLEIPCIFIYSNPMNNNPVAAYLAAVSPDKINTSLLAYLCNLTEVAKVIPDIASSIVKELENQRKRVKLIASENYCSVAVQLAMGNLLTDKYAEGVPYHRFYAGNENVDAIEALAAQESLQLFGAEYANVQPHCGADANLLAYWAILSTRIESPALEKWGETNLYKLDDAQWKELRASLGNQRLLGLDYYSGGHLTHGYRNNLSGRMFDIHSYSVSEKDGLLDYDQIERQACEVRPLILLTGYSAYPRKINFKRMREIADKVGAVFMVDMAHFAGLVAGKVFTGEYDPVPWAHIVTSTTHKTLRGPRSGIVLSKSEFAEALDKGCPLTMGGPLPHVIAAKAISFREAASPEFKQYAQKIVNNCQALAASCIKNGLEVLTGGTDNHLLLINIHKANLTGRQAESALQECNITVNPHSLXPRSNGSVVHIGG

SEQ ID NO: 61075 - DNA, 504 bp, Unknown
  Obtained from environmental sample
  misc_feature (1)..(504): n is a, c, g, or t
ttggtcttcgacgggcgcgattccgccgatgcacgcctctcggctctggtgaatgatctgaggaaggaactccccgaatcgcatgggctgaggttcaacctgcctgacccactgaaaggggcggcgtgcaaacgctggaggatgttcctgcgctggatggcaaggaaggggtggcctgacttcggcgtttgggaaaactaccccgcttcgtgcctggttgtcccgttggacacgcacgtccaccgcatctccatgcggataggcctctgccaaaggcgggccgcggacgcaaaggcggcgcacgaaatcacggccgcgcttagggaactggaccccgaagaccccctgaaatacgactttgcccttgcccacctgggcatactgggcgactgcacaggcaaaagacggcacgagtgcaaggaatgcccgctggaggctctctgcttggcaaccagtggagccacttgcaaaaccggcaggttttgcaagttaccggaggtatag

SEQ ID NO: 61076 - protein, 167 aa, Unknown
  Obtained from environmental sample
  misc_feature (1)..(167): Xaa is any amino acid
MVFDGRDSADARLSALVNDLRKELPESHGLRFNLPDPLKGAACKRWRMFLRWMARKGWPDFGVWENYPASCLVVPLDTHVHRISMRIGLCQRRAADAKAAHEITAALRELDPEDPLKYDFALAHLGILGDCTGKRRHECKECPLEALCLATSGATCKTGRFCKLPEV

SEQ ID NO: 61077 - DNA, 795 bp, Unknown
  Obtained from environmental sample
  misc_feature (1)..(795): n is a, c, g, or t
gtgcacatgggcacggccggcgccgcatgggccaccgtggcggggcagaccgcctcgtttgcgtacggcgtccactactttttgtccaaggagaccgcgctctcgataaagccaaaggacttcaggccgaacaggagaatggtgtcccaggtgctgtccataggcgtccccgccgggataaccgccatgatcatgagcgtatccaacatcctaacaaaccgcgtctcggcaagctacggcgaccacgtggtggcgggcttcggcgtgcagatgagggtggccagcgtgttcttcatgctggtgttcgcgctcgcgatgggctaccagccgtttgccgggtacaactacggcgcgaagaggtacgaccgcctgcggaagggcttcaaactcacgatcctgtactcgacggcgctgtgcgtcgcgggcagcgtcatcctcgccctgttcggggagacattcatcggtttctttgtcagcgacgtgaagaccatccaggcggggacagccattctgcacccctttttgtgggcgctgccctgcgtcggcgcccaggtgacactgatggtttcctttcaggcattcggcaagcctgtgcggtcgatggtggtcacgatggggcggcaactgctgttttttgtcccgctgctctacatcctgaaccacttcttcggcttcggcggcttcgtttgggcgcagcccgccgccgaaatcctgaacaccgtaatagccgccctgctggggctctccctggaaaaacacatgtccagacgggcggcgttctttcaccagacgtaa

SEQ ID NO: 61078 - protein, 264 aa, Unknown
  Obtained from environmental sample
  SIGNAL (1)...(21)
  DOMAIN (57)...(218): MatE
  misc_feature (1)..(264): Xaa is any amino acid
MHMGTAGAAWATVAGQTASFAYGVHYFLSKETALSIKPKDFRPNRRMVSQVLSIGVPAGITAMIMSVSNILTNRVSASYGDHVVAGFGVQMRVASVFFMLVFALAMGYQPFAGYNYGAKRYDRLRKGFKLTILYSTALCVAGSVILALFGETFIGFFVSDVKTIQAGTAILHPFLWALPCVGAQVTLMVSFQAFGKPVRSMVVTMGRQLLFFVPLLYILNHFFGFGGFVWAQPAAEILNTVIAALLGLSLEKHMSRRAAFFHQT

SEQ ID NO: 61079 - DNA, 1524 bp, Unknown
  Obtained from environmental sample
  misc_feature (1)..(1524): n is a, c, g, or t
ttgtcatctatgttgcaagcggtggaattgatccgcagtagggacttaggcggttctgaatttggcagaacaatggccggtatcaatacgatactgataaagttgatttatcccgattcgcttgcgagactccccgttgtcgatcttccgcagacgtcaaattatgcccgtattatcagggaggccgagaaaggcgtttatgtccagcccgctcagagctcgactgatttttttgagcatattctgccctttttggccgtgaatgatcagacggaatcgggagttcttgcgagtattctaaatgatcttgggaaagcgcaaacgctaaaacccaattccgttcttccgcttctgtttcaggggtttatttacgagcgcacgcaacggttcagccaggctgaacaatctttcaggcaagtctatcaaatttccaacgaatgttacccggcaaggataggcatagcccgcataagaagaatttctggctctccgcaggaagcgatagatattttatctgatcttatcatccgttatccggacagcattcaaattaaaaaggaacgcgccatcagttattacagaaatcatgatttgtcgcgggcgctgtccgccgtggacgagattctgcaggcggatccaagagacggagaatgcatattgattaaagcttctatccttcttgagcaggggcagtattcgcagtcaaacacttcattggacagttacgcctccattaacccaaacaacagaacatatctctttttacgtgcgcgtgtacaggccgaaggaaaccgcaaccgcgattcggcgttaaactaccttcgctcaattttgcgtacttcccccgatgatacggaagtccttgtttatgccgcaggtttgctgatggagtcccagcgcccggcggatcaaagcgagggtagggaaatgcttgagcgcctcaggcggacaaacggctcttccgtggaagtgctgagcctaagtctgagggacgcggtacaacgcgaacagtggcaggaggcgcaggggtatttgaaccggattcttgcagtccgcagaacggttcaggatttaacggacgcgtataatgttgaacgggggctgggaaataacgcaagggcacttacctatgcccgtgaattgttcgagcgcgataattccaatcatgattatgcggcgatttatatttccgccttgattaattcaggcagaagggaagaagcgagccgtttgttggaaagccgtattaattccgctggcacaagtcaaattaagagccgttactattatctgcgaagccgtttacagtcaaatcaagacaacgcccttggcgatttgcgctccagtctttttgaagaccccagaaatctggacgccattatcgccatgttccaaatttaccacgaccgccgcgaagaacgccgcgccgtctactacctaaaacaagggcttgccatatctcccgatcatcctgttttaaaacgctacgagaaagagtacgcttcactgttaggtaggaattag

SEQ ID NO: 61080 - protein, 507 aa, Unknown
  Obtained from environmental sample
  misc_feature (1)..(507): Xaa is any amino acid
MSSMLQAVELIRSRDLGGSEFGRTMAGINTILIKLIYPDSLARLPVVDLPQTSNYARIIREAEKGVYVQPAQSSTDFFEHILPFLAVNDQTESGVLASILNDLGKAQTLKPNSVLPLLFQGFIYERTQRFSQAEQSFRQVYQISNECYPARIGIARIRRISGSPQEAIDILSDLIIRYPDSIQIKKERAISYYRNHDLSRALSAVDEILQADPRDGECILIKASILLEQGQYSQSNTSLDSYASINPNNRTYLFLRARVQAEGNRNRDSALNYLRSILRTSPDDTEVLVYAAGLLMESQRPADQSEGREMLERLRRTNGSSVEVLSLSLRDAVQREQWQEAQGYLNRILAVRRTVQDLTDAYNVERGLGNNARALTYARELFERDNSNHDYAAIYISALINSGRREEASRLLESRINSAGTSQIKSRYYYLRSRLQSNQDNALGDLRSSLFEDPRNLDAIIAMFQIYHDRREERRAVYYLKQGLAISPDHPVLKRYEKEYASLLGRN

SEQ ID NO: 61081 - DNA, 954 bp, Unknown
  Obtained from environmental sample
  misc_feature (1)..(954): n is a, c, g, or t
ttgggaattaacatgaactttgccccgacaattgaccttttcaccaaccgcgattcatggctgataagtacgcgggcatttggaagcgatcctgtgaaagtggggatcttcggcgcggcgtatatgaggggccagcaggccgccgggattatccccacggcaaaacatttccccggccatggcgatacgcagcttgattcgcacggcgttctgcccagtatcaatgtcacttttgatacgctctgggacagggaactggtgccgtatcggatgcttgtaaaagaaggggtacccgcggtaatgagcggccaccttgcctttccaaaaatcgaagcaaacggcgttccggcctcgctctcctcatggttcctgaaaggcgtgctccgtgaaaagataggctacaggggccttataatcaccgatgatttgatgatgaacggggctacgctttgggcgggcagcgtttccagggcggcgaaacaggccctgctcgccggaaatgatataatacttttttcaaaaacacccgccctttttgatcccgtgtggaatttattatcaagctccatgaaagatgataatgcattccgccttcgtgtcagggagtccgcaaggcgcaccctggaggcaaaacttcgttatcttaaggggagcaaggctgttccttttgttcctgatataaagaaggccgagaacggcctgcctgatcctgaaggcagcgcattttttctggagcttgcggctcgcagtgttaccattgtgagaccagaagggcagcgggcttctgtttttcccttaaagcctgagaatgccgggagagtcctgctgaccggccagtatcttgatttttttaggtgggcagggccgctttcccgggcgcgatttcttattggtactctgaagtcttcaatgcaaacgaactgctcaattttgccagaactgtcgatacggtaa

SEQ ID NO: 61082 - protein, 317 aa, Unknown
  Obtained from environmental sample
  DOMAIN (1)...(172): Glycosyl hydrolase family 3 N terminal domain
  misc_feature (1)..(317): Xaa is any amino acid
MGINMNFAPTIDLFTNRDSWLISTRAFGSDPVKVGIFGAAYMRGQQAAGIIPTAKHFPGHGDTQLDSHGVLPSINVTFDTLWDRELVPYRMLVKEGVPAVMSGHLAFPKIEANGVPASLSSWFLKGVLREKIGYRGLIITDDLMMNGATLWAGSVSRAAKQALLAGNDIILFSKTPALFDPVWNLLSSSMKDDNAFRLRVRESARRTLEAKLRYLKGSKAVPFVPDIKKAENGLPDPEGSAFFLELAARSVTIVRPEGQRASVFPLKPENAGRVLLTGQYLDFFRWAGPLSRARFLIGTLKSSMQTNCSILPELSIR

SEQ ID NO: 61083 - DNA, 324 bp, Unknown
  Obtained from environmental sample
  misc_feature (1)..(324): n is a, c, g, or t
gtgggcagggccgctttcccgggcgcgatttcttattggtactctgaagtcttcaatgcaaacgaactgctcaattttgccagaactgtcgatacggtaattttctgcctttccgataccgaaggtctaaaaatactgaagaggcttgagctgttgaaaaagaggataattgtgctgtcggtgctgaaccccgtctaccttgaaaccattccctggatagacggagctgtggcggtgtacagcgactctttcgaatcgcttgcggcgggcttttcggctatcgttggaagaatccccgccgaaggaaagctgccttatgactga

SEQ ID NO: 61084 - protein, 107 aa, Unknown
  Obtained from environmental sample
  misc_feature (1)..(107): Xaa is any amino acid
MGRAAFPGAISYWYSEVFNANELLNFARTVDTVIFCLSDTEGLKILKRLELLKKRIIVLSVLNPVYLETIPWIDGAVAVYSDSFESLAAGFSAIVGRIPAEGKLPYD

SEQ ID NO: 61085 - DNA, 918 bp, Unknown
  Obtained from environmental sample
  misc_feature (1)..(918): n is a, c, g, or t
ttgcggcgggcttttcggctatcgttggaagaatccccgccgaaggaaagctgccttatgactgatccgcttttcccgcggcagggttggcggaaaataaaaaaatcgcagatcagcggcgcggaagaattgctgcgggccaatgaacgctggtgcatgaacgcctgcggccggttcttaaaaggcggctccgccgtatggatgcttggccggggtattcctccttcggcgcttgttatacattccaaacagactttgctgcctgtgttatgcgatcaggaaacggttcctcctccgcgttttctccgtggtatattgggcggaaaggttttcctccattcattgcaggggcgcaaagatgacgtgttggtcatggagaaagccctggaagaaatgaggctgtatgcctcggaaaaaaaagattacgatattatgtgcattgactgtcctccgttatcctgtcattcggccgctcccgtgaacctggttatacgcaagcccgcgccggaagacatgaacgcgcttgccgcgctacacgccgcctacgaacaggaagaagttctacccgccgcgtcggaattccgccccgccgccagccgcctgaacattgagcgtatttttgcggaggagcagatgcttgtagccgaacttggcggctgtctggtagggaagatcaataccaatgccgttacttttacgcgctatcagattggaggcgtgtatgttcatcccgactaccgtggaattgggatagctggtagaatgacatttgaatttgtggacagtcttgcggcccagggcaggagcatatccctgtttgttaaaaaaacaaataccgccgcccgcagggtttatcagcgtataggctttgaaataaccggcgattaccggatcgactacttttcaaataataattaa

SEQ ID NO: 61086 - protein, 305 aa, Unknown
  Obtained from environmental sample
  DOMAIN (216)...(298): FR47-like protein
  misc_feature (1)..(305): Xaa is any amino acid
MRRAFRLSLEESPPKESCLMTDPLFPRQGWRKIKKSQISGAEELLRANERWCMNACGRFLKGGSAVWMLGRGIPPSALVIHSKQTLLPVLCDQETVPPPRFLRGILGGKVFLHSLQGRKDDVLVMEKALEEMRLYASEKKDYDIMCIDCPPLSCHSAAPVNLVIRKPAPEDMNALAALHAAYEQEEVLPAASEFRPAASRLNIERIFAEEQMLVAELGGCLVGKINTNAVTFTRYQIGGVYVHPDYRGIGIAGRMTFEFVDSLAAQGRSISLFVKKTNTAARRVYQRIGFEITGDYRIDYFSNNN

SEQ ID NO: 61087 - DNA, 1299 bp, Unknown
  Obtained from environmental sample
  misc_feature (1)..(1299): n is a, c, g, or t
gtgagcagcggacaaaaccaaatagcaaatagcaatatgcgcctcatacttgtctttataatttcatcattattgttcttatttgcctgttcagaaaaaagagataaaacccctgacttggaattgacggaaactaaagccatagagcctgataataatatagaagcaattgcgcgggaacgcgccgtacgtattgcgtcggttctggatgacaggcagcttgccgcgcaggtaattattaccggtattgacggtaaagggagtttatcccgtgacatgaagattttactcacggaatgtcctgcaggcggcataatgctgttcaggtacaaccttgacacggataacagcgcgatacaaagactgatcgccgaaagctccgcgcttattgcggagggaaataccgttaaactgccttctgacgccgaagaattcattacaattcccccgtttgtagttgtggatcatgaaggcgggcatgtgaaccgcttcctgccgggggcagcggatctgcccgacgcgaatttctattgggagacagcccaaagcgaaggtaggggtatcgcgattttacacatactgacagacagttttaacacggggaaaaaactccgcgggcttggcgttaattttaatttagcgcctgtcgctgaattcttaaatgaagacaacttaaaatttcttaagtggcgttcttatggcccggatcctggatttaccgttgaggccgccagggcctttatcattggcatgggactcgcaggcgttacttgcgccataaaacactttcccggaagcgccggcgcggaccctcactatttccccggtaaactgaacggtgacaaggaggctctaggagaacttgtctacccctttgccgctctcattaaggataacaggacaagggcaatcatggtttcccattcggctgttcctgcctgggacgcggaaaatattgccagtctttcgccggcggtaatgggcgaatggcttcggcaggaactgggctttatgggactgattatcagcgacgacttttccatgggcgcggcaacagccgcaggctccgaccgcatgagaccggaagacgcggcagtccaatccctgattgccggcgcggacattgtgctggtatggcctccggatctgcggcgcacccaccgggcgattcaggcggccctttccgacggcaggctttcccgccaacggctggaggagtcggtggggcgtgtcatttttgagaaaatgggactggggatgatacaagaacaattaggaatgaggaataaaagagaatga

SEQ ID NO: 61088 - protein, 432 aa, Unknown
  Obtained from environmental sample
  DOMAIN (147)...(378): Glycosyl hydrolase family 3 N terminal domain
  misc_feature (1)..(432): Xaa is any amino acid
MSSGQNQIANSNMRLILVFIISSLLFLFACSEKRDKTPDLELTETKAIEPDNNIEAIARERAVRIASVLDDRQLAAQVIITGIDGKGSLSRDMKILLTECPAGGIMLFRYNLDTDNSAIQRLIAESSALIAEGNTVKLPSDAEEFITIPPFVVVDHEGGHVNRFLPGAADLPDANFYWETAQSEGRGIAILHILTDSFNTGKKLRGLGVNFNLAPVAEFLNEDNLKFLKWRSYGPDPGFTVEAARAFIIGMGLAGVTCAIKHFPGSAGADPHYFPGKLNGDKEALGELVYPFAALIKDNRTRAIMVSHSAVPAWDAENIASLSPAVMGEWLRQELGFMGLIISDDFSMGAATAAGSDRMRPEDAAVQSLIAGADIVLVWPPDLRRTHRAIQAALSDGRLSRQRLEESVGRVIFEKMGLGMIQEQLGMRNKRE

SEQ ID NO: 61089 - DNA, 447 bp, Unknown
  Obtained from environmental sample
  misc_feature (1)..(447): n is a, c, g, or t
atgaatttgaaaacagttttaagcaaagaaacgatatgccttcatatgaagggaaccacaaaagaagaaattattaacgaactgcttgacatccttgtagccgcaaaaaaaatcagtgaccgttctgcggcactggccgcaattatggatcgggaacagaaaatgtccacaggcatgaaacacggcatcgccataccgcacgggaaaagccccacgataaacgacctggtagcctgtataggagtctcagacggagcggttgaattcgatgccctggatcatgaaccctgcaatatcttcattatgacactttcgcccgttgaaaaaacggggccccatctccagtttctggcggaaatcagccttcttttcaaaagcgcggagaaacgccaggaaatcctgaacgcttccacgccggaagaaatcctgaaaatactgtctgaataa

SEQ ID NO: 61090 - protein, 148 aa, Unknown
  Obtained from environmental sample
  DOMAIN (5)...(148): Phosphoenolpyruvate-dependent sugar phosphotransferase system, EIIA 2
  misc_feature (1)..(148): Xaa is any amino acid
MNLKTVLSKETICLHMKGTTKEEIINELLDILVAAKKISDRSAALAAIMDREQKMSTGMKHGIAIPHGKSPTINDLVACIGVSDGAVEFDALDHEPCNIFIMTLSPVEKTGPHLQFLAEISLLFKSAEKRQEILNASTPEEILKILSE

SEQ ID NO: 61091 - DNA, 714 bp, Unknown
  Obtained from environmental sample
  misc_feature (1)..(714): n is a, c, g, or t
atgcaaataaaaggaaatctgattcttgatgatgaaggcagaacccttattttgcgcggagcaaatctgggaggagattccaaaataccgttttgcaaaacgggagatgaaatttatccttcgttccttgacagaaaaatgcctgtttcttttacaggaagaccgttccccctagaagaagcggagagtcattttaaacggtttaaaaaaggcggactgactttcctccggttgattgttacttgggaagcaattgaacatgagggacccggaatttacgatgaagcgtatttggcatacctcaggaaaattcttctggcagccgaaaacgaaaacatcagcgtctttatcgatcctcatcaggatgtttggagcagatggtcaggcggagacggcgctcccgcatggacaatggaaaaacttggcatggatacggacatgttcgacagaagcggcgccgctgttacaagacagcgttatggtctttgccataacaatgctaaatacccgaaaatgctctggccgagcaattacaaccgttatgcggcagcgaccatgttcagtttattttttgcaggtaatgcttacgccccggatttaaaaatagaaaatgaaaagacacaggattggctgcaaaaccgttacatcgcagctttccgccatgcgcagcgccgcctaaaaaattgcaccgccattaaaggctgggcgcaataa

SEQ ID NO: 61092 - protein, 237 aa, Unknown
  Obtained from environmental sample
  misc_feature (1)..(237): Xaa is any amino acid
MQIKGNLILDDEGRTLILRGANLGGDSKIPFCKTGDEIYPSFLDRKMPVSFTGRPFPLEEAESHFKRFKKGGLTFLRLIVTWEAIEHEGPGIYDEAYLAYLRKILLAAENENISVFIDPHQDVWSRWSGGDGAPAWTMEKLGMDTDMFDRSGAAVTRQRYGLCHNNAKYPKMLWPSNYNRYAAATMFSLFFAGNAYAPDLKIENEKTQDWLQNRYIAAFRHAQRRLKNCTAIKGWAQ

SEQ ID NO: 61093 - DNA, 1329 bp, Unknown
  Obtained from environmental sample
  misc_feature (1)..(1329): n is a, c, g, or t
atggtagacccaatacgtgaagcgcaacggcttgtatcaacaatccccaaagatacaggatttattgtttttctgggtcttggcggcggatttgccgctgaggcggcgttagaagatactaatgcgcagataattgtcgtagactttcataaggacagtatagcagagcttctttcctctatagattattcggcgcttattaacaatgagcgtttccgtcttttaacagatccttcctgcggagaaataaaaaaaacaatactggaaaattatcatccctccctttgcgggagcataaaaaccattccgttacgcccaagaattgaacaggacatcgaactttttgaaaatgcctcagcggcaatacaggaagctatcgggattgtttcgtctgattattcggttcaggcgcatttcggcatacgctggttttccaatattgtccgtaatataaaaaacgccgatttaataacagaaaactttagtaaaaaactatttacctctcctgtaccggaggcagcaattgttgcggcaggaccttcccttgatcagcagcttcacttgcttgccgaacttaaacgcaagggagttttcattatcagcacagacacagcccttcctgtccttttacagaacggcataatgcctgatacagtcgtatcaatagactgccagcatataagttattatcattttattggctgtaacttaaaaacaggtatcccgcttgtccttgacatcgcaagccctccgctgctatcaagtttttcatcttcacccgtgtttttttcaggaggtcatccgcttgcacagtacgtatccgccgcatggcatccgcttcccctgctggatacatcgggcggtaatgtaacgtatacctgcctgtcgcttgcggaacatttgggcgcggagcacataacgctgttcggcgcggacttttcctatgtagaatcaaaaacctacgcaaggggaacgtacatctatccgttttttgaaaaaaaacaaaaccgtttttctcctgcgcagtctttattttccgcatttttgtatagaagtcccttccttccaaaagaaaaccttggacaaaactaccatgaaactgcgtctcttaggcaataccgtaaaaaatttgaagaaaaagccgcgatgatgaatgcgcaaattaccgccgtaagcgggcagggcgcgccgatagatttttcacgaaaaataccgggatacggtaaaaatccggaaacaattacagcagttaccgggtatcaaaaaaaaagcgggcgtgaaattttttggaacaatacaaagaagaacattgcccgcgctgccctgtaa

SEQ ID NO: 61094 - protein, 442 aa, Unknown
  Obtained from environmental sample
  DOMAIN (146)...(313): Protein of unknown function DUF115
  misc_feature (1)..(442): Xaa is any amino acid
MVDPIREAQRLVSTIPKDTGFIVFLGLGGGFAAEAALEDTNAQIIVVDFHKDSIAELLSSIDYSALINNERFRLLTDPSCGEIKKTILENYHPSLCGSIKTIPLRPRIEQDIELFENASAAIQEAIGIVSSDYSVQAHFGIRWFSNIVRNIKNADLITENFSKKLFTSPVPEAAIVAAGPSLDQQLHLLAELKRKGVFIISTDTALPVLLQNGIMPDTVVSIDCQHISYYHFIGCNLKTGIPLVLDIASPPLLSSFSSSPVFFSGGHPLAQYVSAAWHPLPLLDTSGGNVTYTCLSLAEHLGAEHITLFGADFSYVESKTYARGTYIYPFFEKKQNRFSPAQSLFSAFLYRSPFLPKENLGQNYHETASLRQYRKKFEEKAAMMNAQITAVSGQGAPIDFSRKIPGYGKNPETITAVTGYQKKSGREIFWNNTKKNIARAAL

SEQ ID NO: 61095 - DNA, 666 bp, Unknown
  Obtained from environmental sample
  misc_feature (1)..(666): n is a, c, g, or t
ttgtggcgggttcgttctgggaaggaggtgcgactttgttctttcaacttttacgcgcaccctgttgccgatagcgtccgcgtctttggatacttcgattgtttcggtctttcgcacttcaagcctgagcgacgaataaaatttcaacgcgtttccgcctgttgtcgtttcggggtttccgaagaagacgcctatcttcatacggatctggttgatgaaaatcaaaattgtgcgcgatttgccgattgttgcggtaagtttacgcagagcctggctcataaggcgcgcctgcgctcccatttgagcgtcgcccatttcgccttcaatttccgattgcggggtaagagctgcgaccgaatccacgacgattacgtctaccgcgccggagcggacaaggctttcggtgatttccatcgcctgctctccgttatccggctgggaaacccaaaggtcgtcgatgtttacgcccaggtttttcgcgtatacggggtcaagggcgtgttcggcgtcaatgaacgccgcgcttccgccgagtttttgggcttcggcgattgcgtgcagggccagggtcgtctttcccgaagactcaggcccgaaaatttcgatgatgcgcccgcgcggatagccgcctattccgagcgcttcatccagcaaaatagagcctga

SEQ ID NO: 61096 - protein, 221 aa, Unknown
  Obtained from environmental sample
  misc_feature (1)..(221): Xaa is any amino acid
MWRVRSGKEVRLCSFNFYAHPVADSVRVFGYFDCFGLSHFKPERRIKFQRVSACCRFGVSEEDAYLHTDLVDENQNCARFADCCGKFTQSLAHKARLRSHLSVAHFAFNFRLRGKSCDRIHDDYVYRAGADKAFGDFHRLLSVIRLGNPKVVDVYAQVFRVYGVKGVFGVNERRASAEFLGFGDCVQGQGRLSRRLRPENFDDAPARIAAYSERFIQQNRA

SEQ ID NO: 61097 - DNA, 1083 bp, Unknown
  Obtained from environmental sample
  misc_feature (1)..(1083): n is a, c, g, or t
atgaatgaatttattgtctgttcgacccgctccacgcgcaattacgcttcaaatgtaatttcctgtctttcacaatatttgagttttaataaaatcgccgaacagattaacggggttgacttgcttaataccgaccgttttgcggacggcgagacggaagttaccgtaaattcatcaatacgcggcaaggatgttatcattttttcttcaagcgcccgtaacgaggcgggaatatgcgtagatgaggcaaaaaatgagttgtaccacgctgtcgacgccttaaaacgcgcccaagcgcataaaattattgtttttgaaccttatatttcctgctcgcgctccgaccgcacaacccgcagaagttctgtaggtttgtgggtgcacttgaagacgctctccggccttggcgcgaagcatattgttacattccagcttcattcggataaatcgcaaactatggttgatcccgcagtcagcgccatagacaatattcccgccctgactttgctggaaaaatatctttgcgacacttacataaaaacaaaagaaaaactggaaaacgatgttcagaataattgggcgttttgttcggcggacgcgggcggggaaaaactggcgcgtactttcgccaattctttcggcgctcatttagtggtagcccataaacagcgtaattattcaaaggcaaacacggttgagtccgttcacattctttcagccgagcctgtggaaggcaagagcctttggataatagacgatatgatagacacgggcggctccgtagaaacccttatccgcgctcttgcgccgttaaaaccaaaagatatcaacgtaatcgcggtacacccgattttttctccccccgcctcacagcggctaacgtccctttcactagacggtcttctgaaccatataattgtggcggacaccgtttcatgctccgaatcctttataaaaagcattcccaatcttgaggttgtctcttcctcggagctttcagcaaaaattattaaatcaattgtcaacaatgaatcaatgagcaaacttctgcgcgccttcagcgcgggaatatatttaaaataa

SEQ ID NO: 61098 - protein, 360 aa, Unknown
  Obtained from environmental sample
  DOMAIN (165)...(303): Phosphoribosyl transferase domain
  misc_feature (1)..(360): Xaa is any amino acid
MNEFIVCSTRSTRNYASNVISCLSQYLSFNKIAEQINGVDLLNTDRFADGETEVTVNSSIRGKDVIIFSSSARNEAGICVDEAKNELYHAVDALKRAQAHKIIVFEPYISCSRSDRTTRRSSVGLWVHLKTLSGLGAKHIVTFQLHSDKSQTMVDPAVSAIDNIPALTLLEKYLCDTYIKTKEKLENDVQNNWAFCSADAGGEKLARTFANSFGAHLVVAHKQRNYSKANTVESVHILSAEPVEGKSLWIIDDMIDTGGSVETLIRALAPLKPKDINVIAVHPIFSPPASQRLTSLSLDGLLNHIIVADTVSCSESFIKSIPNLEVVSSSELSAKIIKSIVNNESMSKLLRAFSAGIYLK

SEQ ID NO: 61099 - DNA, 654 bp, Unknown
  Obtained from environmental sample
  misc_feature (1)..(654): n is a, c, g, or t
gtgatgaaaaaacctgtcgtgatcggattggcggtagtggtacttgccgccgtggttgccggaggctactggtggtatcaaagccgccaggataacggcctgacgctgtatggcaacgtggatattcgtacggtaaatcttagtttccgtgttggggggcgcgttgaatcgctggcggtggacgaaggtgatgctatcaaagcgggccaggtgctgggcgaactggatcacaagccgtatgagattgccctgatgcaggcgaaagcgggtgtttcggtggcacaggcgcagtatgacctgatgcttgccgggtatcgcaatgaagaaatcgctcaggccgccgcagcggtgaaacaggcgcaagccgcctatgactatgcgcagaacttctataaccgccagcaagggttgtggaaaagccgcactatttcggcaaatgacctggaaaatgcccgctcctcgcgcgaccaggcgcaggcaacgctgaaatcagcacaggataaattgcgtcagtaccgttccggtaaccgtgaacaggacatcgctcaggcgaaagccaagcctcgaacaggcgcaggcgcaactggcgcaggcggagttgaatttacaggactcaacgttgataacccccgtctggatggcaacgctggttaa

SEQ ID NO: 61100 - protein, 217 aa, Unknown
  Obtained from environmental sample
  SIGNAL (1)...(20)
  misc_feature (1)..(217): Xaa is any amino acid
MMKKPVVIGLAVVVLAAVVAGGYWWYQSRQDNGLTLYGNVDIRTVNLSFRVGGRVESLAVDEGDAIKAGQVLGELDHKPYEIALMQAKAGVSVAQAQYDLMLAGYRNEEIAQAAAAVKQAQAAYDYAQNFYNRQQGLWKSRTISANDLENARSSRDQAQATLKSAQDKLRQYRSGNREQDIAQAKAKPRTGAGATGAGGVEFTGLNVDNPRLDGNAG

SEQ ID NO: 61101 - DNA, 984 bp, Unknown
  Obtained from environmental sample
  misc_feature (1)..(984): n is a, c, g, or t
atgtctagaaaaacagcacagttgtttgatttaatgttcaagaacataattaaggatgcgagttcatctgcggttgtgcatttgataaacggcatttacaaaaagaactatccattagatacaatggtaactattgaacccaacgagcttataaaggaacaccctaaatctgggaagatggagaaaattgtttccgatataataataactctgcatagcgaaaacaaaaaagatactttcttattggaagcgcagatagatgacgatttggaaatgatacttagaattttcaattacagcactttaattgcactagataaaaagactgtttcggctgacggttcttgtatgaaaatagagatgccctctcctgtggtgatttattgggaagcgagcaatacaaaagacgttgtttctgttgagataaagtttccaaatagaaagagtgtggcgtatgaaatatctacgttcaaggtgttgcagcattcagttgccgagttggagaatatagcgttgttgttgcctttttacatattgaaaatccgcaaggagttgggtaaaaaaggcattgattcagccaagagaaagattttgtctaagaggctggagggttatgttatagagataggcaaagttttcaaaaggcttgtgagaaataactatattacggctaaggatgcggctatgcttttgcgtaggttgttgaatatgaatttggaactctacggtgagtatcctgagtttgtggaggttgatatgacgttgaagcagttggtatatacaggcatagacgaggctattgacaaggctgtggcaaaagctgaagcaaaagctgaagcaaaagcagcaagaaccgaagccaaattagtgaaagctgagaaaagattaaaccgcaccgctaaggctatgaaagctggtggtgaggctgtggataaaattatgcgttatactgggctttcacgccgtgagattatggctttgtag

SEQ ID NO: 61102 - protein, 327 aa, Unknown
  Obtained from environmental sample
  misc_feature (1)..(327): Xaa is any amino acid
MSRKTAQLFDLMFKNIIKDASSSAVVHLINGIYKKNYPLDTMVTIEPNELIKEHPKSGKMEKIVSDIIITLHSENKKDTFLLEAQIDDDLEMILRIFNYSTLIALDKKTVSADGSCMKIEMPSPVVIYWEASNTKDVVSVEIKFPNRKSVAYEISTFKVLQHSVAELENIALLLPFYILKIRKELGKKGIDSAKRKILSKRLEGYVIEIGKVFKRLVRNNYITAKDAAMLLRRLLNMNLELYGEYPEFVEVDMTLKQLVYTGIDEAIDKAVAKAEAKAEAKAARTEAKLVKAEKRLNRTAKAMKAGGEAVDKIMRYTGLSRREIMAL

SEQ ID NO: 61103 - DNA, 552 bp, Unknown
  Obtained from environmental sample
  misc_feature (1)..(552): n is a, c, g, or t
ttggagccgctggacctgccaccgggaaagcagcctgttgtggtgaggaccagctttgaaaacggggagcaggcggtgcggcgcgtgctgttatttgtcgaccccgatgccccgaaggtagaaaccgtggctccggaagagaagaccgtacaccgggacgagctaaaggtatacggcgccgcggacgacatctttgagcttaccgacgtgaacataaacctgcgcccttacgacaagttctggtatgaggttccgtacgcgatcaggggcctgtacattgacgtgaagacgttaggcgccacttattttgacgtaggcatagggctgagtttttttgacaacaacgtacgctttcagggccagttcggggtcgcgcctccgtggggcgcgcgcaacgcccttgttgagggcggccgctacgtaggcgacgtcgtaggcttcaagctgatagcgaatatagtcaccatcccgtttgactggctctttagggacagggactgggttttttacaaggtgaacgtcggggtaggggcgaaatttttcatgttttga

SEQ ID NO: 61104 - protein, 183 aa, Unknown
  Obtained from environmental sample
  misc_feature (1)..(183): Xaa is any amino acid
MEPLDLPPGKQPVVVRTSFENGEQAVRRVLLFVDPDAPKVETVAPEEKTVHRDELKVYGAADDIFELTDVNINLRPYDKFWYEVPYAIRGLYIDVKTLGATYFDVGIGLSFFDNNVRFQGQFGVAPPWGARNALVEGGRYVGDVVGFKLIANIVTIPFDWLFRDRDWVFYKVNVGVGAKFFMF

SEQ ID NO: 61105 - DNA, 777 bp, Unknown
  Obtained from environmental sample
  misc_feature (1)..(777): n is a, c, g, or t
atgcgaaacaagcttaccgacgagctggcggtatgcggccttaaagccgcccttgcccttgccgaatttcatcctgaaaccatcaaccgcctttttgtacgggaggatcgctttccattgtttaccaaagtgtgtaaaaaactcgcggaacgcaagcgcccatataaaatatgcgaagacgaagaacttgaacgtttatgcaaaacggttcaccatcagggcgtggtgatgatgatagaggaaccggaagtcgagcccttaaccagagaagacctggacttttgggcaggggagggcaagacgggccttgtgcttcacgaggttgggaacgaccataacttgggagccattgccagggccgcggcttttttcgacgtgcattttatcgtactgaacgagaaagacgaagaagcacggctgactaccagcgcctatcgtgttgcggaaggcggcatggaacatattgttgtgcggaagataaacaacacagcgggatttttaaaagacgcggcaaaaaaaatttttgtcatcggaaccgacacccgcgcgcggcggcgcattggcgatctttccggcattgcgaaagactgggccgcgcaggccggagtgaagcgtcccggagtcgcgctggctctcggaaacgaggaagacggtcttcccaagaatataaaagacaactgttcctgtctgctccgtattcccgggacgggcaatatcgaaagccttaatgtcgctcaggccgccgctcttttcttgagggagatttacgatttgtag

SEQ ID NO: 61106 - protein, 258 aa, Unknown
  Obtained from environmental sample
  DOMAIN (10)...(85): RNA 2'-O ribose methyltransferase substrate binding
  misc_feature (1)..(258): Xaa is any amino acid
MRNKLTDELAVCGLKAALALAEFHPETINRLFVREDRFPLFTKVCKKLAERKRPYKICEDEELERLCKTVHHQGVVMMIEEPEVEPLTREDLDFWAGEGKTGLVLHEVGNDHNLGAIARAAAFFDVHFIVLNEKDEEARLTTSAYRVAEGGMEHIVVRKINNTAGFLKDAAKKIFVIGTDTRARRRIGDLSGIAKDWAAQAGVKRPGVALALGNEEDGLPKNIKDNCSCLLRIPGTGNIESLNVAQAAALFLREIYDL

SEQ ID NO: 61107 - DNA, 579 bp, Unknown
  Obtained from environmental sample
  misc_feature (1)..(579): n is a, c, g, or t
atgcgagtttgcgccatatatagtatagggaccgagaaccagggactagggagggtactggcaaaaaaggatggaaaaatggaaaaagaaccttgggacagcagcgatgacttggcaagaacattgcagtcggcggattttgggcttcctgatcaagtcatggttatggcacacatgaatagactgtctgaaacatacacacaagcacgaaagatattgtcttctctgattgggcatccaatggtaagccgttccggtttatgcgcgactatatcaagaaaatcaattgaaaagatattgagtgggacaagtgttgaggattcccataattataaggctcacattttagccgctggaaatatcgaccagctctataccaacgccatagaaccatggaattttgaaatgaaccccaataaaaataacgatgggttagtaagtattcaccggctttttgcccctatggaatatgaaggggttataagtgtagttaaaattacagttaaagaaatgaaaaatcccaataatggaaaccgaatttatacgattaagacgttagacgtgtttttgaaagaatga

SEQ ID NO: 61108 - protein, 192 aa, Unknown
  Obtained from environmental sample
  misc_feature (1)..(192): Xaa is any amino acid
MRVCAIYSIGTENQGLGRVLAKKDGKMEKEPWDSSDDLARTLQSADFGLPDQVMVMAHMNRLSETYTQARKILSSLIGHPMVSRSGLCATISRKSIEKILSGTSVEDSHNYKAHILAAGNIDQLYTNAIEPWNFEMNPNKNNDGLVSIHRLFAPMEYEGVISVVKITVKEMKNPNNGNRIYTIKTLDVFLKE

SEQ ID NO: 61109 - DNA, 1998 bp, Unknown
  Obtained from environmental sample
  misc_feature (1)..(1998): n is a, c, g, or t
ttgtcgaatatttttaacttttatgaaagtatcgcgcttgcggacaggcgcgagcagtttgaagataatatagacggtatttttgaggatatgcccgatcttgtgcgtatgggtaccgtctggaagcctaacgccattgacggccaggacagccgttacataggcagggtaggctcaaccgagacggggcagttcgcttataccgtgacaagggaattcggaacgacacaggcaatcgccaatcaagacgttccgggtataatggctatattgaacggtcccaattccaaagtagtaagcatgggcgaccccgtccccatgaagaatcagggaagagatactttttgtgtcagaatcaccgttcccattatcaataagcggcttaatgaagcggtcggagccatattgtgtcagttggatatttccattatacagccgactatagaaagaacaataaaagttaacgatgaagttaccagcgtggttatttattccaacaacggttttattttggcgaattatttgcccgagtttatcggaaagcagattgacacggaagggcaatacggcaaaagtatgaatgccgtcaaagacgccattagaaaaggggaagaatggcagggggaagagtatgaccccgaccttcataccaacatggtaatgggaatagccaatattcccatagggcagtctccgacaacatggtcgataatgataggtacaaccgaagactacatcatgcgggatgtcaacaagatgaccgtatttaccgttattttggcgtcggtggcgttagttgtatccattataatcgtatatcttgtcgtaaccgccgttaccaaaccaataatcaatgtaacctataacctcagggatatagcggaaggcgaaggcgacttgacaaatgagcttcatatagacagcaaagacgaagtcggcgagctagcgaaatactttaaccggactatcgggtctatcgcctcccttatcaagagaatcaaatacaaggtcaacgcgcttaccaataccggccatgagcttgagtctaatatggaaaaaaccgccaaatcggtggaaatgatcgaggcgaactttgaaggcatgaaatccaagatgagcaagcaggacgaaagcgccgccgccgcggacaaggcggtaaaaaccataaaagacaatatcagcaacttaggaaggctcatagaaagccaatccgaaagcatcaacacctcgtcctccgccgtcgagcagatgaccgccaatattcattcggtaaccagaaccctgatagaaaacagcaagaacgtcacagaattaacgggagcgtccgagaacggaaaaattgggcttcaggcggtggcggaaaacataaaggaaatcgcccgcgaatcagagggcttgctggaaattaactcggtaatggaaaacatcgccagccagaccaacttgctttcgatgaacgccgctatcgaagccgcgcacgccggagaagcgggcaaaggctttgccgttgtcgccgatgaaatccgcaaattggcggaaagttcaagcgaacagtccaagaccatcggtacggttctgaaaaaaatctcggaatcaatcaccaaaattaccaaatccgctgaagtcgtattaaccagattcgagacgattgacagcagcgtaaaaacggtatcacagcaggaagaaaacatccgcaacgcgatggaagagcagagcgaaggaagcaggcagattctgcagggtatcagcaacttgaacgaacttaccactcaggtaaagagcggctccgaagaaatgcttaacggcagccaggaagttgtaaaagaaagccagaatcttgaaaaggtaacgcaggaaatcacaggcggtatgaacgaaatggcttccggagcggatcagattaacgtagctgtaaccaatgtcaacggaatgaccaccaaaaaccgcgaagcaattgacagccttataaaagaagtttccaggttcaaagtagaataa

SEQ ID NO: 61110 - protein, 665 aa, Unknown
  Obtained from environmental sample
  DOMAIN (257)...(328): HAMP domain
  misc_feature (1)..(665): Xaa is any amino acid
MSNIFNFYESIALADRREQFEDNIDGIFEDMPDLVRMGTVWKPNAIDGQDSRYIGRVGSTETGQFAYTVTREFGTTQAIANQDVPGIMAILNGPNSKVVSMGDPVPMKNQGRDTFCVRITVPIINKRLNEAVGAILCQLDISIIQPTIERTIKVNDEVTSVVIYSNNGFILANYLPEFIGKQIDTEGQYGKSMNAVKDAIRKGEEWQGEEYDPDLHTNMVMGIANIPIGQSPTTWSIMIGTTEDYIMRDVNKMTVFTVILASVALVVSIIIVYLVVTAVTKPIINVTYNLRDIAEGEGDLTNELHIDSKDEVGELAKYFNRTIGSIASLIKRIKYKVNALTNTGHELESNMEKTAKSVEMIEANFEGMKSKMSKQDESAAAADKAVKTIKDNISNLGRLIESQSESINTSSSAVEQMTANIHSVTRTLIENSKNVTELTGASENGKIGLQAVAENIKEIARESEGLLEINSVMENIASQTNLLSMNAAIEAAHAGEAGKGFAVVADEIRKLAESSSEQSKTIGTVLKKISESITKITKSAEVVLTRFETIDSSVKTVSQQEENIRNAMEEQSEGSRQILQGISNLNELTTQVKSGSEEMLNGSQEVVKESQNLEKVTQEITGGMNEMASGADQINVAVTNVNGMTTKNREAIDSLIKEVSRFKVE

SEQ ID NO: 61111 - DNA, 423 bp, Unknown
  Obtained from environmental sample
  misc_feature (1)..(423): n is a, c, g, or t
gtggtaagttcgttcaagttgctgataccctgcagaatctgcctgcttccttcgctctgctcttccatcgcgttgcggatgttttcttcctgctgtgataccgtttttacgctgctgtcaatcgtctcgaatctggttaatacgacttcagcggatttggtaattttggtgattgattccgagatttttttcagaaccgtaccgatggtcttggactgttcgcttgaactttccgccaatttgcggatttcatcggcgacaacggcaaagcctttgcccgcttctccggcgtgcgcggcttcgatagcggcgttcatcgaaagcaagttggtctggctggcgatgttttccattaccgagttaatttccagcaagccctctgattcgcgggcgatttcctttatgttttccgccaccgcctga

SEQ ID NO: 61112 - protein, 140 aa, Unknown
  Obtained from environmental sample
  misc_feature (1)..(140): Xaa is any amino acid
MVSSFKLLIPCRICLLPSLCSSIALRMFSSCCDTVFTLLSIVSNLVNTTSADLVILVIDSEIFFRTVPMVLDCSLELSANLRISSATTAKPLPASPACAASIAAFIESKLVWLAMFSITELISSKPSDSRAISFMFSATA

SEQ ID NO: 61113 - DNA, 624 bp, Unknown
  Obtained from environmental sample
  misc_feature (1)..(624): n is a, c, g, or t
ttggctcttgaattggagcaggattattttgcgaataaagcaaacagccagcttctaaaaaacaacgcaataccgcagggtattttaaaaactgaacagacattgaggccggaagaggcagaccagcttgaaagacgctgggagagcaaatacggggctgtgaaggcggggcgcaagattgcggtactcggcaagggtacggaattcaagcctgttactttcagccctgacgttatcaaactttttgaactgaaacgctggaacctttacacgatactggcgaagtacggcataccgccgagagtggcgaacatcagcgacaagtctacggctctttccggcaaggatacagccgaacagcatagcgcattttggaagtatacccttattcccattttgcgccaatttgagcaaatacttgaaacccaattttttatacggctcggcattaaagaacgtggcgtatttgacctgtgggatatacccgaattacaggagagcgaagaccagcagagcaagcgggatattgcggagattaacgccggaattaaaacaatcaatgacgttctaaaggaacgtggcaaggaacttaaaccctggggggacgtatggcatagaccataa

SEQ ID NO: 61114 - protein, 207 aa, Unknown
  Obtained from environmental sample
  misc_feature (1)..(207): Xaa is any amino acid
MALELEQDYFANKANSQLLKNNAIPQGILKTEQTLRPEEADQLERRWESKYGAVKAGRKIAVLGKGTEFKPVTFSPDVIKLFELKRWNLYTILAKYGIPPRVANISDKSTALSGKDTAEQHSAFWKYTLIPILRQFEQILETQFFIRLGIKERGVFDLWDIPELQESEDQQSKRDIAEINAGIKTINDVLKERGKELKPWGDVWHRP

SEQ ID NO: 61115 - DNA, 1392 bp, Unknown
  Obtained from environmental sample
  misc_feature (1)..(1392): n is a, c, g, or t
atgcaaataaaagaaaatctgattctcgatgatgaaggcaggactctgattttacgcggagtaaatttgggtggtgattctaaagtaccattttgcaaaacaggagatgaaatttacccttcgttccttgacagaaaaatgcctgtttcctttgcaggcaggccgttcccacttgaagaagcggagagtcactttaaacggttaaaaaaaggcggactgactttccttcgtctgattgttacatgggaagcaattgaacatgaggggcctggaatttatgatgaagcgtatttggcatatctcaggaaaatacttctgacagctgaaaacgaaaatatcagcgtctttatcgatcctcatcaggatgtttggagcagatggtcaggcggagacggcgctcccgcatggacaatggaaaaacttggcatggatacggctttgttcgacagaagcggtgctgctgttacaagacagcgttatggtctttgccataacaatgctaaatacccgaaaatgctctggccgagtaattataaccgttatgcagccgcaactatgttcagtttgttttttgcaggtaatacttacgcccccgatttaaaaattgaaaatgaaaatgtccaggactggctgcagggacattacattgcggccttccggcattgttaccgccgcctgaaaagttgctccgccattgcgggatggggcgttataaatgagccgcacaaaggcttcattggatgcaaagacctgggacaaccttttcagaccatgatgccggtaggccccaggccaagcccctgggacgcaatacgcgccgcttcaggatacccggctgcgatacctgtatattcattttttggcaagaacagcacaaaacctgaaattttcaatcccggcgccgtttctctttttaaggaaggatttgtctgcccctggaaacaggccggcgtctgggctgaagaagacggcgtaccgcgcctgctgcgtaaagaccacttctcaatgtttgagaacaaatctgatttcatggcggatttccataagccctttgtcctggattttattaagtcaatgaaagaagcggatgagaaaacgattttctttctggagggaatgccttccggcacaggcgggccgtcgcatcctgaatggggcaggaatgatcctccaaatgtggtaaacgctttccactggtacgacggctttgcgctgtttaccaaattcttcagccgccggtttacaaaaagcacggaaaaggcggcgcctgtctttggcagaaaaaaaatgctggcctattattccgaatgtctggcaaaaagagtcagatggtcacccgaacgcatggggggaattccccacgcttcttggagaaatcggcctggcttttga

SEQ ID NO: 61116 - protein, 463 aa, Unknown
  Obtained from environmental sample
  misc_feature (1)..(463): Xaa is any amino acid
MQIKENLILDDEGRTLILRGVNLGGDSKVPFCKTGDEIYPSFLDRKMPVSFAGRPFPLEEAESHFKRLKKGGLTFLRLIVTWEAIEHEGPGIYDEAYLAYLRKILLTAENENISVFIDPHQDVWSRWSGGDGAPAWTMEKLGMDTALFDRSGAAVTRQRYGLCHNNAKYPKMLWPSNYNRYAAATMFSLFFAGNTYAPDLKIENENVQDWLQGHYIAAFRHCYRRLKSCSAIAGWGVINEPHKGFIGCKDLGQPFQTMMPVGPRPSPWDAIRAASGYPAAIPVYSFFGKNSTKPEIFNPGAVSLFKEGFVCPWKQAGVWAEEDGVPRLLRKDHFSMFENKSDFMADFHKPFVLDFIKSMKEADEKTIFFLEGMPSGTGGPSHPEWGRNDPPNVVNAFHWYDGFALFTKFFSRRFTKSTEKAAPVFGRKKMLAYYSECLAKRVRWSPERMGGIPHASWRNRPGF

SEQ ID NO: 61117 - DNA, 1494 bp, Unknown
  Obtained from environmental sample
  misc_feature (1)..(1494): n is a, c, g, or t
atggatcttaaaaagtttgaattttggtttatcgtcggaagtcaggatctttacggagacgctaccttaaagcaggtcgccgaaaacgcccgtgttatggcggaagagttcaacagggatccgctgcttccgggcagggtggttttaaaacccacagcaataacgccgcaggctattcgccgcctttttgaagaagcaaacgccgccggagactgcgccgggatcataacctggatgcacaccttttctccttcaaagatgtggatacagggtctggccgtaaaccggaaaccccttttgcatctgcacacccagtttaaccgcgatattccgtgggcttctatcgacatggattttatgaacctcaaccagtcggcgcacggagacagggaacacggtcatatccacgcccgcatgaggcttccgcgcaaggtggtggccggtttctggcaggacaatgaagttcgcctacgcatgggcgtgtggatgagagccgccgccgcctgcctggacggcatgaacaaggtggtgctgcgtctgggcgacaatatgcgggaagtggctgtaaccgagggcgacaaggtcgaagcccagcttaaattcggctggcaggtaaatacctggggcataggcgagctggcgcaaaggtacgccaatgtcggcgatgcccaggcggaagccctcgcgaaggaatacgccgccgcttacgaattggccgcaggccttgcccagccgggaaaggccagaaccgctatacttgaacaggcgaaaattgaaatcgccttaaaagaaatgcttgaaaaagaaaacgcgggggcttttaccaccaccttccaggaccttcacggcctgccgcaactgccgggccttgccgcccagcggctaatggaacagggctacggttttggcgcggaaggcgactggaagcagtccatgcttacccgctgtgccaaggtgatggcctcggggctttcaggcggtgtttcttttatggaagactacacctaccattttgagcccggtaaggaagccgcccttggcgcgcatatgctggaaatctgcccctcaatagccggagcaaagccccgcgtcgaggtgcatcctctgggaataggcgggaagggcgatccagcccgcctggtgtttgacgccgcccccggacctgctgttttggcaaccctgattgaccttggcgaccgcttcaggatgatcgtaaacgaaatcgagaccatcaagatagaaaaggaaatgccgaagctccctgtagccagggctctgtggaagccttatccgagtttgagcgaagccgccgaggcctggatactcgcgggcggaacccaccactctgtttataccacggctctgaccgccgaatatttcagggactgggcggagatctgcggcattgagtttgtcttaatcgggcgcgacacaaagccggacaggctgagggatgagctgcgctggagcgaggcttactggtcgggccgttga

SEQ ID NO: 61118 - protein, 497 aa, Unknown
  Obtained from environmental sample
  DOMAIN (1)...(497): L-arabinose isomerase
  misc_feature (1)..(497): Xaa is any amino acid
MDLKKFEFWFIVGSQDLYGDATLKQVAENARVMAEEFNRDPLLPGRVVLKPTAITPQAIRRLFEEANAAGDCAGIITWMHTFSPSKMWIQGLAVNRKPLLHLHTQFNRDIPWASIDMDFMNLNQSAHGDREHGHIHARMRLPRKVVAGFWQDNEVRLRMGVWMRAAAACLDGMNKVVLRLGDNMREVAVTEGDKVEAQLKFGWQVNTWGIGELAQRYANVGDAQAEALAKEYAAAYELAAGLAQPGKARTAILEQAKIEIALKEMLEKENAGAFTTTFQDLHGLPQLPGLAAQRLMEQGYGFGAEGDWKQSMLTRCAKVMASGLSGGVSFMEDYTYHFEPGKEAALGAHMLEICPSIAGAKPRVEVHPLGIGGKGDPARLVFDAAPGPAVLATLIDLGDRFRMIVNEIETIKIEKEMPKLPVARALWKPYPSLSEAAEAWILAGGTHHSVYTTALTAEYFRDWAEICGIEFVLIGRDTKPDRLRDELRWSEAYWSGR

SEQ ID NO: 61119 - DNA, 582 bp, Unknown
  Obtained from environmental sample
  misc_feature (1)..(582): n is a, c, g, or t
ttgcgtggattaacttggctaataggcagtttgagtgccttgggcgtggtggctatagttatagtgtttcagccagaaattagaggtatgctcacaagaatagggcaaatagctaatgttttcaaattcagaaccttattttttaaacgtagcggtttagatgatataaccgcaaaaatagtggattccgttttggaattgcagagaaagggatatggagcattgatcgtactggaaaaaagagttggtttaaaatcttatgtagattctggtgaagtgataaatggtgatttttccaaaaaacttttatgttccattttttaccccggaaccgctttacacgatggcgcagtgatagttttaggaaataaaattatagcagccggttgcgtacttcctatgccaaccggaaccgctgccgccgagcaatccggtggaatgcggcacagggcagccaaagctctcgctttggaaacagatgcttttgtgatagttgtatctgaagaaactggctatatatccatagcttatcgcgatagctttcgcacaaggcagagcaaaagagaatggaagaagaaataa

SEQ ID NO: 61120 - protein, 193 aa, Unknown
  Obtained from environmental sample
  SIGNAL (1)...(18)
  DOMAIN (60)...(182): Domain of unknown function DUF147
  misc_feature (1)..(193): Xaa is any amino acid
MRGLTWLIGSLSALGVVAIVIVFQPEIRGMLTRIGQIANVFKFRTLFFKRSGLDDITAKIVDSVLELQRKGYGALIVLEKRVGLKSYVDSGEVINGDFSKKLLCSIFYPGTALHDGAVIVLGNKIIAAGCVLPMPTGTAAAEQSGGMRHRAAKALALETDAFVIVVSEETGYISIAYRDSFRTRQSKREWKKK

SEQ ID NO: 61121 - DNA, 399 bp, Unknown
  Obtained from environmental sample
  misc_feature (1)..(399): n is a, c, g, or t
gtgcctttggtctatacctttgggcggcttgggaattttttaaacggcgaactttatggcaggattactgaatccgcaattggaatgctcttccctcttgcgccagaacatccacctattttaagacacccaagccaaatttatgagatgtgttttgaaggttttgttctgtttggaattctttatgctttgtggaaaattctcccgaagctgagaaatcatgttatggctctttacttgataggatatggcacagcgaggttttttatagaattctttagggaaccagatgcacacattggcttgaatttcctgagtatgagccgtggacaaatgctgtgttctgcaatgattttaagcggaattgctctatgggtgtggaggagacgtgttcaatga

SEQ ID NO: 61122 - protein, 132 aa, Unknown
  Obtained from environmental sample
  DOMAIN (1)...(131): Prolipoprotein diacylglyceryl transferase
  misc_feature (1)..(132): Xaa is any amino acid
MPLVYTFGRLGNFLNGELYGRITESAIGMLFPLAPEHPPILRHPSQIYEMCFEGFVLFGILYALWKILPKLRNHVMALYLIGYGTARFFIEFFREPDAHIGLNFLSMSRGQMLCSAMILSGIALWVWRRRVQ

SEQ ID NO: 61123 - DNA, 513 bp, Unknown
  Obtained from environmental sample
  misc_feature (1)..(513): n is a, c, g, or t
atgtcttattcttggtggaatacaatcccgcagcgcatggatcctacggcgtttaccgtttttgattttcctgtacggtggtacgggttgatgtatttgatagccttcttttttggctatcatctgatttggcattttacaaccaaatataaaattcaaccgatgaaaagggaacaattggaaagcgtgatgacgtggcttatagccggcgttctgctcggggcacggtttggctatgtgtttttttacaattttggttattatataaataacctttcggaaattataatgccgttttcattcgagggcgggtttcatttcaccggtatttctggaatgagctatcacggcgggcttataggtgcttttttggcagcatcttatgctataaaaaaacagaaattagattattggaaaagcgtanaatacaatttttcttgttgtgcctttggtctatacctttgggcggcttgggaattttttaaacggcgaactttatggcaggattactga

SEQ ID NO: 61124 - protein, 170 aa, Unknown
  Obtained from environmental sample
  DOMAIN (13)...(167): Prolipoprotein diacylglyceryl transferase
  misc_feature (1)..(170): Xaa is any amino acid
MSYSWWNTIPQRMDPTAFTVFDFPVRWYGLMYLIAFFFGYHLIWHFTTKYKIQPMKREQLESVMTWLIAGVLLGARFGYVFFYNFGYYINNLSEIIMPFSFEGGFHFTGISGMSYHGGLIGAFLAASYAIKKQKLDYWKSVXYNFSCCAFGLYLWAAWEFFKRRTLWQDY

SEQ ID NO: 61125 - DNA, 918 bp, Unknown
  Obtained from environmental sample
  misc_feature (1)..(918): n is a, c, g, or t
atgtataacagtatgatgcaatccgtcgcaaaagcagaacctaccatatttcaagtctacacagtttggaagccaaacgccgttgacggaatggacgcgcgctacgccggccgtcccggtaataccgaaacaggacagtatgccgcagctttccgtatggaaaacgggcaggcaaatctcacggttaccaccgatgtagatgacgccatggtatatctaaacagcgctgacgcaaaggcgaagaaagatcggtatgtacatcctgttccaagaaatatagacgggaaagatacctggtatttcaggataatggttcccattataaacagccgtaacggcgaagttgtgggaggcgtaggctgtctttgtgttatagacgcgatacagccgactatagaaaataccataaaaaccagggaagatgttgccgcggcggtagtttactcaagcaacgggtttattatcggacactatttgcctgagcgcataggtaagatgttgagagacgtagatactgtctacggtaaatatatggatgaagtcgttagggctgttgcaaacggcgataattatgcctgcacaagtttttctcctgctttgaatacaaacttggcaattaatatacagtctttcccaatgggcagttcgggcagttcatggagcataatgatcgcggcgacggaatcgtatgttttaaaagaagtaaaattcttaaccaagattacaatcattattgccgcagtagccattgtaatagcggcgttagttgtattccttacgcttagcgctactactgctccaatcgtcgaggttgcgaacacccttaaagatatatccgaaggcgaaggcgacttaacgaaaacaatccccgtcaagtccgatgatgaggtaggcgacctttccaaaatacttcaataa

SEQ ID NO: 61126 - protein, 305 aa, Unknown
  Obtained from environmental sample
  DOMAIN (242)...(305): HAMP domain
  misc_feature (1)..(305): Xaa is any amino acid
MYNSMMQSVAKAEPTIFQVYTVWKPNAVDGMDARYAGRPGNTETGQYAAAFRMENGQANLTVTTDVDDAMVYLNSADAKAKKDRYVHPVPRNIDGKDTWYFRIMVPIINSRNGEVVGGVGCLCVIDAIQPTIENTIKTREDVAAAVVYSSNGFIIGHYLPERIGKMLRDVDTVYGKYMDEVVRAVANGDNYACTSFSPALNTNLAINIQSFPMGSSGSSWSIMIAATESYVLKEVKFLTKITIIIAAVAIVIAALVVFLTLSATTAPIVEVANTLKDISEGEGDLTKTIPVKSDDEVGDLSKILQ

SEQ ID NO: 61127 - DNA, 381 bp, Unknown
  Obtained from environmental sample
  misc_feature (1)..(381): n is a, c, g, or t
gtggtggataagaaaacgcaaagaattatttgcacggaattttttaacggaaaagcgcacgatggcacgatgttcaaaacaacgctgacaatattggaaaggatacttgttcttgccgacagcggttatagaggcgtgcaaaaggttcatgcaaatacaaagtttcccttgcgccacaaggaagattttggagcgatgacggacaaggagcgaaaggcatacaacaggagtatttcaagtccccgaatgaaggtagagcacatcatcggcagaacaaaaaggtttggcatagctcgcgagcgatatcgtaacagacgaaaaaggttcgggctaagatataacttaatttgtggaatagttaactatgaaaatagtacgtaa

SEQ ID NO: 61128 - protein, 126 aa, Unknown
  Obtained from environmental sample
  misc_feature (1)..(126): Xaa is any amino acid
MVDKKTQRIICTEFFNGKAHDGTMFKTTLTILERILVLADSGYRGVQKVHANTKFPLRHKEDFGAMTDKERKAYNRSISSPRMKVEHIIGRTKRFGIARERYRNRRKRFGLRYNLICGIVNYENST

SEQ ID NO: 61129 - DNA, 303 bp, Unknown
  Obtained from environmental sample
  misc_feature (1)..(303): n is a, c, g, or t
atgcgatttgctcctcgggcgatgaggataatgatgttgttcttgccggtcgcaggttttcaaattgtttcaacaaatatgtttgttgttacaggccgcccgaaaatatcgatctttctttcaatgctcagacagtgtatcgcgctgatcccatgtatactcatcttcggcaaaatatgggggttgtggggcgtagttgccgccgctcctgtcgccgacggcttttcctttattcttacggggttgttaattatttttgaattgcgaaaattaagacgcgatttagccgtcaatcccgcgtga

SEQ ID NO: 61130 - protein, 100 aa, Unknown
  Obtained from environmental sample
  misc_feature (1)..(100): Xaa is any amino acid
MRFAPRAMRIMMLFLPVAGFQIVSTNMFVVTGRPKISIFLSMLRQCIALIPCILIFGKIWGLWGVVAAAPVADGFSFILTGLLIIFELRKLRRDLAVNPA

SEQ ID NO: 61131 - DNA, 417 bp, Unknown
  Obtained from environmental sample
  misc_feature (1)..(417): n is a, c, g, or t
atgggtaattcatcaggaaacacatttttttccaccctgacagtcagaataatcgccgcttttaccataataataataattatcataggtattgctctcggtttatcgctggcaatgacagctaatacaaaaaatcaggaaaatttcagcgagttggctcccgcgcttccaaccaaacttttggatattaacgataatctaatcaccgaatttgcatccgatgaaaaacgcgaaatggtcgctttaaacgaactgccgcgccatcttattcacgcggttatttcccgcgaagaccctgatttttacaatcatcgcggttttagtattcgcgccattacgcgcgcgttaatcgggcagctgcttcgtaaaggctggggcggaggttctacgattacccgacaggtagcgggtacatag

SEQ ID NO: 61132 - protein, 138 aa, Unknown
  Obtained from environmental sample
  DOMAIN (58)...(138): Transglycosylase
  misc_feature (1)..(138): Xaa is any amino acid
MGNSSGNTFFSTLTVRIIAAFTIIIIIIIGIALGLSLAMTANTKNQENFSELAPALPTKLLDINDNLITEFASDEKREMVALNELPRHLIHAVISREDPDFYNHRGFSIRAITRALIGQLLRKGWGGGSTITRQVAGT

SEQ ID NO: 61133 - DNA, 657 bp, Unknown
  Obtained from environmental sample
  misc_feature (1)..(657): n is a, c, g, or t
ttggaaatttaccttaattatatgccgatgggtcccggtacttacggagtagaaaccgccagtaaatatttctttaatcacagcgcgcgcgatgtagaccttgccgaatccgcggttttagccgtactgctttccggtcccagccgctttgatccgttaagaaatccgaatcaggcaagagacagacagcattttgttcttgaacgcatgatccaattcggctatgccgataaatacgaagcggaagcatcatttaacgctttttgggataagtttgattatacaaaacccgccctgtccgcgtatcttacgcgcgaagataaagctccgtggttcagcgaatatgtgcgcagagagcttgaagtattgatgtacggtactagagattattaccgcgatggttatatcgtgcgcacgacattaaatcttgctcatcagaaggcggcggatatttatgtagccgaaggtcttgaaaaagcgaatatcgaatataccgcgctgaatagaagaagcaatatcttttcggagcgcgtttatctgcccatagtagacattttaactcttgcttttgatcttaccggtattcgcatgggttccgccggacagaacgaagagcagggcgatgtcgcgttacacccagaacagttaatcctatag

SEQ ID NO: 61134 - protein, 218 aa, Unknown
  Obtained from environmental sample
  DOMAIN (1)...(56): Transglycosylase
  misc_feature (1)..(218): Xaa is any amino acid
MEIYLNYMPMGPGTYGVETASKYFFNHSARDVDLAESAVLAVLLSGPSRFDPLRNPNQARDRQHFVLERMIQFGYADKYEAEASFNAFWDKFDYTKPALSAYLTREDKAPWFSEYVRRELEVLMYGTRDYYRDGYIVRTTLNLAHQKAADIYVAEGLEKANIEYTALNRRSNIFSERVYLPIVDILTLAFDLTGIRMGSAGQNEEQGDVALHPEQLIL

SEQ ID NO: 61135 - DNA, 324 bp, Unknown
  Obtained from environmental sample
  misc_feature (1)..(324): n is a, c, g, or t
atgcttggagccggcagaaacgcgaaaaaagtaattgtaagcgcggaagacggggtaaacgccatgagcggccgcattgtcgaatttctttttgaacctgaaaaattcgacatagtgttcggatgcggcccatttgaaatgttaaaagccttaatggcaagatgcaaaaaaagaaacgtcccctgtttcgtgtcaatggaaagccgtatggcgtgcggcataggcgcctgtcttggctgcacaatccgcaccagaaaaggaaaccgccgctgttgtacggacggccctattttttcatcagaggatataattgtaaatgagtga

SEQ ID NO: 61136 - protein, 107 aa, Unknown
  Obtained from environmental sample
  misc_feature (1)..(107): Xaa is any amino acid
MLGAGRNAKKVIVSAEDGVNAMSGRIVEFLFEPEKFDIVFGCGPFEMLKALMARCKKRNVPCFVSMESRMACGIGACLGCTIRTRKGNRRCCTDGPIFSSEDIIVNE

SEQ ID NO: 61137 - DNA, 975 bp, Unknown
  Obtained from environmental sample
  misc_feature (1)..(975): n is a, c, g, or t
atgagtgaaaataataattatacttccaacgccgatctttccgttaatatcgcgggagtgcatttcaggaatccggttattgcggcttccggaacattcggattcggacgtgaatacggttcaatgactgatatatcggttctcggaggcatatgtacaaaagggcttacgcttactccgcgtcccgggaatacgggcatccgaatatgggaaactccttccggcattttgaattccatcggtcttgaaaatcccggcattcaccactttattgaaaacgatcttccctacttgcgtcagttggggcccgtaataatcgcaaacctgtccggggcggaatccagcgaatatataaaaggcgcaggcttacttaaccagtctacggtagacatgatagaacttaacatctcctgccccaatgtaaaagccggaggcatttcattcgggctggatccgggaacagcggctgctcttgtcgccgcggtaaagcgagtttgcaccataaaaccgcttattgtaaaactttcacctaacgctccttcccttcccgctgtatccttatcctgcattaaagccggagcagacgctctttcgcttattaattcatacagggctatggcgatagacactgttaaccgcaagccggtatttgacaatataagcgccggcctttcgggacccgcgataaaaccaatcgcgcttggcatggtttgggaattaattaaaattttaagggactcaaaatcaaacgttcctgttatcggcataggcggaattgcatgcacaaatgacgcgcttgaatttcttatggcgggagcttccgcggtacaggtaggttccgcgacttttgtaaatccaaatacaatgacggaaattatagacggattacacaattatttaatcgataataaaatgtcaaatgtaaatcaaatatcaattagaatagaaaaggacgatcatggaaaacataattaa

SEQ ID NO: 61138 - protein, 324 aa, Unknown
  Obtained from environmental sample
  DOMAIN (12)...(300): Dihydroorotate dehydrogenase
  misc_feature (1)..(324): Xaa is any amino acid
MSENNNYTSNADLSVNIAGVHFRNPVIAASGTFGFGREYGSMTDISVLGGICTKGLTLTPRPGNTGIRIWETPSGILNSIGLENPGIHHFIENDLPYLRQLGPVIIANLSGAESSEYIKGAGLLNQSTVDMIELNISCPNVKAGGISFGLDPGTAAALVAAVKRVCTIKPLIVKLSPNAPSLPAVSLSCIKAGADALSLINSYRAMAIDTVNRKPVFDNISAGLSGPAIKPIALGMVWELIKILRDSKSNVPVIGIGGIACTNDALEFLMAGASAVQVGSATFVNPNTMTEIIDGLHNYLIDNKMSNVNQISIRIEKDDHGKHN

SEQ ID NO: 61139 - DNA, 387 bp, Unknown
  Obtained from environmental sample
  misc_feature (1)..(387): n is a, c, g, or t
ttgaaggaggttataatggcaaatgataatttacaagaaaggtggcatgtattacaacctgtttgctatgaagcaatagaaatgttcaaaaaagttatacaggatcataatgaaatgaagcttatccaaagcgatttaatgagtcttgaaattggaattggcttaatacccttagttaatggagaaaaaatattattagaacggattaagcaaatacggaaagggattgaatccgatattggcataagcatacctttagtacatattcttagcaactctttattaaaaccatttgaatattctttttcaattcgtgggaatagattaataggccgaaattcgagttatttaaggaaggaaaccaagggagaggtcgggcaaccttaa

SEQ ID NO: 61140 - protein, 128 aa, Unknown
  Obtained from environmental sample
  misc_feature (1)..(128): Xaa is any amino acid
MKEVIMANDNLQERWHVLQPVCYEAIEMFKKVIQDHNEMKLIQSDLMSLEIGIGLIPLVNGEKILLERIKQIRKGIESDIGISIPLVHILSNSLLKPFEYSFSIRGNRLIGRNSSYLRKETKGEVGQP

SEQ ID NO: 61141 - DNA, 915 bp, Unknown
  Obtained from environmental sample
  misc_feature (1)..(915): n is a, c, g, or t
atgagcgttatgaacgaaacgatgttggtcacattgtattgcattattgatgattttatcaatgctttggcaaaaactgtcgacggccgaaagatgctggattcatggaacgccaaacgggggccgcaaaggcagttaagcctcagcgaggttcttgcgctgaatataatgcgcttttattttcacatattcgatttgaaggcatttgtaagccttgccgaaaatgcctataaagcatattttccccgtttgcccaactacgaaaattttcttaaggcggcaaaccggtcgtttccgtttaccgtattgctgctgcactattttttgatgctaaaccgccggatgagcagggacgggatattttttcttgactcgaccgcattgagcgtgtgtgccaactggaacataccgacgcatcgcgtaaccgaagggtatgcttcacgcgggaaaacgagcaagggatggttttttggcttcaaactgcatggggcctgcgatgcggaagggaatctggtgagcctgcgtttttcaaccgggagcgagcacgacagccaacaaaccgagccgctcgctgacgggctgactggaacatttgtcggcgatgcggggtatttgctgaggcaggaggcgtttacacgcctgtttgaaaagcatgtacgcgttttgtctgccgcccggaagaacatgaagcgtttgatgaccgaagagcaggggcaattgttgaggaaacggagcattattgagaccgtgtggggcgtgttaaaagaacgacacgggctggtatttcatttggcacgaaacatggtcgggcttttcaggcattactgctacagtctgctcagtaaaatgatgcagccttttttgtattcttgcccgttaaggttgcccgacctctcccttggtttccttccttaa

SEQ ID NO: 61142 - protein, 304 aa, Unknown
  Obtained from environmental sample
  DOMAIN (120)...(284): Transposase DDE domain
  misc_feature (1)..(304): Xaa is any amino acid
MSVMNETMLVTLYCIIDDFINALAKTVDGRKMLDSWNAKRGPQRQLSLSEVLALNIMRFYFHIFDLKAFVSLAENAYKAYFPRLPNYENFLKAANRSFPFTVLLLHYFLMLNRRMSRDGIFFLDSTALSVCANWNIPTHRVTEGYASRGKTSKGWFFGFKLHGACDAEGNLVSLRFSTGSEHDSQQTEPLADGLTGTFVGDAGYLLRQEAFTRLFEKHVRVLSAARKNMKRLMTEEQGQLLRKRSIIETVWGVLKERHGLVFHLARNMVGLFRHYCYSLLSKMMQPFLYSCPLRLPDLSLGFLP

SEQ ID NO: 61143 - DNA, 477 bp, Unknown
  Obtained from environmental sample
  misc_feature (1)..(477): n is a, c, g, or t
atggataatgacgcgcccagccgtgcacggctgaaggacgaggtgtttctgcggatggcttttgaattgagccggctggggacgtgctgccggcttaaagtgggctgcatattgctgcgccctgacggcgggatagcgtctggggggtacaatggggcgttgcccgggatgccgcactgcgagcctggcacttgcaacccgaaccagaggtgcctccacaccagccacgcggaagaaaacgcgctcggcttttgcgatgggcccgtgggaactgcttacgtgacgcacgagccatgcctcacttgcaccagggcgctgatcaggcggggggcgcgcagggtggtttttctgctgccgtacactagcatcgccgagcaggaaaaaatggaaaggcaggcggccatcgaacacttcaatgtgcagtgggagcgcatggagggcccaagcgcagatggcatgccaggcatcggcagatag

SEQ ID NO: 61144 - protein, 158 aa, Unknown
  Obtained from environmental sample
  DOMAIN (11)...(118): Cytidine and deoxycytidylate deaminase zinc-binding region
  misc_feature (1)..(158): Xaa is any amino acid
MDNDAPSRARLKDEVFLRMAFELSRLGTCCRLKVGCILLRPDGGIASGGYNGALPGMPHCEPGTCNPNQRCLHTSHAEENALGFCDGPVGTAYVTHEPCLTCTRALIRRGARRVVFLLPYTSIAEQEKMERQAAIEHFNVQWERMEGPSADGMPGIGR

SEQ ID NO: 61145 - DNA, 411 bp, Unknown
  Obtained from environmental sample
  misc_feature (1)..(411): n is a, c, g, or t
atgagggtgcagcccagctcgggcctatcggagctggagatcaggcggatgatacaggacgccgccgcctgcgccgaagacgaccgccgcaggcgcgatggcctgaaacgcctcgccggcgcggagggcacaatccattcgtgcgaaaaggccctggccgcctacgggaagcacctgccccaaggcagcgcgggcgaaataaggctgctgctcgagcttgccaggcgcgcagtcgcggcaaaaaacacagacttccttgaagaaaatgagaacagcctgaccgacgcgcagaaccttctgacctcggcggccattgccgccgccgaggaaatggcttccatggcctgccaggcggaaggcgagccgcgcagcgaaggcggcgccggccagcgcgagcgggggaaacgatga

SEQ ID NO: 61146 - protein, 136 aa, Unknown
  Obtained from environmental sample
  misc_feature (1)..(136): Xaa is any amino acid
MRVQPSSGLSELEIRRMIQDAAACAEDDRRRRDGLKRLAGAEGTIHSCEKALAAYGKHLPQGSAGEIRLLLELARRAVAAKNTDFLEENENSLTDAQNLLTSAAIAAAEEMASMACQAEGEPRSEGGAGQRERGKR

SEQ ID NO: 61147 - DNA, 1020 bp, Unknown
  Obtained from environmental sample
  misc_feature (1)..(1020): n is a, c, g, or t
atgaagcgcgactactacgaagtccttggggtggcaaaggacgccggcctggacgaaatcaaaaaggcctacagaaaactggccatgcagcaccaccctgacaaaaaccccgggaacaaggaatcggaggagaaattcaaagaggcagccgaagcgtatagcgttttgtcagatgcagaaaagcgcagaaattacgaccagtttggccatgcgggcatgggtgggggagggttccagttcgacccaaggcaatttaccgatttccaagatttaggcgacattttcgcaaatatgttcggggggttctttggggatgtgtctggcggcaggcggaagtctcccgatgggcgcgaacgcgggtctgatctgcagattgagctgcgcctgccattcagagaggcaatatttggcatcgatcaaaaagaagtggagattccacgcttggaaacctgcgccatgtgcaatggcagcgggtgcgcaagcgggacccagccggttgtgtgtccacagtgcaaaggggcggggcagataactaggcggcatggttttttgcaggtggcgagtccatgccctcaatgtcaaggccgcggtatggcgatccagaacccttgtgccgaatgccgtggcgatggcaggttgcaaaaaatggccaaagtccgctttaagattccagccggcattaaccacggccagcgcctcagactgattggcgaggggacggcagggcgcaacggcggtggcaacggcgacctctatgttgcattcaacatcaagagggaccctgattacgagcgcgacggacacgacctccacagggcattagaagttccgtggcccttgctggcactgggcggcgaattctccgttgagaccctttatggaaaagaaaaagtgaaaattcactcaggcacccaagcaggccacaaaatccgaatagcaaacgctggagttccgaagttaaaggggctgggcgcggggatttgttccttcatgtgtcgggtggggttccgaataaactga

SEQ ID NO: 61148 - protein, 339 aa, Unknown
  Obtained from environmental sample
  DOMAIN (231)...(331): DnaJ C terminal region
  misc_feature (1)..(339): Xaa is any amino acid
MKRDYYEVLGVAKDAGLDEIKKAYRKLAMQHHPDKNPGNKESEEKFKEAAEAYSVLSDAEKRRNYDQFGHAGMGGGGFQFDPRQFTDFQDLGDIFANMFGGFFGDVSGGRRKSPDGRERGSDLQIELRLPFREAIFGIDQKEVEIPRLETCAMCNGSGCASGTQPVVCPQCKGAGQITRRHGFLQVASPCPQCQGRGMAIQNPCAECRGDGRLQKMAKVRFKIPAGINHGQRLRLIGEGTAGRNGGGNGDLYVAFNIKRDPDYERDGHDLHRALEVPWPLLALGGEFSVETLYGKEKVKIHSGTQAGHKIRIANAGVPKLKGLGAGICSFMCRVGFRIN

SEQ ID NO: 61149 - DNA, 999 bp, Unknown
  Obtained from environmental sample
  misc_feature (1)..(999): n is a, c, g, or t
ttggctcaacattattacaatacaatcgtagacagaagaatagcgtatacggaacgctatgaaaaaaatattttaaaagcgcttgattcttacaggcgtaagggcaaacttgaaattttagcttcctgcgctactcacgcttttttgccgtttatcagccacaacggcgaatctttacaggcgcagatggaaatccccattcccgcttaccgccgccattttgcgggagttccgcagggtttctggctgccggaacttggctggtcttccgcgctggaaccgtatttaagagactataatttttcttacaccatcgtagacagccacggtcttttgttcggcaatccgcagccggaaaagggaactttttatcccgttaaaacacctaacggcacttatatcctcgcgagagacctgtacgccgtgcgtgaaattgaaaaatcggcggtagatgaaatataccgtaacaatgacagggacgtaggttatgaactgccgcctgagacggtaaaactgtttttaagcgcagaaggagaacgccacagaacaggatacaagtattggcagcgttctaacaaaaattataacccgcaagccgccgtcggcagggcggctgaatacgcaaaaacattcatggataacacaatcgcccgtcttgaagaagcgtcaaaacacatggaagaagcgccgctaagcctttacgcaaataacgccggcttttttggaaacctctggcatgagggttttcaatttatagagacgcttttccgccttgcccatgaacacaaggagctaaaatttatctgcccgagcgaatatatttttaaacaggattttaccaaaattcaagttgtttcgcccgaattttcatcaaacggcgtaaacggttacgccgagacatggcttgacgtttccaacgactggatttaccgccaccttgcgcgttctatggaacgaatgacagagttagctgaacgtttccctgacgatacgggatga

SEQ ID NO: 61150 - protein, 332 aa, Unknown
  Obtained from environmental sample
  DOMAIN (1)...(332): Glycosyl hydrolase family 57
  misc_feature (1)..(332): Xaa is any amino acid
MAQHYYNTIVDRRIAYTERYEKNILKALDSYRRKGKLEILASCATHAFLPFISHNGESLQAQMEIPIPAYRRHFAGVPQGFWLPELGWSSALEPYLRDYNFSYTIVDSHGLLFGNPQPEKGTFYPVKTPNGTYILARDLYAVREIEKSAVDEIYRNNDRDVGYELPPETVKLFLSAEGERHRTGYKYWQRSNKNYNPQAAVGRAAEYAKTFMDNTIARLEEASKHMEEAPLSLYANNAGFFGNLWHEGFQFIETLFRLAHEHKELKFICPSEYIFKQDFTKIQVVSPEFSSNGVNGYAETWLDVSNDWIYRHLARSMERMTELAERFPDDTG

SEQ ID NO: 61151 - DNA, 699 bp, Unknown
  Obtained from environmental sample
  misc_feature (1)..(699): n is a, c, g, or t
atggtagataaacttcaagttcctgtaacacgccactggctggagagtttgagtacggagcaattagttaaacttgcagactcttacggggtagatatccctcccggactggaaagaattttcattatcgaagaaatattggaagttaccgatattgacgaacaagaaatttccgaagatgacgacgacacggaagttatggaagttaatgaaaattactccgaaactgccgctctacccggtcaatataatatctcttatatcgaagtaataataagagaccccctttgggtttttgctttttgggaaataaaaaaacatgacagggaattacatgaaaacgaagacgattttgacggttattgcctgcgggtaattcctcttgataaaaacggaaaagaaaaaaatccaaacgaaaacccttttacggtatctatcggcgcggaagacagcggcagatatttaggcattgtggaacattccgagcaaaacacagacagctatgttatacaactttgcgtaagcagaggcgatgtcatgatgcaaattgcggtttcacagccgttttctctgccaaagccttacgacaatgatatgattgcggacatggaacgcaacccgttaatccgcctttcgggagcgcgcgatttatcaataataaaaaatatggatcaccaatccacggttaagaggcagtaa

SEQ ID NO: 61152 - protein, 232 aa, Unknown
  Obtained from environmental sample
  misc_feature (1)..(232): Xaa is any amino acid
MVDKLQVPVTRHWLESLSTEQLVKLADSYGVDIPPGLERIFIIEEILEVTDIDEQEISEDDDDTEVMEVNENYSETAALPGQYNISYIEVIIRDPLWVFAFWEIKKHDRELHENEDDFDGYCLRVIPLDKNGKEKNPNENPFTVSIGAEDSGRYLGIVEHSEQNTDSYVIQLCVSRGDVMMQIAVSQPFSLPKPYDNDMIADMERNPLIRLSGARDLSIIKNMDHQSTVKRQ

SEQ ID NO: 61153 - DNA, 1209 bp, Unknown
  Obtained from environmental sample
  misc_feature (1)..(1209): n is a, c, g, or t
atggggaatagggagcgtggtgcgatattctgtcaatccttgcgggattttccttgtccggtaacgcttgggaaaatcgcgccgtcttttgggcttcatcgctataaacagggcttgcggtttgttccacctgacgatgagggctttacgctaaggggcgataaacagcggcttgtatacaagggtcgaagacgctcacataggataacgatacttggagacactacatttgaatatgactgtattcttgagcgggaaccagaaaacaatgtcatttcattgcgtatggaaggcgcagagaactatgattttttccggcagcctgattttgtaaaagaatcttttttaaaggggtcttatgcggtttacaaaaaagaaacgctggtaggagaagggacaggcaagctttgccatatacataggccggaagttattgacgcaagagggcggcggtgctggggcgaattgtcggttgttagcaacgagttacgcataactataccagaagattggctttctgaagccaagtatccggtggtggttgatccgaccatcggaacttctacggtggggagccaatatttatgggacgctgatccgccaggaccgtttgctccgctgttgtttgaagttcaagtacctgttaacaggtttttagtaacagatacgattaacggtatttgtacggcttatatttacactaacgccgatgacggagatgccggaggctgccctgttttatattcagataacaataataaacctttgacaaggaaatcagctaatgagcaatttattgatttaagggttaggaacggaatgcctgcgggttggcggtcaggttcattcaggagtaatggaagtatttcgagcggggtttatatatggttcggcgttgttgtgaatatgtggtatgcacgcttcgattatggggcaaaatgctactgcgaagaatgtgattacgaaagcattccaaacacatacccaattattgatccgaacttttatcaaaatttcaggttatcaatgtattttacatattcatcgggacaaaattatattaggacaattacgcagggagtaagtttagctgataatctgaaaattaacgcagactatttgcgaaaatcagaagcctcaaaacaagcgcatactgcaattaataaattacaagcgattaaaaaaaatatacaggggcctccgctgtag

SEQ ID NO: 61154 - protein, 402 aa, Unknown
  Obtained from environmental sample
  misc_feature (1)..(402): Xaa is any amino acid
MGNRERGAIFCQSLRDFPCPVTLGKIAPSFGLHRYKQGLRFVPPDDEGFTLRGDKQRLVYKGRRRSHRITILGDTTFEYDCILEREPENNVISLRMEGAENYDFFRQPDFVKESFLKGSYAVYKKETLVGEGTGKLCHIHRPEVIDARGRRCWGELSVVSNELRITIPEDWLSEAKYPVVVDPTIGTSTVGSQYLWDADPPGPFAPLLFEVQVPVNRFLVTDTINGICTAYIYTNADDGDAGGCPVLYSDNNNKPLTRKSANEQFIDLRVRNGMPAGWRSGSFRSNGSISSGVYIWFGVVVNMWYARFDYGAKCYCEECDYESIPNTYPIIDPNFYQNFRLSMYFTYSSGQNYIRTITQGVSLADNLKINADYLRKSEASKQAHTAINKLQAIKKNIQGPPL

SEQ ID NO: 61155 - DNA, 972 bp, Unknown
  Obtained from environmental sample
  misc_feature (1)..(972): n is a, c, g, or t
atgcagagtattttgatgttttgcgaaaaatggtttgaagaacgctttaattggaatattgagcgcgactggcttgtaattactatgggagtggtaaatgccctgtacatcgccattcgtgcattcacaaaaccaggagagggagttgttatacagcagcctgtgtattatccatttgaatctagcataaagaaaaccaggcggcaattgctggtaaatgagcttgttcttagcgatggacgctatgtaatagattttcaggattttgaagaaaaaatcaagcaggcgaaattgttcattttgtgcaatccgcataatccggttgggcgagtttgggagagagacgaacttattcgcatgggcgaaatatgcctgcgccacggagttattgttatagctgacgaaattcacgaggattttattttcccagggcacaagcaccttgtattcgctgggcttaatcaggattttgccaatataactgttacctgcacatcaccatcaaaaacctttaatcttgcaggactgcttcacgcaaataattttatcttcaacaaaactctgcgcgaaaaattcaaggaggaatatgcagagctaggcatagggcaaccgggcataatgggcataatcacctgcaaagcggcatatcaaaacggagctgagtggcttgaggagcttatggaatacctcgctcaaaatatgctgcttctaaaaacatatctttcaaatcacattccgaaaattaaacttattgaaccagaaggaacatatttagcgtggcttgattgcagagaacttggactttctgctcaaaagttagacgaagctattactcacaagggaaaattatggttaaacgcaggttatacatttggaaagggaggagcaggttttgagcgcataaatgcggcttgcccccgttctgtgctgcataaagcattggaaaggctgaaaaatgtggaggctgaataa

SEQ ID NO: 61156 - protein, 323 aa, Unknown
  Obtained from environmental sample
  DOMAIN (1)...(317): Aminotransferase class I and II
  misc_feature (1)..(323): Xaa is any amino acid
MQSILMFCEKWFEERFNWNIERDWLVITMGVVNALYIAIRAFTKPGEGVVIQQPVYYPFESSIKKTRRQLLVNELVLSDGRYVIDFQDFEEKIKQAKLFILCNPHNPVGRVWERDELIRMGEICLRHGVIVIADEIHEDFIFPGHKHLVFAGLNQDFANITVTCTSPSKTFNLAGLLHANNFIFNKTLREKFKEEYAELGIGQPGIMGIITCKAAYQNGAEWLEELMEYLAQNMLLLKTYLSNHIPKIKLIEPEGTYLAWLDCRELGLSAQKLDEAITHKGKLWLNAGYTFGKGGAGFERINAACPRSVLHKALERLKNVEAE

SEQ ID NO: 61157 - DNA, 780 bp, Unknown
  Obtained from environmental sample
  misc_feature (1)..(780): n is a, c, g, or t
ttgcaatttagaattcgccaccaagacattgaaataccctattcccagttgtggctctcttttgtggaagctctttttgcatttgcggttatactctgcattttcataagagattccatagtggaaaacgaactggaaaaaatgctcgccgtggggtgtgctttgcttttgtcgcgagctgttgccagaaccctttacatgctttccatgctacgcgagggcaaatcttttctttcaagcggattttggtctaaggtagccacaataagcataaatgtcacaatgctgatttatgttttgagcctagagcactaccagcaaatttccatgggagccaccatacttactctctttgccgctgccgtgtcttttggttatcgctattaccgcgaccccatgcatcgcaagccgctctctgtttgcaaccaaataacaatgagccgcatagttttaactcctgtgtttttgtggatattcttttacgatggcgatttgaactatcaaaacaatagcttggtgtttaaaattctcgctcttgttatggttatagcctttatggtctcagattttttggatggatatttggcgcgcaaatggggagaggtttcaactctaggcaaatatttagaccccttttccgataaaatttccaatatgaccgtgtttttgtgcttcttggcttctggctacacctcggtttggatggtggctttaatatatttcagagaagcgagcatagaaactctgcgtaccaatgctgcctccgcaaaaaataattag

SEQ ID NO: 61158 - protein, 259 aa, Unknown
  Obtained from environmental sample
  misc_feature (1)..(259): Xaa is any amino acid
MQFRIRHQDIEIPYSQLWLSFVEALFAFAVILCIFIRDSIVENELEKMLAVGCALLLSRAVARTLYMLSMLREGKSFLSSGFWSKVATISINVTMLIYVLSLEHYQQISMGATILTLFAAAVSFGYRYYRDPMHRKPLSVCNQITMSRIVLTPVFLWIFFYDGDLNYQNNSLVFKILALVMVIAFMVSDFLDGYLARKWGEVSTLGKYLDPFSDKISNMTVFLCFLASGYTSVWMVALIYFREASIETLRTNAASAKNN

SEQ ID NO: 61159 - DNA, 555 bp, Unknown
  Obtained from environmental sample
  misc_feature (1)..(555): n is a, c, g, or t
atgctcgccattacaggtttaataggttccgggaagtctcttgtggcttctgttgttagggcggagggctttgaggttttggatgccgatgcccttgcgcatgagctttacaaggagaatgcagatttgcgaaaaaaaattgcagaggagtttggagataaagctattgacgaaaaaggcataaatcgtgcttatgtttcgcagcttgtttttaacgatgcgcaaaaactctgccttttggaaagcatagttcacccccttatgcaaaaagaaattgaaaaaagaaacccgccttttatagaagccgccgttttatataaatggcaagatttcgcaaaaaaaatgcaagaagtttgggttgtgcaagccgatgaaaatataaggagagaacgcctattgaaaaaaggcatgagcgaaagcgatattgaaaggagaatgaaaatgcaaaataactctcaactcttactcaactctcaactaataataaacaacagcacaaaggaggtttgcgttgatttcacaaaaagtcttattaaaaaaatacagcacgtttaa

SEQ ID NO: 61160 - protein, 184 aa, Unknown
  Obtained from environmental sample
  DOMAIN (1)...(168): Dephospho-CoA kinase
  misc_feature (1)..(184): Xaa is any amino acid
MLAITGLIGSGKSLVASVVRAEGFEVLDADALAHELYKENADLRKKIAEEFGDKAIDEKGINRAYVSQLVFNDAQKLCLLESIVHPLMQKEIEKRNPPFIEAAVLYKWQDFAKKMQEVWVVQADENIRRERLLKKGMSESDIERRMKMQNNSQLLLNSQLIINNSTKEVCVDFTKSLIKKIQHV

SEQ ID NO: 61161 - DNA, 1032 bp, Unknown
  Obtained from environmental sample
  misc_feature (1)..(1032): n is a, c, g, or t
ttgggaattattaggcaattgcgtagaacgactgttaacctgattgaaaaagcgcgcctgacgggaatcaggatcagaaagaaaacgtattttccggtggatattgacacgtcgccgatggacaattccaaaacgaaaaaggaaggggtcagctatacatataaaaagtttgagggataccatccaatctttgcctacatagggagagaaggctacatgatagacaacgagctgcgccccggctcgcagcattgccaggagggaacgccggagttcttaaggctgctattggaaaggcttccggacaatctgaggggcctgccgctgttgtttcgtttagacagcggaaatgacagcatagataccataaaagcaatatttaacgatgccaacgcaaagaaccggtttctgatactaaagcggaatgtccgaagggaaaaaggcgaggattggcttaagtacgcgcaagagcacggcaaagcaaaccaggcaaaagccggtaagatcgtctggaccggccatgcatatgacattaatcctgacggctttaataagattcattgcgtatatgagataacagaacgaacgatagatgaatatgggaatccattgcttatccacgacatagatgtaaacacatggtggactaatttgtcgtatgcagcggaaacaataatagggctttatcacgaccatggaaccagcgagcaatatcatagcgagttgaaacatgatatggatattgaacggctgccgtccggaaaattcaatgtaaacgaactgtacctgatgatagggatgaacgcatataatgtattgcggtttatagggcagagcgccaaagcgatgaaaacagcattgcccataaagagccgcagttcgcggatgcggcttggcaaagttatccaaaacattattggcattgcggtaaaatatattagccatgccggaaagaaaataatcaaactctgggaaggcaatccctggaccctgctatttttcaaacttgactttatctttcagcgcctgtga

SEQ ID NO: 61162 - protein, 343 aa, Unknown
  Obtained from environmental sample
  DOMAIN (32)...(272): Transposase DDE domain
  misc_feature (1)..(343): Xaa is any amino acid
MGIIRQLRRTTVNLIEKARLTGIRIRKKTYFPVDIDTSPMDNSKTKKEGVSYTYKKFEGYHPIFAYIGREGYMIDNELRPGSQHCQEGTPEFLRLLLERLPDNLRGLPLLFRLDSGNDSIDTIKAIFNDANAKNRFLILKRNVRREKGEDWLKYAQEHGKANQAKAGKIVWTGHAYDINPDGFNKIHCVYEITERTIDEYGNPLLIHDIDVNTWWTNLSYAAETIIGLYHDHGTSEQYHSELKHDMDIERLPSGKFNVNELYLMIGMNAYNVLRFIGQSAKAMKTALPIKSRSSRMRLGKVIQNIIGIAVKYISHAGKKIIKLWEGNPWTLLFFKLDFIFQRL

SEQ ID NO: 61163 - DNA, 561 bp, Unknown
  Obtained from environmental sample
  misc_feature (1)..(561): n is a, c, g, or t
atgggtattttgcgtcaatttgcgagaaaaaagcgtattttngtgacccggttaaagaaaaaagcggtatataagcgggttaaaaagaaccctgtaaaggagggcgggaatatcatatcggattatgaaataataataccgtcaatgccgcaagggacagtgctgcgcaagataacagcgcgcgatcctgaaacgaagaaacgggttgtgcttttaacgaataatctgaagtggtcggcacagaccgtggcaggtgtatataaggaacgctggcagatagaattattttttaaagcgataaaacaaaacttgaagataaagaggttttacggaaactcaaggaacgcggtaatgacgcagatatggatagcgttgatagcgtatctgttattttatctgttgaaagtgaagtcaaagaatttaaaactgtcatttaccaattttatatcggtgataaagacaatgttgtttcagaggatttctctttttgattttttaagtggcacaagccctcctccaggatctaatgcatcatttgaatgtcagccggagaccgtatga

SEQ ID NO: 61164 - protein, 186 aa, Unknown
  Obtained from environmental sample
  misc_feature (1)..(186): Xaa is any amino acid
MGILRQFARKKRIXVTRLKKKAVYKRVKKNPVKEGGNIISDYEIIIPSMPQGTVLRKITARDPETKKRVVLLTNNLKWSAQTVAGVYKERWQIELFFKAIKQNLKIKRFYGNSRNAVMTQIWIALIAYLLFYLLKVKSKNLKLSFTNFISVIKTMLFQRISLFDFLSGTSPPPGSNASFECQPETV

SEQ ID NO: 61165 - DNA, 747 bp, Unknown
  Obtained from environmental sample
  misc_feature (1)..(747): n is a, c, g, or t
atgatcgcatacaaacgcagcctgggttataagataacgattgaggcccaagaattgagacggtttgcctcctttaccagaactatcgactataacgaatcgttgacttctgaactcgcggtgcggtgggcgtcccttaatcccggctacagccggttttatatggcccggcggcttgaaaccgtccatacctttgccaactatattgccgcatttgattccaacgctcaaataccgcagacaggcgtgtttggcaagtgccattgccggtccagtccgtatatttattcagacgaagagatatccctgctgattacagaggcggggaagctgttttcacctgacggcatacgggcccgtacggtttcgacggctgtcggccttctgagatcaacagggattctggtttccgaactcaccctgcttaaaatgaaaggacgcccgtctgtcagaaggctgtctttttataagcagttcccaattctaaaaagaacggattgtccccctccacccaagcgcaacggaggaattaacgaagtaccgcgcgttttatcacaggcaagcttgggcaaagaaatgaaacggattatttttttgtcggttcatacggccgcaccttcaataccagagcttttgaatatgcttttacccttattcggcctgttttattcactaatagtgtatctcagagaagacgaaattgcaggctttatgatatacggcatactttcgcctgtgaaacggtaa

SEQ ID NO: 61166 - protein, 248 aa, Unknown
  Obtained from environmental sample
  misc_feature (1)..(248): Xaa is any amino acid
MIAYKRSLGYKITIEAQELRRFASFTRTIDYNESLTSELAVRWASLNPGYSRFYMARRLETVHTFANYIAAFDSNAQIPQTGVFGKCHCRSSPYIYSDEEISLLITEAGKLFSPDGIRARTVSTAVGLLRSTGILVSELTLLKMKGRPSVRRLSFYKQFPILKRTDCPPPPKRNGGINEVPRVLSQASLGKEMKRIIFLSVHTAAPSIPELLNMLLPLFGLFYSLIVYLREDEIAGFMIYGILSPVKR

SEQ ID NO: 61167 - DNA, 1026 bp, Unknown
  Obtained from environmental sample
  misc_feature (1)..(1026): n is a, c, g, or t
atgaaacaaaacaacgcggttgacggcagtaaaagttttcacgcgcttatccagaaatttttcctgaaatggttgttagcgcagcggaatgtttcgcctgagacggtaaaatcctacagggattgtttgaggattttcatcaaatatctggaaactgctcataaaatcaaaccctctgcaataacggttgattgtctgggagcggagtatatcctggcattcctttctttccttgaaaaagaacgcggcaaccagccaaaaactattaacacaaggctttcggcattacatagctttttaaggtttctttcctttgaaatccctgagtacagcagtttactaaaccgcagcctcatgcttccctatcgaaaagaagaaaggcggcagatggattttctaaccaaagatgaataccaggctcttgcagatgcttgcggacaggatacggaacttggctgccgtgaccggcttatgctgcttctgctgtataatacgggcgtcagggtgtccgaacttgtcggcattacagttcaggatataaccgccgatgccaacggctgtccgtcgtacattcgcattcacggcaaaggccgaaaagaacgcgatgtccctttgtggaaaagcacggcggcgttcctgcggaagtttctggaattacatgccgcaggcaataatgcaaaactctttgccaaccgcgctaacggggaactgacacgttcaggggtgcgttacaggctcggatgccttgttaaaaaagcgtcggaaaaagttccgtcaatgaagcaaaaaacaatttcaccgcatactttccgccacacggccgcgcttaatcttttacaatccggggtcgacatttcaacaattgccatttggctcggccacgaaagtataataacgacgcataaatatatggaggcggacatggaaatgaaacgccgcacccttgagaaaatccaggaaccgggaggcaattcgtttcaattcaggccggatgatacggtgattgctttccttgattcattataa

SEQ ID NO: 61168 - protein, 341 aa, Unknown
  Obtained from environmental sample
  DOMAIN (16)...(107): Phage integrase, N-terminal SAM-like domain
  misc_feature (1)..(341): Xaa is any amino acid
MKQNNAVDGSKSFHALIQKFFLKWLLAQRNVSPETVKSYRDCLRIFIKYLETAHKIKPSAITVDCLGAEYILAFLSFLEKERGNQPKTINTRLSALHSFLRFLSFEIPEYSSLLNRSLMLPYRKEERRQMDFLTKDEYQALADACGQDTELGCRDRLMLLLLYNTGVRVSELVGITVQDITADANGCPSYIRIHGKGRKERDVPLWKSTAAFLRKFLELHAAGNNAKLFANRANGELTRSGVRYRLGCLVKKASEKVPSMKQKTISPHTFRHTAALNLLQSGVDISTIAIWLGHESIITTHKYMEADMEMKRRTLEKIQEPGGNSFQFRPDDTVIAFLDSL

SEQ ID NO: 61169 - DNA, 1455 bp, Unknown
  Obtained from environmental sample
  misc_feature (1)..(1455): n is a, c, g, or t
ttgacaatgaaagccgtccatttccaaatcgagattgataccgacaggaacgcctaccgcgccgcggaagaagcgcaggtaaagataaaggtttttctgaacgacaagccggccgcgaatacggaagtaagttttttgtccgttgaccgaggggcacttgacctcattgactaccatgttcccgatccgctcacctctttttacgatccgcagcattttcccctgggagtgcgtggcgcggacagccgttcccttctgatcgatccggtgacgtataacatttccgatctccagggcggcgacagtgatgatgaggaaaaagggagggacggggcggatcgttttaatgacgttatgaaagaacgcaaggattggaggccgacggcggtttttgaaccgtaccttgtcaccgggccggacggtactgtcaccgtcaaattcaagctgcccgattcgcttaccagttaccgctgtaccgcgcttgccgtcggcgttaacaatttcggcattaaggaacaggacctgagggtaagcgccccgctgacagcgattgccgccctgccccgcaaactccgctggcgcgacaccggaacggtttcgctcatactgacgaaccttgaaaacaccgcggtagaggccagcgtaacgcttggctcggattcattcgccgacgctgacgcagttatcgaaattgacggcgagacttccaaaaccgtgaaggtgcttcccggcgcgtcgcaggaagtttcattcaaagtcgcagccgtcagcacaggccttgcccggcttacctttaccctgaactctcccgaagtgaacgagcgcatcatcagaacgcttcttgttgacaggcccagcctgaccgaaactgtcaccacaatcggcaatctgagcccggataatccttttgccgaggaaggctttgtactgccctcgctggttcccgaagggacaggcaatatttccgtaagcctttcagcttcccgtttggcggctcttaaagaagccgtgcgctatttgctggattacccctacggctgtattgaacagcgcacagcccgcctgctgcccattgtcgcctttggcgaataccttgacacattcgctcttgacagcccgcttaccgcattaggcgagtaccttgacacattagatctcgcgagcccgctgcgcgggttctctccctggaacccccaaaaacttgttgaaaaagaattgttggaactcaccagattccagcttgcagacggctcattcccatactggcccggtggcagttacggcaatcttttagtcagcatcaggatggcgcatatcgtggcgcttgcaaaggcaaaaaatatgaagattcatgactcgctggatacccggaaacttttatcgtatatcggaacagtttcacgcgaagatgaagatccgtttaaaaaaggttattcattgggatcagaaccatga

SEQ ID NO: 61170 - protein, 484 aa, Unknown
  Obtained from environmental sample
  misc_feature (1)..(484): Xaa is any amino acid
MTMKAVHFQIEIDTDRNAYRAAEEAQVKIKVFLNDKPAANTEVSFLSVDRGALDLIDYHVPDPLTSFYDPQHFPLGVRGADSRSLLIDPVTYNISDLQGGDSDDEEKGRDGADRFNDVMKERKDWRPTAVFEPYLVTGPDGTVTVKFKLPDSLTSYRCTALAVGVNNFGIKEQDLRVSAPLTAIAALPRKLRWRDTGTVSLILTNLENTAVEASVTLGSDSFADADAVIEIDGETSKTVKVLPGASQEVSFKVAAVSTGLARLTFTLNSPEVNERIIRTLLVDRPSLTETVTTIGNLSPDNPFAEEGFVLPSLVPEGTGNISVSLSASRLAALKEAVRYLLDYPYGCIEQRTARLLPIVAFGEYLDTFALDSPLTALGEYLDTLDLASPLRGFSPWNPQKLVEKELLELTRFQLADGSFPYWPGGSYGNLLVSIRMAHIVALAKAKNMKIHDSLDTRKLLSYIGTVSREDEDPFKKGYSLGSEP

SEQ ID NO: 61171 - DNA, 912 bp, Unknown
  Obtained from environmental sample
  misc_feature (1)..(912): n is a, c, g, or t
atgacatccggcgaaggtattgaaggcgcggcctaccgctaccggctcgaagcctcggtgcaggacgcggcccgccaggaaatatccgcccgcgccctcactttggttcatcccgcttctttttacattgccgcgcgtcttgattcgggaacaattaaaacccctatagtcggaacgacagaaaccccctccacatatttcctcagcgcgggacagccggcgacattaagctgggcgcttgtttcacctgacggcgacggagcgcagaatcagggcggcgacttgtcgatacagcttgtccgccatgaatggaaacaagcgcgccaacagggaacaggcggcaggatcaacctggtatgggaacgggttgaggaaatcgccgcgcagagaaacataaaaattacaaccgggaacaattccggcgtctttaatttcacgccggacaagagcggtctctgggaattcaggctttccagccgcgatcaaaaacaaaggatagccgcgaccagttcccgtttttacgtcagcggcgcgggatgggtgcgctgggactctgatgacgtggataccatagccctcaacaccgaccgtaaaagctacgcgccgggtgagacggcgaaaataatgatacgctcgcccctggaaaagggcaaatacctgttaacgctggaacgcgaggggatcatctcccaaaagatcattgagcttaacggctccgctctgactatagacatacccatcgaagaatcctatgtgccggtaatctacgccgcgcttagttcctatactgtgcgctctgctgctccgaataacacctactacgagcctgacctggacaaacccaagggaattttcggcgttacgccgatttatattgacaatgaaagccgtccatttccaaatcgagattga

SEQ ID NO: 61172 - protein, 303 aa, Unknown
  Obtained from environmental sample
  misc_feature (1)..(303): Xaa is any amino acid
MTSGEGIEGAAYRYRLEASVQDAARQEISARALTLVHPASFYIAARLDSGTIKTPIVGTTETPSTYFLSAGQPATLSWALVSPDGDGAQNQGGDLSIQLVRHEWKQARQQGTGGRINLVWERVEEIAAQRNIKITTGNNSGVFNFTPDKSGLWEFRLSSRDQKQRIAATSSRFYVSGAGWVRWDSDDVDTIALNTDRKSYAPGETAKIMIRSPLEKGKYLLTLEREGIISQKIIELNGSALTIDIPIEESYVPVIYAALSSYTVRSAAPNNTYYEPDLDKPKGIFGVTPIYIDNESRPFPNRD

SEQ ID NO: 61173 - DNA, 1386 bp, Unknown
  Obtained from environmental sample
  misc_feature (1)..(1386): n is a, c, g, or t
atgagtaatcgggaacaggcgcctaccaatttgatacctctggaaattttagacactactctgcgggacggcgctcagggcgagggaattactttttccgtgcaggacaaacttgacgtggttcgcgctctggatgatctgggaatctcctggatagaggcggggaaccctgggagtaatccgaaggatatggaatttttccgtcttgccggaagcctcaatcttaaacacgcgaaactttgcgcctttggttctacgcgtaagaagggagtcaaggcaagcgaagacccaggcgtgttaagcctgcttgacgcgcagactcaggcggtagtgatcttcggcaaaagctgggaccttcatgtgacggaagtgctgcgggtaagccatgaggaaaatcttgccatgattgcccagacaatcgcgtttcttaaagaaaacgggcggcaggttttttacgacgcggaacatttttttgacggctggaaggcgaaccccgagtacgccctttccactttgaaaacggcagtatcagccggagcggaacatataatactgtgcgacacaaacggcggcgcgtttcctgacacgatagagaaggcggttaaggaagccgcgaagattgtcggaggttctccttgtattttgggcattcacgcgcacaacgacgcggacatggcaagcgcgaacacgataacagccgtccttgccggatgccgccacattcagggaactcttgtcggtttcggcgagcgctgcggcaacacaagccttgcggcggttattccaagccttgaactcaagctgggtttccgctgtctgcccgaaggaaaaatggaaatgctttccgagataacccggattgtcgcggagacggcaaatgtagccgtgccgggcaatatgccttatgtgggaagccacgcgtttacccacaaggcgggaatgcacgcggacggaattctaaaagacagcaagtcatttgagcatatagatccttcccttgtcggaaacgaccggcattttttaatgagcgaggtaggcggacgctccgcgatagcggaaagggtgaagaagatcgagccttccataacaagggatcacccggtaactgccgccatcgcgcaaaaactgaaaacccttgaggcggagggctggcagtttgagggggccgacggcagtttcgaacttatggtgcgccgcgagcttgggcgttacaagccgctgtttaatattaaggcttaccgtgtggtaagcgaacacccaacaggcgagacaatagcatgttcccatgcctgggtcaaagtgcatgttgaaggacaggaggacgtcgccgccgccgagggagacgggcctgttaaaaaaggggacggggcgctccgcagggcttaa

SEQ ID NO: 61174 - protein, 461 aa, Unknown
  Obtained from environmental sample
  DOMAIN (22)...(294): HMGL-like
  misc_feature (1)..(461): Xaa is any amino acid
MSNREQAPTNLIPLEILDTTLRDGAQGEGITFSVQDKLDVVRALDDLGISWIEAGNPGSNPKDMEFFRLAGSLNLKHAKLCAFGSTRKKGVKASEDPGVLSLLDAQTQAVVIFGKSWDLHVTEVLRVSHEENLAMIAQTIAFLKENGRQVFYDAEHFFDGWKANPEYALSTLKTAVSAGAEHIILCDTNGGAFPDTIEKAVKEAAKIVGGSPCILGIHAHNDADMASANTITAVLAGCRHIQGTLVGFGERCGNTSLAAVIPSLELKLGFRCLPEGKMEMLSEITRIVAETANVAVPGNMPYVGSHAFTHKAGMHADGILKDSKSFEHIDPSLVGNDRHFLMSEVGGRSAIAERVKKIEPSITRDHPVTAAIAQKLKTLEAEGWQFEGADGSFELMVRRELGRYKPLFNIKAYRVVSEHPTGETIACSHAWVKVHVEGQEDVAAAEGDGPVKKGDGALRRA

SEQ ID NO: 61175 - DNA, 813 bp, Unknown
  Obtained from environmental sample
  misc_feature (1)..(813): n is a, c, g, or t
atgaccgctaaagacgcggctcaggccgcggacttcatcatgatcctcatcaatgatgagaaacaggccgccctttacagggaatcaatcgcaccggctcttaaaaagggaaagactctttcctttgcccacgggttcaacattcatttcgggcagatagtcccgcccgcggatgtcaatgttgtgatgatcgcgcccaaggggccgggtcatactgtgcgcgagcagtacaaaaacggcgccggcgttccctgccttatcgccgttcatcaggacgcaagcggagacgcgaaaaaactggcccttgcttacgcggcgggcataggcggagcgcgggcgggtgtattggaaacaacatttaaggaagaaaccgaaaccgaccttttcggcgagcaggcagttctgtgcggcggcgtttccgcgcttatgaaggccggctacgaggtgcttgtggaagcgggctaccagccggaaagcgcctattttgaggtaatgcacgagatgaagctcatcatcgatcttgtaaaccgcggcgggctttcctttatgcgctattcaatttccgacaccgctgaatacggcgactatgttacagggccaaagatcataacagaagaaacaaaggacacaatgcggcaggtattgaaggaaatccaaaacggcagtttcgcgcggaactggatacttgaaaatcaggtgaaccgtccgttctttaaccgcatgagggcgcttgaagctgaacatccaatcgagaaaaccgggaaagagcttcgcggaatgatgccctggttaaagaagaacgaggaaaaataa

SEQ ID NO: 61176 - protein, 270 aa, Unknown
  Obtained from environmental sample
  DOMAIN (1)...(114): Acetohydroxy acid isomeroreductase, catalytic domain
  misc_feature (1)..(270): Xaa is any amino acid
MTAKDAAQAADFIMILINDEKQAALYRESIAPALKKGKTLSFAHGFNIHFGQIVPPADVNVVMIAPKGPGHTVREQYKNGAGVPCLIAVHQDASGDAKKLALAYAAGIGGARAGVLETTFKEETETDLFGEQAVLCGGVSALMKAGYEVLVEAGYQPESAYFEVMHEMKLIIDLVNRGGLSFMRYSISDTAEYGDYVTGPKIITEETKDTMRQVLKEIQNGSFARNWILENQVNRPFFNRMRALEAEHPIEKTGKELRGMMPWLKKNEEK

SEQ ID NO: 61177 - DNA, 612 bp, Unknown
  Obtained from environmental sample
  misc_feature (1)..(612): n is a, c, g, or t
atgagcaaaattttactacatttaaattgcatgttttttttatccgcaatatccagattattcgcaccaaagctcgtggaagaggcggcgggttttttagacgaaaaccctgagtatatgtttgtaaacaatagaaaatcatttatgaaaatgctgcccattttatcgcaagcaaattcttgcattatggacaccgaagcagattctatgtatcactaccaagaaaaactgagcctgatacagataagcgttggcaaatatcactggctcttggaccctctcagcaagctcaacataaaacagctttggaaatgcaaagcccttaaaaacataaccttccacgcctgcgactacgacttgcgcctattatccagattccacgattttcaccccgaaagcatttacgacacttccattgccgcaaagcttttgggcgaaaagcaaaccggacttgcggcattggttgaaaaatattttggaataaaattaaacaaggcaaaccaaaaagcagactggacacgccgcccgctttctccagaaatgtgccactacgcaatgctagacactgtttatttagaggcaataaaagaatttcaatgcaaaaaaacttga

SEQ ID NO: 61178 - protein, 203 aa, Unknown
  Obtained from environmental sample
  DOMAIN (39)...(202): 3'-5' exonuclease
  misc_feature (1)..(203): Xaa is any amino acid
MSKILLHLNCMFFLSAISRLFAPKLVEEAAGFLDENPEYMFVNNRKSFMKMLPILSQANSCIMDTEADSMYHYQEKLSLIQISVGKYHWLLDPLSKLNIKQLWKCKALKNITFHACDYDLRLLSRFHDFHPESIYDTSIAAKLLGEKQTGLAALVEKYFGIKLNKANQKADWTRRPLSPEMCHYAMLDTVYLEAIKEFQCKKT

SEQ ID NO: 61179 - DNA, 921 bp, Unknown
  Obtained from environmental sample
  misc_feature (1)..(921): n is a, c, g, or t
ttgactataacgaatgagtcttcttacgatatagaaggcgttaaatggagcaatggcaatgcggattttggctcaattaaaatagcaggttccgttgaggtgcctgttgatacaggcagcggttatgtgttctttacgagagtctccgataagctgaatgttcgtactgaatatgtttcagtgaagcagggcgagcgaaagaaatacatcattgcagatacaactattgtggttgaattgggctacggagacaacaagaaaccgcttggcacaataaaaaccgccaatccaaacccaagcagctcgtctgttgctaaaagctcaagttctgcgggggtgtcttcgtcaagcagttcgtctctcgctcaaagttcaagttctgtagcagtttcttcgtcaagtgtactgcctagcagcagttctagtgtaccaccgagcagttcgtctctcgctcaaagttctagctctgcggtggtggtttcgtcaagctcaaagccgagcagtagctccagcgtaacaccgagtagttcaagcgttggttgcacagcggccaataacacttcaacacagtattgctcaaatggcactatgaaaacatacggttcggtaacttacgaaggacaaatctacaaaactgtggttataggtgaacagacttggatggctgagaatttgaatttcaatgcaagcggtagcaaatgtggcagtgttcttactggttcaggcacgcttggcgatgccaacacatcaacttgcgatacctacggcaggctctacaactggtcaacggcaatgggcggcgtttgccctgctggttggcatttgccaagcgatgcggaatggaccgcactgacgacttttgtcggcactaatccaggaaccaagcgaaagcaattctccttgggaatntcggccatctga

SEQ ID NO: 61180 - protein, 306 aa, Unknown
  Obtained from environmental sample
  misc_feature (1)..(306): Xaa is any amino acid
MTITNESSYDIEGVKWSNGNADFGSIKIAGSVEVPVDTGSGYVFFTRVSDKLNVRTEYVSVKQGERKKYIIADTTIVVELGYGDNKKPLGTIKTANPNPSSSSVAKSSSSAGVSSSSSSSLAQSSSSVAVSSSSVLPSSSSSVPPSSSSLAQSSSSAVVVSSSSKPSSSSSVTPSSSSVGCTAANNTSTQYCSNGTMKTYGSVTYEGQIYKTVVIGEQTWMAENLNFNASGSKCGSVLTGSGTLGDANTSTCDTYGRLYNWSTAMGGVCPAGWHLPSDAEWTALTTFVGTNPGTKRKQFSLGXSAI

SEQ ID NO: 61181 - DNA, 564 bp, Unknown
  Obtained from environmental sample
  misc_feature (1)..(564): n is a, c, g, or t
atggttatgcccttcgttaaacgtccgcatcccgactattaccaaaccgccattgccagctatattttgggcggcagctcattttcttccagacttacaaacacagtcagaacccaaaacgggcttgcatattccatttacagctttgccaaatccgattacgaagatgttgctctctctggaataagtttgcaaacaaaggtggaatctgccaaaatcgctttgcagttgataagggaagaggtgataaaactcggcaaggaaggaccaaccgatgaagaacttaattttgcaaaaaaatctcttatagaatctatgcccgctatgtttgaaaacgcagaaacaacggcgaacacctttgcggtgtctgaattcaacggtcgcagtttggagcattacagggaatatccagaaaaattaaaagcggttaccaaagaacaggttaaggcaatgaccgcaaaatatttcaatcccgattcattcaaagttagcatagttggatccgctaataaaatgggtttggatagcgtgacggttatccctatttctgcgcttgaattttga

SEQ ID NO: 61182 - protein, 187 aa, Unknown
  Obtained from environmental sample
  DOMAIN (4)...(102): Peptidase M16 inactive domain
  misc_feature (1)..(187): Xaa is any amino acid
MVMPFVKRPHPDYYQTAIASYILGGSSFSSRLTNTVRTQNGLAYSIYSFAKSDYEDVALSGISLQTKVESAKIALQLIREEVIKLGKEGPTDEELNFAKKSLIESMPAMFENAETTANTFAVSEFNGRSLEHYREYPEKLKAVTKEQVKAMTAKYFNPDSFKVSIVGSANKMGLDSVTVIPISALEF

SEQ ID NO: 61183 - DNA, 825 bp, Unknown
  Obtained from environmental sample
  misc_feature (1)..(825): n is a, c, g, or t
atgtgctttctgccgatacacacggcaaagaaattaaaaaagacagaactttttttncagccgaaaacattgaagttcctccagtggacggccgcggcaaagaagccgcttctttgcaaaaagagacggaaaaaaacggcaaaccgggtgaagcgcaaaaccgcagcccgccgcgacaggtttcttttgagtcgcgacatgcgctcttccggcgcggatggccaaagcagttcaatgcaggttaaagcaggcgctcagattgccgagcgtgtgcaagatgccccggttaaggaaataacccttgagcttaaactgccgagtcaggcgcaaagctcggcgcagacggcatgggaggcaaaggcaggcggtgtcgcaatagagaacatgcttgcgagggaactgcaccagaactttaacggcgacattgtccgccatgcttccatggcgcttcatgacggaggagagggagttataaaacttgccctaaaaccggacagccttggaaatgtaaagatacacctgaaaatgtccgaaaacaagataacggggcatattgttgtagaaagcgaagaagccttgaacgcttttaagaaggaaatttcttctttggaacaggctttcagggaatccggttttacaaacgcccagcttaatctgtcattaaccgcggatcagcggaatacggattggcaggaacagaaagcgccttcctttttacaggggattgccgcttcccgttacgatggatcttttaacggagattcattaccagttgtcgatgtcttttttggacagagacacggttcaataaatatgcttgcgtaa

SEQ ID NO: 61184 - protein, 274 aa, Unknown
  Obtained from environmental sample
  DOMAIN (80)...(223): Flagellar hook-length control protein
  misc_feature (1)..(274): Xaa is any amino acid
MCFLPIHTAKKLKKTELFXQPKTLKFLQWTAAAKKPLLCKKRRKKTANRVKRKTAARRDRFLLSRDMRSSGADGQSSSMQVKAGAQIAERVQDAPVKEITLELKLPSQAQSSAQTAWEAKAGGVAIENMLARELHQNFNGDIVRHASMALHDGGEGVIKLALKPDSLGNVKIHLKMSENKITGHIVVESEEALNAFKKEISSLEQAFRESGFTNAQLNLSLTADQRNTDWQEQKAPSFLQGIAASRYDGSFNGDSLPVVDVFFGQRHGSINMLA

SEQ ID NO: 61185 - DNA, 600 bp, Unknown
  Obtained from environmental sample
  misc_feature (1)..(600): n is a, c, g, or t
atggaaggaacaatgcaaatagtatttggaattttagcggggcttttgggattatactctctgctgataatcatcaggattattcttacatggttttcagacgggcagttcggcagaccggtggaaattttgtctcttattaccgatccgtatcttgactggtggcggcgaaggctcaaccttagggcaggctatctggacctctcccctattgtcgcaatggcagccctttctgtcgtgcagacgatctgctccgccattgcccaaaccggaagaatcaccctggggcttttacttgcggtattcctttcagcgctatggtcggcagtttcctttttcctgggcttctgcctcgtagtgcttgtactccgcctgattgcctatcttatcaacgccaatatgttcggcatattctggcgggtcatagattccatatcaaagccgatccagtaccgcctcagcagaatctttttcagaaaccggctggttcattttacaacaagcatcatcgtctcgattctcgttctgaccgctctttggattgccggaggcatcgtcatacagataatttccggcattttattcaggctgcccctataa

SEQ ID NO: 61186 - protein, 199 aa, Unknown
  Obtained from environmental sample
  DOMAIN (5)...(87): YGGT family
  misc_feature (1)..(199): Xaa is any amino acid
MEGTMQIVFGILAGLLGLYSLLIIIRIILTWFSDGQFGRPVEILSLITDPYLDWWRRRLNLRAGYLDLSPIVAMAALSVVQTICSAIAQTGRITLGLLLAVFLSALWSAVSFFLGFCLVVLVLRLIAYLINANMFGIFWRVIDSISKPIQYRLSRIFFRNRLVHFTTSIIVSILVLTALWIAGGIVIQIISGILFRLPL

SEQ ID NO: 61187 - DNA, 1035 bp, Unknown
  Obtained from environmental sample
  misc_feature (1)..(1035): n is a, c, g, or t
atggacgagtaccgggacttatgggaaaaaacggtaaaggttgatttaggtcatctggcaggccctgaaaccgggaatcaaattcttgttggcattattaaagcaatcagaattgtgaattcaaagtcgggaaaaatggcgtatgtaaccattgctgactacaatggcgaaattgatatgatatttttcccccgtgtctgggaggcatggcaggacagaatacaggaagaccagattgccattgtcaaaggcaggattgattatcaaaaagacagggacaagtacagttttattgccgagggtttaatcgacagccgggaagttgaaactgtaataaccgaagaagacgcgctccggcgcaagcgggaaaaattccattcaacgtggctttatatggccgacctgaaaagcggcgggcttgccagcgccgggaaaggcagctacacggtgattgggcagattgtctctctaaaggaaacaaaagataaaaacggcgatgacatggcattcggaactttgcgggactttgagggtgatattgaccttgtgttctgggcaaaaacatggaaagaaaaccgcgacttactgggtacggacgaatttgtggcgcttaaagggagccttgatccggaaagagaccgcaacccgcagaagccaagcctgaaagtgagcaaagttgacaaccttgcctctttaacccgttcggcggcgcgaaaagcggaagccggggagcagccaagagttccgccgcaggaaactatgcaaaaaaatgagaattctcctaatacagagcagcccgcccttaccgaaatccatatccggctgcaaaacggcgctgtcgacagggacgataacatacatccgctacggaattaccttatgggcaacccgggcccatgtccggtttatatccatattggagaaaaaattattaaggctaacaaaggcttaagccttgaagccgaaaaggaagcgttaggcgtgctggaaggctgtatcggggtcgcccagtcatggaaggaacaatgcaaatag

SEQ ID NO: 61188 - protein, 344 aa, Unknown
  Obtained from environmental sample
  DOMAIN (27)...(105): OB-fold nucleic acid binding domain
  misc_feature (1)..(344): Xaa is any amino acid
MDEYRDLWEKTVKVDLGHLAGPETGNQILVGIIKAIRIVNSKSGKMAYVTIADYNGEIDMIFFPRVWEAWQDRIQEDQIAIVKGRIDYQKDRDKYSFIAEGLIDSREVETVITEEDALRRKREKFHSTWLYMADLKSGGLASAGKGSYTVIGQIVSLKETKDKNGDDMAFGTLRDFEGDIDLVFWAKTWKENRDLLGTDEFVALKGSLDPERDRNPQKPSLKVSKVDNLASLTRSAARKAEAGEQPRVPPQETMQKNENSPNTEQPALTEIHIRLQNGAVDRDDNIHPLRNYLMGNPGPCPVYIHIGEKIIKANKGLSLEAEKEALGVLEGCIGVAQSWKEQCK

SEQ ID NO: 61189 - DNA, 1830 bp, Unknown
  Obtained from environmental sample
  misc_feature (1)..(1830): n is a, c, g, or t
atgataaaacaggctgttattgttgcggcgggtcttggttcccgtcttaaagaaaaaacaattttaaaaccaaaaggttttcttgaattgggtgggattgccatcgtagaatggtcggttcaaaaactgcttgcctgcggtattgagaaaataattatcggcacgggctaccatgccgaagcttacaatgaacttgcgaaaaaatatcctgcgatacaaaccgtttttagcgccgattatgaaacaaccagcagtatggctacattgagcgtatgcgccccctttgtaagcggcgattttttcctgttggaatccgaccttatctatgacagcatagggctttctgtcctttgcaatgatattcatgaaaatgttattctcgcttccggcgcgacaaattccggtgatgaagtgtaccttgaatcagctaacggatcttttttaaaagctctctcaaaaaataaaattgaactggtttcaatttatggagaacttgttggaatttcaaagatttcccattcactgctttccgccatgtgcgcatattacggaaaaaaacgcattgagtccccgaaacttgattatgaacacgcaatcatggcgtgtaccgcttcaaattcggtatttatccgtaaaattgaaaattacgcgtggcgcgaaattgacgacgagagccatcttgaaatggcccggaaatttatactgccgcttattttagaaaatgagtcgcttcggcagatacgcagagaagtccttttaaatccgggtcccgctacaacaagcgacagcgttaaatacgcccaggtttgcgccgacatctgtccgcgtgaaaaagaattcggcgacgttatgaagtggatatgcagggagcttacttcctttgtcgccgacccgtccgaatatgaaacggtatttttcggcggttccggtactgccgccgatgaagtgatgatttcatcctgcgttccggaagccggccatattcttattgttgataacggctcttacggccagcggcttgctaaaatcgcctctgtttataaaattaaccataccgtttttaaaagttccacctatgaaaaaatagacattacggcgcttgaaaatgaatttaaaactggaaaatacactcatcttggcattgtataccacgaaaccacaacgggtttgctcaacccgcttgatattatttgcccattggctaagaaatataacattgtaacgattgttgacgctgtaagcatatatgccggaaaacctatggatttaaaaaaacttggcattgattttatggcttccacttccaataaaaatatacagggaatggcgggcgtttgttttgttatctgtaaaaaagatgagcttgaaaaaacaaaaacaattccaatgcgaaattattatcttaacctttatgatcaatacgcgcatttttccaaaacgggacaaacccgttttacccctcccgttcagtccctatatgctctacgacaggcgattcttgaaacaaaacaggaaactgtggaaaaacgttgggagcgttatactgaatgttggcgtattcttgtagaagcggttaaaaactttaatcttaaaatgcttgttaaagaagaagaccagtcccatttaataacggctatttttgatcctgatactccaaaatacagttttgaaggcttacatgatcttgcgcgtaaacacggatttacaatttaccctggaaaattgggtaatataaacacattcagaatcgcgaatatcggtgatattaaaccgcatgaaatgaaaagatttacggaagttctaaagatttatttagattcaattaaatga

SEQ ID NO: 61190 - protein, 609 aa, Unknown
  Obtained from environmental sample
  DOMAIN (250)...(583): Aminotransferase class-V
  misc_feature (1)..(609): Xaa is any amino acid
MIKQAVIVAAGLGSRLKEKTILKPKGFLELGGIAIVEWSVQKLLACGIEKIIIGTGYHAEAYNELAKKYPAIQTVFSADYETTSSMATLSVCAPFVSGDFFLLESDLIYDSIGLSVLCNDIHENVILASGATNSGDEVYLESANGSFLKALSKNKIELVSIYGELVGISKISHSLLSAMCAYYGKKRIESPKLDYEHAIMACTASNSVFIRKIENYAWREIDDESHLEMARKFILPLILENESLRQIRREVLLNPGPATTSDSVKYAQVCADICPREKEFGDVMKWICRELTSFVADPSEYETVFFGGSGTAADEVMISSCVPEAGHILIVDNGSYGQRLAKIASVYKINHTVFKSSTYEKIDITALENEFKTGKYTHLGIVYHETTTGLLNPLDIICPLAKKYNIVTIVDAVSIYAGKPMDLKKLGIDFMASTSNKNIQGMAGVCFVICKKDELEKTKTIPMRNYYLNLYDQYAHFSKTGQTRFTPPVQSLYALRQAILETKQETVEKRWERYTECWRILVEAVKNFNLKMLVKEEDQSHLITAIFDPDTPKYSFEGLHDLARKHGFTIYPGKLGNINTFRIANIGDIKPHEMKRFTEVLKIYLDSIK

SEQ ID NO: 61191 - DNA, 765 bp, Unknown
  Obtained from environmental sample
  misc_feature (1)..(765): n is a, c, g, or t
gtgttcggggttgtgatgggcggcagatttttccgtaaaacggacgcggacgaacttgtaaaaaaactcaccgttaaaatgataatggaacgctctcttatccgcgaaggcgaccgcgtccttatcgcggtttccggaggcaaggattcaaccgtccttgcgtgggcgctttcctctgtccgcccggcgcttaaatttaactatgaacttgccgccttgcacatttccacggatttttgcttctgctgtaaaaaaacagccctttccgaaaggctggaagaatggaaaattccctataacgatctttatgtgccggtcataggcagacttaaagaaggcaggaagatgaactgttactggtgctcaacgcagaggcggacggaactgttaaagtacgcggtggaaaacggctttaataagatcgcgttaggtcatcatctggacgacattgtcgaaactttttttatgaatatgtgcgccaaaggcaccttactcgctatgcccgtactgcttaattacagaaaatatccggtaagccttatccgtccgcttgccctgctggaagaaaaacaggtaattgcctgcgccgcaaagcaaaatatcctgaaaaacgcctgcacctgcccctacggacaaaattcaaaacgccgcgacattcgcaaacgcatagctgagtttacatcaggcaaagattcgggcgacatcaagcggcgcattttacaagctctgggcggcggattgacagattatttgaaagaagaataa

SEQ ID NO: 61192 - protein, 254 aa, Unknown
  Obtained from environmental sample
  DOMAIN (39)...(240): PP-loop family
  misc_feature (1)..(254): Xaa is any amino acid
MFGVVMGGRFFRKTDADELVKKLTVKMIMERSLIREGDRVLIAVSGGKDSTVLAWALSSVRPALKFNYELAALHISTDFCFCCKKTALSERLEEWKIPYNDLYVPVIGRLKEGRKMNCYWCSTQRRTELLKYAVENGFNKIALGHHLDDIVETFFMNMCAKGTLLAMPVLLNYRKYPVSLIRPLALLEEKQVIACAAKQNILKNACTCPYGQNSKRRDIRKRIAEFTSGKDSGDIKRRILQALGGGLTDYLKEE

SEQ ID NO: 61193 - DNA, 918 bp, Unknown
  Obtained from environmental sample
  misc_feature (1)..(918): n is a, c, g, or t
atggccgcaattctggcgacattcccggatccgggcaaatggacgcaggagcaaaaagcccaggccgttaattttgccgcgcttctggataccgcgcaaaagatgatcgccgcgaaaaccttcgccggaattgactacagcgccgaaaaggaaatgtttctgaataacgccggaaggacggacagcaagcacacacaccgcagttatagatccgcccttgcccggcttgaggcatacgcggagagggcgcatatttcccccatggaactgacaccggcaagggcagatgattttatttacagcatgaagggtaacggggccgccgcttccatccggcgcgacattgccgcctgttcaagtttctatacctggcttgagcgccgccatgaaggaataaaaaaccccttccgtggaaccaaagcaaggcccgcagagaaaacggaaaaagacctggtgatccccaacgccccggaagtgaaaaaaatcattgcaaggcttccaccctttgaagccgccgccgtttctgtaatggctttccggggcttgcgtatcggcgcacttccgggaatggagatcaacggcgaccgcttcaaaacccgcagcaagggcaaggccatatccggggagttacccggtaacgcactggcggcaataaaggcagccgatatagaggacaaacggcggccctttgccggaataactgaagaggccctggcccggcgcatcgagtaccacatagggaaacttcacaaggcaaagaaaataaaggccgcttacagttgccattccttccggcactttttcgcggtaacggaatggggcaaggataaagacataaagcgcatacaaaaattattgtcacattcaggcatacaggtaacggatcgctatttgcgttcattgggaataagggattga

SEQ ID NO: 61194 - protein, 305 aa, Unknown
  Obtained from environmental sample
  DOMAIN (49)...(129): Phage integrase, N-terminal SAM-like domain
  misc_feature (1)..(305): Xaa is any amino acid
MAAILATFPDPGKWTQEQKAQAVNFAALLDTAQKMIAAKTFAGIDYSAEKEMFLNNAGRTDSKHTHRSYRSALARLEAYAERAHISPMELTPARADDFIYSMKGNGAAASIRRDIAACSSFYTWLERRHEGIKNPFRGTKARPAEKTEKDLVIPNAPEVKKIIARLPPFEAAAVSVMAFRGLRIGALPGMEINGDRFKTRSKGKAISGELPGNALAAIKAADIEDKRRPFAGITEEALARRIEYHIGKLHKAKKIKAAYSCHSFRHFFAVTEWGKDKDIKRIQKLLSHSGIQVTDRYLRSLGIRD

SEQ ID NO: 61195 - DNA, 1656 bp, Unknown
  Obtained from environmental sample
  misc_feature (1)..(1656): n is a, c, g, or t
gtgcgttatattgaatcggggcgttaccccgggcgttatgagaataatattttttacaggcagcctacctccgtacttccccacgatgacggctcaacctgggtggttgcctacggcagcaacgagatagtaagaattgatgttaacggtattatcaaagatcgcaaaaggggcccgctgaacggcttcgaccggccttatgatctggtgaggggagcgggcgggcgtatgtaccttaccgaataccggggtggcagggtgagcatactcagcccccagggcgactggcagggttacatcggatccaggggcattggtcaggggatgtttgtcggcccgcagaatataacggctgacgaagacggatacctctatatcgtggactttggaaaccagcgcatatccaaatttgaccctgacggggtgttcgtcctctcattcgggcggaaaagcgcctttttcccgggcttcctttccccgaccggcattgccgcaaggaacggccgtatttttatcgcggactccgccgcaaaacggatttatatatttgatcccaacggaaactaccttggtgtgctagtcgagggccttaccgggcctgaaagcgtcagatttctctctgatggcaaactcgttgtagcggacaccaaccgggtactgttgatagaccccgattcagccataatacgggaacttggtctggccggaaatcaaaaaagccgcatagtctgcgccgacatggattcaaacggcaatctgctggcggcgaattttgcattgggcgaggtgggggtgctatcccgctttgaagatcttgcctccggcctctttgtgcagatagagcggatttacgcggatcagttccccctcgtaacggcggaaatccgggttgaggacaggcttcgccgccccattgtcgggctggaagcgcggaatttccttctcagtgaaggagggcggacggtaagcgaacagactttccttcagcctgcttatcgcgtaaaccgcgccgatatttcgattcttgtggagcgctcaccccaaaccagccgtctgcgagatgaccttgccgcggctgcccgcgacataaacaccgccctcggtgccagcgggaagatagtctcgtttatatcggcaggggagcagccggtacgcgaacggcacgagaatgccctggaaaccgccgccagggggcgtcaacaggactacagtccccgctggcgtcttgatcttggcctgaggcttgcggctacggacctccttgcggccgagaaaaagcgttcggttatttatgtcggctcaggcgcgccgggggctctggcctttgagcagtacagcctttccgaaatggccatgtaccttgcgaataacgccattatttttaatgccgttataattggcaacaaccccccaagcgaggaaattcgctacctgtgccgggaaacgggtggcagggttcttgccctgtacaggccccaggggatcagggaaatgatagaaaacctcgcatataccccgtcgggtctgtattccatcagctacaaatcgcttcttccaaccgatttcggcaggtcatggctgcccatagaagcggaagtgtatcttatggaacgttccgggcgcgacaccagcggttatttcccgccattggagtga

SEQ ID NO: 61196 - protein, 551 aa, Unknown
  Obtained from environmental sample
  DOMAIN (157)...(183): NHL repeat
  misc_feature (1)..(551): Xaa is any amino acid
MRYIESGRYPGRYENNIFYRQPTSVLPHDDGSTWVVAYGSNEIVRIDVNGIIKDRKRGPLNGFDRPYDLVRGAGGRMYLTEYRGGRVSILSPQGDWQGYIGSRGIGQGMFVGPQNITADEDGYLYIVDFGNQRISKFDPDGVFVLSFGRKSAFFPGFLSPTGIAARNGRIFIADSAAKRIYIFDPNGNYLGVLVEGLTGPESVRFLSDGKLVVADTNRVLLIDPDSAIIRELGLAGNQKSRIVCADMDSNGNLLAANFALGEVGVLSRFEDLASGLFVQIERIYADQFPLVTAEIRVEDRLRRPIVGLEARNFLLSEGGRTVSEQTFLQPAYRVNRADISILVERSPQTSRLRDDLAAAARDINTALGASGKIVSFISAGEQPVRERHENALETAARGRQQDYSPRWRLDLGLRLAATDLLAAEKKRSVIYVGSGAPGALAFEQYSLSEMAMYLANNAIIFNAVIIGNNPPSEEIRYLCRETGGRVLALYRPQGIREMIENLAYTPSGLYSISYKSLLPTDFGRSWLPIEAEVYLMERSGRDTSGYFPPLE

SEQ ID NO: 61197 - DNA, 789 bp, Unknown
  Obtained from environmental sample
  misc_feature (1)..(789): n is a, c, g, or t
atgctgggcgcgattataggcgatatagccggttcgaggtttgaatttgacaatatccgcagcaaggattttgaattacttgccgaagattgtcatgtcaccgatgatagcataatgacacttgcggtagcgaaggctattttaacctgtaacggcgattgggaacagcttggatataatagtgtcaaatatatgcatgaaatcgggcgcaaataccccgcattgcgggttttggcggtatgtcagaaaagtgggtgttcagcaatgatcccgcgccgtataacagttatgggaatggcggcggccatgcgcgtttcaccatgcggatttatcgctcggaccgaggatgaggcgaaactgctttcccaaaaagtcactgaagttacgcataaccatcccgagggactgaaaggggcggaggctgtttccgtcgccatatttatggcacgtaacggggccgctaaaaaagaaattaaagagcgtattgaaaaagactactatgcccttaactttacccttgacagtattcgtgaaacatatcaattcaatgaaacctgccagggaacagtcccccaggcaattgaggcttttcttgaatctgtttcttttgaagacgctgttcgcggcgcgataagcataggcggcgacagcgataccttagccgctattaccggaggcatcgccgaggcccactatggcgttccctctgaattaaaaagcagggccttgtcatatcttgataaggccatgcttggaatttaccatgaatgggaaaattttttaccttaa

SEQ ID NO: 61198 - protein, 262 aa, Unknown
  Obtained from environmental sample
  DOMAIN (1)...(256): ADP-ribosylglycohydrolase
  misc_feature (1)..(262): Xaa is any amino acid
MLGAIIGDIAGSRFEFDNIRSKDFELLAEDCHVTDDSIMTLAVAKAILTCNGDWEQLGYNSVKYMHEIGRKYPALRVLAVCQKSGCSAMIPRRITVMGMAAAMRVSPCGFIARTEDEAKLLSQKVTEVTHNHPEGLKGAEAVSVAIFMARNGAAKKEIKERIEKDYYALNFTLDSIRETYQFNETCQGTVPQAIEAFLESVSFEDAVRGAISIGGDSDTLAAITGGIAEAHYGVPSELKSRALSYLDKAMLGIYHEWENFLP

SEQ ID NO: 61199 - DNA, 921 bp, Unknown
  Obtained from environmental sample
  misc_feature (1)..(921): n is a, c, g, or t
gtgaataccgaaatcatagacctgtactggcaaatcggcaaagaagtaagcgagaaggcacagaacggcggttggggaaaatctgttgtcgaggaactctctaaccacattaccgcaaattttggggatatgcgcggtttttcccctcaaaatatctggcggatgaagcaattttatgaaacctacaaagacagccaaattctctcagcactgctgagagaattatcctggacaaacaaccttctgataatgagccgagccaaaaccgatgaagaacgccttttttatatcaagctttccattgatgaaaaatactcatcccgggaactggaacggcaatttgacgctatgcgttttgaacgtaccgctataagtgaaaaaaaatcgaaaaatctgccaataaaacaggagataaaagggcagtttttggacagttatgtccttgacttcctgaatttaccagaaagccatcatgaatcaaccttgcaaagggcaataatcacaaatatgaagaaattcctgcttgaaatcggaaaagacttttcatttattggtgaggaattccgtgtccaagttggtaattctgatttttttatcgaccttctgttttatcatcgcgggttgtcctgtcttgtggcatttgaactgaaaacaacctctttcaaaccggaatacatcggaaaaatgaatttttatcttgaggcgcttgacagggatcacaaaaaatccagtgaaaaccccagtgtcgggattattctatgcgctgacaaagatgatcaggtggtcgaatatgcgttacagcggaatctttcacctgttcttgtcgccgaatataccgcgaaattacccgacaaaaaacttcttcaaaacaaactccgtgagcttaacggtttgaccgaaggaatatttactaaaaattga

SEQ ID NO: 61200 - protein, 306 aa, Unknown
  Obtained from environmental sample
  DOMAIN (2)...(295): Protein of unknown function (DUF1016)
  misc_feature (1)..(306): Xaa is any amino acid
MNTEIIDLYWQIGKEVSEKAQNGGWGKSVVEELSNHITANFGDMRGFSPQNIWRMKQFYETYKDSQILSALLRELSWTNNLLIMSRAKTDEERLFYIKLSIDEKYSSRELERQFDAMRFERTAISEKKSKNLPIKQEIKGQFLDSYVLDFLNLPESHHESTLQRAIITNMKKFLLEIGKDFSFIGEEFRVQVGNSDFFIDLLFYHRGLSCLVAFELKTTSFKPEYIGKMNFYLEALDRDHKKSSENPSVGIILCADKDDQVVEYALQRNLSPVLVAEYTAKLPDKKLLQNKLRELNGLTEGIFTKN

SEQ ID NO: 61201 - DNA, 906 bp, Unknown
  Obtained from environmental sample
  misc_feature (1)..(906): n is a, c, g, or t
ttgatgcctgctttgaaaaatgaggaaaaagaattattgcaatcggcatatcagtgggaagaatttatggatgcttatcttttaaaagaggaaattgaacttgatagcacgaaactcgcaagtattttagaaactatgattcgcactggtttttctggagcggtgaagcatatcaaccagcttatacctgcaattgttgttggagtgataaattctccaaatccggttacgaatttcaatattgcttatattccaatggatgttttgcaaggtgagcaaggaatgatgttggagaaccgcgtaacggaaattttaatcagggataaaaatgcaaacgatgcggaattacccggcaagcgagagagtgccgctgctataaccgccgttttggatctcccagcggagcttggggttttcacttggatggattattcaaaagattatataggttatgaaaaaatggaatcaaccgcaacaaaaattttaatcttgcttctttttattttggcattgcttggaatttcaaacaccatattgatgtctattttggaacgcacaaaggaaataggcatgatgcgtgcgcttggcatgactgataatcagcttgtgttggtttatatgtttgaggcaggttttttaggcttaataggctctatttttggaataatttttggttgcgcaatgaattatccaatggtgaaatacggcatagatttttccagtatgcgtgatgctatgggtgcaaatgcgagttttcgcatatcatcgctttttcgttccagttggaatgttccggttattataggcacaggaattgtagcaacgctagtttcttcactcatggcattttttccagcccgccgcgcggtgaaaatgcccataacggatagtttgaggtttgagtga

SEQ ID NO: 61202 - protein, 301 aa, Unknown
  Obtained from environmental sample
  DOMAIN (101)...(294): Predicted permease
  misc_feature (1)..(301): Xaa is any amino acid
MMPALKNEEKELLQSAYQWEEFMDAYLLKEEIELDSTKLASILETMIRTGFSGAVKHINQLIPAIVVGVINSPNPVTNFNIAYIPMDVLQGEQGMMLENRVTEILIRDKNANDAELPGKRESAAAITAVLDLPAELGVFTWMDYSKDYIGYEKMESTATKILILLLFILALLGISNTILMSILERTKEIGMMRALGMTDNQLVLVYMFEAGFLGLIGSIFGIIFGCAMNYPMVKYGIDFSSMRDAMGANASFRISSLFRSSWNVPVIIGTGIVATLVSSLMAFFPARRAVKMPITDSLRFE

SEQ ID NO: 61203 - DNA, 723 bp, Unknown
  Obtained from environmental sample
  misc_feature (1)..(723): n is a, c, g, or t
gtgaggcaaaaactcgcatacattatattctgcctccttctcctctcttgcgaacccaatcgcttggaggtgacggaggtttatgataacaacgccaaaaaagaagcctacgaagtttcgccagatggcgaaaagaaggtgttttattcttggcataggaacggcataaaagcggaggaaatgccttttgcaaacggcgttccgcacggggcttaccgcaaatggagcgggactggttttataactgaaagcggtagctacaaggattctctgcgcgagggcaaatggacattttttgcaaaggaaaaagtgccgtatgtacagggttcctataaaaatggcttgaagcagggcaaatggactacattcgatgaaaaaggaaaaatagctggcgagcaattcttcaaagacgactccgcgataggaacttggagaaaattttacaacgatgttctgattgaggaaaattcctgccattcctcaaatcaaacgggttatttcaaaacttattcaaatgaaggcaaagcccaaatctaccaggaatgtcgctacggaaagctaaatggggtttttatgtcttactaccccggaggttccctgcacaaagttgggcattttaaggacgggttaaagaacggtttatgggttgaatattttgcaaaggaaaattgcggaaaattgaaactgggcttttgcatgcgagacgggagtgggtgcgtttaa

SEQ ID NO: 61204 - protein, 240 aa, Unknown
  Obtained from environmental sample
  SIGNAL (1)...(16)
  misc_feature (1)..(240): Xaa is any amino acid
MRQKLAYIIFCLLLLSCEPNRLEVTEVYDNNAKKEAYEVSPDGEKKVFYSWHRNGIKAEEMPFANGVPHGAYRKWSGTGFITESGSYKDSLREGKWTFFAKEKVPYVQGSYKNGLKQGKWTTFDEKGKIAGEQFFKDDSAIGTWRKFYNDVLIEENSCHSSNQTGYFKTYSNEGKAQIYQECRYGKLNGVFMSYYPGGSLHKVGHFKDGLKNGLWVEYFAKENCGKLKLGFCMRDGSGCV

SEQ ID NO: 61205 - DNA, 483 bp, Unknown
  Obtained from environmental sample
  misc_feature (1)..(483): n is a, c, g, or t
gtggtagactgtgcgcggagggcggaggccatgccaacgtgcaaaaagtgtggatcgggacaggccgtcaggaacggcgtggtgggcgggaggcagcggtaccgctgcaaggactgcggatgcaactacagggccggcgacgggcggacggacgccgggacggcggccaaaaaggccatgtgcgtcctgctctactcgatggcgaaggggtccttcagggcgctggggcggatgttcaacaggagccacacgctgatataccgctgggtgcgcgagttcggcgagtcgctgcccgagcccgacgtcccgggcgggatcagggagatggggttcgacgagatgtggcacttcgtggggtcaaaaaaaacaagctttggctcatcaaggcgcttgaccgcggcacacggcgagccgtggcccgggcgctcggcaatcgtgatgctgcgcccttcgggaggctccacaaaaaggtggggcacctga

SEQ ID NO: 61206 - protein, 160 aa, Unknown
  Obtained from environmental sample
  misc_feature (1)..(160): Xaa is any amino acid
MVDCARRAEAMPTCKKCGSGQAVRNGVVGGRQRYRCKDCGCNYRAGDGRTDAGTAAKKAMCVLLYSMAKGSFRALGRMFNRSHTLIYRWVREFGESLPEPDVPGGIREMGFDEMWHFVGSKKTSFGSSRRLTAAHGEPWPGRSAIVMLRPSGGSTKRWGT

SEQ ID NO: 61207 - DNA, 711 bp, Unknown
  Obtained from environmental sample
  misc_feature (1)..(711): n is a, c, g, or t
gtgcaaaaagtgtggatcgggacaggccgtcaggaacggcgtggtgggcgggaggcagcggtaccgctgcaaggactgcggatgcaactacagggccggcgacgggcggacggacgccgggacggcggccaaaaaggccatgtgcgtcctgctctactcgatggcgaaggggtccttcagggcgctggggcggatgttcaacaggagccacacgctgatataccgctgggtgcgcgagttcggcgagtcgctgcccgagcccgacgtcccgggcgggatcagggagatggggttcgacgagatgtggcacttcgtggggtcaaaaaaaacaagctttggctcatcaaggcgcttgaccgcggcacacggcgagccgtggcccgggcgctcggcaatcgtgatgctgcgcccttcgggaggctccacaaaaaggtggggcacctgaagcgctgcacgttccacgccgacgcctggcgcgtgttcgcggaggtgctgcccaaaaagcggcacatcgtaggcaaggcgcgcaccgtcgccacagagcgcgacaactccaacacccgccaccacctggcgaggttcacgcggcggacgaagctggtctcacgctcaagccgcatggttgacctgaccctgcggatctggcacgccgtcacgaccaccgacctgttttgcaggctacaggagaccgcattatctatatatcagtga

SEQ ID NO: 61208 - protein, 236 aa, Unknown
  Obtained from environmental sample
  DOMAIN (102)...(216): IS1 transposase
  misc_feature (1)..(236): Xaa is any amino acid
MQKVWIGTGRQERRGGREAAVPLQGLRMQLQGRRRADGRRDGGQKGHVRPALLDGEGVLQGAGADVQQEPHADIPLGARVRRVAARARRPGRDQGDGVRRDVALRGVKKNKLWLIKALDRGTRRAVARALGNRDAAPFGRLHKKVGHLKRCTFHADAWRVFAEVLPKKRHIVGKARTVATERDNSNTRHHLARFTRRTKLVSRSSRMVDLTLRIWHAVTTTDLFCRLQETALSIYQ

SEQ ID NO: 61209 - DNA, 726 bp, Unknown
  Obtained from environmental sample
  misc_feature (1)..(726): n is a, c, g, or t
atgctaaaggccgtgtcgctgtcgaaacgctacgagaacgggaatctggcactggagggcctgaacctgaccgtgaacgggggcgagacctactgcctgctgggcgccaacggcgccggcaagaccactaccatcaacctgttcttcaacttcatccagcccacgggtggccaggcattggtcggcggcattgacgcgaccttgcagccgctggaggccagaaagaaaatggcctacatttcggagaacgtcatgctgtacggcgttctgaccgccaagcagaacctgaagttctttgccgatgtctgcggcaagcagctcaccatggaccacttcaacgccctgttcgacaaggtgggcctaagcaggggcgtgatgcagtctaaggtcaagacgttttcaaaggggatgcggcagaagctgggcctagccatagccctgctgcgcgacacgcctgtgataatcatggacgagcctacgtcaggcctcgaccccaaggcatctagggacttcattgacctggtgctggacctcaagggtgcgggaaagaccatgctcatctccacgcacgacatccacagggtcaaggacatcgccgaccgcgttgggataatgaggaacggcaggctgatggtggagaagaccaacagcgagatagacacgccgggggctacaggagctttacatcangtgcatcacggattgagagtggtcactgatatatag

SEQ ID NO: 61210 - protein, 241 aa, Unknown
  Obtained from environmental sample
  DOMAIN (28)...(208): ABC transporter
  misc_feature (1)..(241): Xaa is any amino acid
MLKAVSLSKRYENGNLALEGLNLTVNGGETYCLLGANGAGKTTTINLFFNFIQPTGGQALVGGIDATLQPLEARKKMAYISENVMLYGVLTAKQNLKFFADVCGKQLTMDHFNALFDKVGLSRGVMQSKVKTFSKGMRQKLGLAIALLRDTPVIIMDEPTSGLDPKASRDFIDLVLDLKGAGKTMLISTHDIHRVKDIADRVGIMRNGRLMVEKTNSEIDTPGATGALHXVHHGLRVVTDI

SEQ ID NO: 61211 - DNA, 762 bp, Unknown
  Obtained from environmental sample
  misc_feature (1)..(762): n is a, c, g, or t
ttgggaagcgaacagtggtcggatcgaacaaagcccactatcgcgataggtcaggagattgcggtttccgcttaccagatgttacaggcggcaagcgcaattgcaaacgacggcattttaatctctccaagaatagtgtcgaatattatgtccccggacggtaatgtaaaagaatggaaacctgtagaaagacgccgtgttttaaaggcggaaaccgcgaaagcaatgcgttcctacatggtagacaccgcctcgggtattgggacgggctggcgcgccgcggtcgaagatctgtcgcttgccgtaaagaccggaaccgctcagataatagaccctgttacccgcagatattccgataccgactttattgcaagctgtattgccctgcttcctgccgaatcgccctcgcttatcctgtaccttgcgattattaaaccaaggggtgaaattttaggcggcagaatcgctgcccccgcaatccgtgaagcggcggaatctcttattgattacattggcattccgcgcggacgcaatccgcagatttcgcatccgtcttcggtagacattccggccggccgtcttcccgtcattggcagtcatttgccggatttttccggcatttccaaaagaatgctgatcccccttttgttacgcgacgatatccacgttgagcttcgcggcgaaggctgggtgcgccgtcaaagtccgcctgccggaaccccggttacggacggaatgcaaataatactggaactggaatag

SEQ ID NO: 61212 - protein, 253 aa, Unknown
  Obtained from environmental sample
  DOMAIN (199)...(253): PASTA domain
  misc_feature (1)..(253): Xaa is any amino acid
MGSEQWSDRTKPTIAIGQEIAVSAYQMLQAASAIANDGILISPRIVSNIMSPDGNVKEWKPVERRRVLKAETAKAMRSYMVDTASGIGTGWRAAVEDLSLAVKTGTAQIIDPVTRRYSDTDFIASCIALLPAESPSLILYLAIIKPRGEILGGRIAAPAIREAAESLIDYIGIPRGRNPQISHPSSVDIPAGRLPVIGSHLPDFSGISKRMLIPLLLRDDIHVELRGEGWVRRQSPPAGTPVTDGMQIILELE

SEQ ID NO: 61213 - DNA, 576 bp, Unknown
  Obtained from environmental sample
  misc_feature (1)..(576): n is a, c, g, or t
gtgtctgtttgggaaaaaaacagcaaagtcctgatagatcattatccgggccttcttgaagaaattaccggtgaagaagataacactttcacgcccgaagatattcaaattattccagcgtcctgtggcgatccgtctctttgcgtaaaaggcataaatatccattccggccgcgatcctatgcgcgaaggactccgtcttgctcaatccgcgtcgggcggcggaactgttgtcatacttggttttggtctcggttacgccgcaacggcatgcgccgacgcagccgcgcaagccgttgaaaaagggcggccaatcataattgtagaaaagcacaggaaacttcttgtcaaagcgcttgagacaagggatttaagcgattttctttccaataacagaataatatttgtagtaggcggcacaggagaaggaataacaaacgcgctcagtatcgcggacggatttatttccgccggcgaaagaacggagcctccggctgttatccgcaacagggcgcttattgagcttgataaggaatggtacggcattgttgaagaaaactccgaacttggtcgatga

SEQ ID NO: 61214 - protein, 191 aa, Unknown
  Obtained from environmental sample
  misc_feature (1)..(191): Xaa is any amino acid
MSVWEKNSKVLIDHYPGLLEEITGEEDNTFTPEDIQIIPASCGDPSLCVKGINIHSGRDPMREGLRLAQSASGGGTVVILGFGLGYAATACADAAAQAVEKGRPIIIVEKHRKLLVKALETRDLSDFLSNNRIIFVVGGTGEGITNALSIADGFISAGERTEPPAVIRNRALIELDKEWYGIVEENSELGR

SEQ ID NO: 61215 - DNA, 1107 bp, Unknown
  Obtained from environmental sample
  misc_feature (1)..(1107): n is a, c, g, or t
ttgttacacgaaattcacaaaaggtgcgttacggtcgcggtagacacctcgttccgcttctttacagataacggcattcagcctgattttgtccttgtagtagaccctcagttttggaacagccgccatcttgacaggtgtccgtgcgggcataccgcgttgatagcggaatcggcggtttatccgccggtactgcgcctgccgttcaaaaatatttttctttgcggctctcttttccctcttggctcttttgttgaaaagcaggttgatccaaaagggccgcttggagcgggaggctcggtttctactacggcgtgggattttgcgcggactctcggctcaaaagaaatttggatagcggggcttgaccttgctttccccggtcttaaaacacatttccggggcgctgtctttgaggatcgttccaacgccgcgtcaaaccgctttagccccgccgaaacatgggtggtacgcgcattgcgggacggctttccgttcaaagctccctgcgcttctggcggccaggttcttaccgacaggcggctgtccctgtatgccgcgtggtttgaaaaccgtttccgccagcaccccgaagtgcaaaattacggtgtttttcaggacggcctagcgatagcaggcattcagtcggcggacgcggaaaaactactttccctgcccgaacgccgcggcgaaattgacagccggcttgaagcggttttttcacggatagagaatgattttaacaacccggtagaaaagcaaaaacgcgcggaacgttacgcgaatgccgtgtccgctttaattcgcggacttgaagaagtaggaaacgccgccaaaaaaggcgcggaaattacgcggcaggcattaaaaaacaaattagactccggcaggcaaaataaaattttaaaagaactggacgaaattatgcgccgcataacggacagcgaggtaaaagaagtggcgggatttctttttcccgccgaaaacaaaaacaatgaaaccgaaggcgcggaaaaagattctttccgggtctatcttgaatcgacaaacaaacttttttcttcgttagcgcaaaccgtggattttaacctggaaaacctgaaataa

SEQ ID NO: 61216 - protein, 368 aa, Unknown
  Obtained from environmental sample
  DOMAIN (2)...(124): Protein of unknown function DUF115
  misc_feature (1)..(368): Xaa is any amino acid
MLHEIHKRCVTVAVDTSFRFFTDNGIQPDFVLVVDPQFWNSRHLDRCPCGHTALIAESAVYPPVLRLPFKNIFLCGSLFPLGSFVEKQVDPKGPLGAGGSVSTTAWDFARTLGSKEIWIAGLDLAFPGLKTHFRGAVFEDRSNAASNRFSPAETWVVRALRDGFPFKAPCASGGQVLTDRRLSLYAAWFENRFRQHPEVQNYGVFQDGLAIAGIQSADAEKLLSLPERRGEIDSRLEAVFSRIENDFNNPVEKQKRAERYANAVSALIRGLEEVGNAAKKGAEITRQALKNKLDSGRQNKILKELDEIMRRITDSEVKEVAGFLFPAENKNNETEGAEKDSFRVYLESTNKLFSSLAQTVDFNLENLK

SEQ ID NO: 61217 - DNA, 954 bp, Unknown
  Obtained from environmental sample
  misc_feature (1)..(954): n is a, c, g, or t
atgaccattgacagctttaatggagcgtcgaaccttatttataaacctaccgaaaaactccagggcgaatggcttccggttgagtaccttcaaaaaacacggcccatcctcatccttgatgaaagccagaattaccgcacacctcttgcccgtgaggcgttacgtaccttaaacccgctgttcgcgattaactacagcgccacgccggtggataaatacaatctggtttaccgcctttcacctggcgacgctttcaggcagaatcttgttaagcgtatcagcgtctgcggcgttacggcgcagtacaaccttaacgatgaaactttgactctttctattgaggagattaagaaaagccccatcacagccgacatcaacgtctgctgcatccgcggcggaattaaaacgcgggaaacgctcaagaatcttaaacccggcgacgatcttggtcaaaaaacaaagaatcccgattttactggttttattatcgatgaaatcaattacgccaaacaggaaataatttttaccaaccagtcagtgctgaatagaaaagatgccgccggccttaccctttccgagcgggaagtttacaaggtggaaatcaaagaagccataaaacagcattttcagaaacaaaaatatttattgaataagggcatcaaggtacttaccctcttttttattgacagggttccccattacaaaggagagcatgatgcttttatccgccgttactttgaagccgcctttgacgaattaaaatcagcaatgattattttaagcgtttcgacgcgagccatgttcatgccgggtattttgcccccaagaaagaacaaaaaactgcggccaagaccggaggggctgaagaattttttgattatgtggaacttgacgactataagggcaaagacaaaaaagaaattaaagaggcggaaaaagaagcatttagcctga

SEQ ID NO: 61218 - protein, 317 aa, Unknown
  Obtained from environmental sample
  misc_feature (1)..(317): Xaa is any amino acid
MTIDSFNGASNLIYKPTEKLQGEWLPVEYLQKTRPILILDESQNYRTPLAREALRTLNPLFAINYSATPVDKYNLVYRLSPGDAFRQNLVKRISVCGVTAQYNLNDETLTLSIEEIKKSPITADINVCCIRGGIKTRETLKNLKPGDDLGQKTKNPDFTGFIIDEINYAKQEIIFTNQSVLNRKDAAGLTLSEREVYKVEIKEAIKQHFQKQKYLLNKGIKVLTLFFIDRVPHYKGEHDAFIRRYFEAAFDELKSAMIILSVSTRAMFMPGILPPRKNKKLRPRPEGLKNFLIMWNLTTIRAKTKKKLKRRKKKHLA

SEQ ID NO: 61219 - DNA, 1650 bp, Unknown
  Obtained from environmental sample
  misc_feature (1)..(1650): n is a, c, g, or t
atggcgcagctcgttattcataacgcgaaggtctatcttgagcgtgaaagtttcgcccaggctgtcctgatacacgacgacagaatcgccgccacaggtacaaacgaagaaattatttcaaaagctcagggcgctcgaaaaatagacgcctcaggcggccttctactgcccggcttcaacgattcacatatgcatctgtattcttttgggcgcaacaaatatcgtataaaggctaacggcgttacttctattgacgaactggtcgaacgtggacgtgatctaatcgcccgcataaaacctccgaaaggctctttcgtcgcgggtacgggctggaatcaggatatgtttacaggtgataaacgtctccctaaccgccatgatatagaccgtatctctaccgaacacgcggtggttattttccgtgtctgcggacatactctatgctgtaatactttggcaatgaaaatggcggggataacgcgcgatagcgtaaataccgaaagcggaaaaatagaactggatgaaaacggcgagcccttgggaatattcggcgcagggacggctctgaataaagtccgggacatggttccgccttacactcaggagcagatagaggaacagcttttgtacgctgcgcaccacgcgctaaaaaacggtattacgtcggtgggaagcagagacgttatagaagataattaccaaagcatcgttgatgcgtatatcaaactgttcaccgaaaatgatctgcatctgcgcgttaatctgcaatgcactatcgagaaggacgcggtatttaacgaatttatcaaacgcggctggatcacaaggtcttcaatgggccatccttatttgacaatgggggcgtcaaaacttttcgccgacggctcacttggctcgcgcaccgcgtacatgcgaaagccgtatttggacgcgccgtctacgcgtggttttcaggtacacccgcaagaggagatggacgcgctggtattaaagaaccataaaaacggctttcaggtaatcgtgcacgccattggggacgcggctgttgaagaaacgctgaacgcttttgataaagcgaacgattttaaaaaaacgaatagtgggcgtacaaacgaactgcgccacgggttagtgcattgccaaataacagatttgccgcttctacggcgtatggcagataacggcatcctcgcgtttatgcagccaatctttctcagcaatgatctttatgtgcttgaaagccgcgtaggtaaggagcttgcttctacctcctacgccttcgcgaccatgaacaagctgggcgttaaagcggcttacggaacggacagcccggtagaatccatgaacccgctggaatgtatcgactgcgcggtaaaccgccatgacgtaactaacgactatcccgaagatggttttaacccggatgagtgtgtggatgtgtataccgcggtagacgcttacaccgcaggcagcgcatacgccgaattcgccgaagattacaagggcagaatcaagccgggttatcttgccgacctgacgctgttggatcgcgatatttttaccatttcgcgaaaagaaattcgcaaggcgcaggtactgtggactatggtaggcggcgttatgacgtataagaaagccattttgccttga

SEQ ID NO: 61220 - protein, 549 aa, Unknown
  Obtained from environmental sample
  DOMAIN (54)...(514): Amidohydrolase family
  misc_feature (1)..(549): Xaa is any amino acid
MAQLVIHNAKVYLERESFAQAVLIHDDRIAATGTNEEIISKAQGARKIDASGGLLLPGFNDSHMHLYSFGRNKYRIKANGVTSIDELVERGRDLIARIKPPKGSFVAGTGWNQDMFTGDKRLPNRHDIDRISTEHAVVIFRVCGHTLCCNTLAMKMAGITRDSVNTESGKIELDENGEPLGIFGAGTALNKVRDMVPPYTQEQIEEQLLYAAHHALKNGITSVGSRDVIEDNYQSIVDAYIKLFTENDLHLRVNLQCTIEKDAVFNEFIKRGWITRSSMGHPYLTMGASKLFADGSLGSRTAYMRKPYLDAPSTRGFQVHPQEEMDALVLKNHKNGFQVIVHAIGDAAVEETLNAFDKANDFKKTNSGRTNELRHGLVHCQITDLPLLRRMADNGILAFMQPIFLSNDLYVLESRVGKELASTSYAFATMNKLGVKAAYGTDSPVESMNPLECIDCAVNRHDVTNDYPEDGFNPDECVDVYTAVDAYTAGSAYAEFAEDYKGRIKPGYLADLTLLDRDIFTISRKEIRKAQVLWTMVGGVMTYKKAILP

SEQ ID NO: 61221 - DNA, 501 bp, Unknown
  Obtained from environmental sample
  misc_feature (1)..(501): n is a, c, g, or t
atgccaaataaagaacctgctgccgatgaacatattattgaaaaacttgccgaagtaaaccgcgcgcagatagagcatcgcgcgtcatggatggccctcatctacgatgagatggtcaaggcgggtattgacgccgaaataattatcaggcgggcgataaatcgctacggacggattcacggcgagcaaatcaaaaaacgctgcgccaatccgaaaagcctcgaagattttaagaaggcgtttttaagcgatgttgggaaaaaaaccttcggcatgaatcttgttgaaggcgatgaaacttcgctctgcattgattttcactattgcgctttggtgaatgcctggaaaaaactcgggattgacgacaaaacctgcgaattgttgtgcgatatagcaatggaaggcgaccggagcattgccaaagttatgggactgcagtttgatcttggcaagacaatcgcgcagggctgtccaatctgcgaactgcgctttaaaaaataa

SEQ ID NO: 61222 - protein, 166 aa, Unknown
  Obtained from environmental sample
  misc_feature (1)..(166): Xaa is any amino acid
MPNKEPAADEHIIEKLAEVNRAQIEHRASWMALIYDEMVKAGIDAEIIIRRAINRYGRIHGEQIKKRCANPKSLEDFKKAFLSDVGKKTFGMNLVEGDETSLCIDFHYCALVNAWKKLGIDDKTCELLCDIAMEGDRSIAKVMGLQFDLGKTIAQGCPICELRFKK

SEQ ID NO: 61223 - DNA, 1806 bp, Unknown
  Obtained from environmental sample
  misc_feature (1)..(1806): n is a, c, g, or t
atggcggaaaccaaattcatacgtaatttttgcataatcgcgcatatagaccatggcaaatcaacgctggcggaccggcttatccagaaggcgaagctggtggatgaccgcgattttcagaaccagatactcgataacatggatattgagagggaacggggcatcacgattaaaagccaggcggtcagaatcccctatacggcccaggacggccatgactacgagcttaacctggtagacacccccggccacgttgactttacctatgaggtgagccgggcgatcaattcctgcgaaggggcccttctcctgattgacgccacgcagggggtacaggcgcagaccctttcaaatatgtaccttgccctggaacacaaccttgaaatcgtgccggtcatcaataaaattgacatgcaggccgccgacatagaaagcgcgaaaaaacagatcgacaaggatttggggctggacgcggaaaccgccctgctggtttcggcgcgtaacggcactggcgttgacgaacttttcgaggccattgtcaaacgcgtcccgcctccgtcgggcgacagaaacgccccgctgagggcgctcatttttgactgccattacgattcctaccggggcgttgttgttcatctgcgcgtctatgacggaacaattaaaaaagggatgaaaatatcctttatgtcanacggctccatatacgaggttgagaccaccggcgttttcaaaattgccctggttganacaaacgagctttccgccggggacgtgngctattttctcgccggcatcaagacggtaagcgacgtgcgcgtaggcgacactgtaacaggcgcggacaatccatgcccggaacctctgcccggtttccgcgaagtaaaacccgtcgttttttcttctatttatccagttgactcaaacgactatgaagaattacgcgcaagtatggacaaacttaaacttaacgacgcttcccttgtttttgaaaaagactcctccgcagccctcggctttggtttccgctgcggctttctgggtctcctgcaccttgaggttattcaagagcgccttgagcgcgaatttgatcaatctgtaatttttaccgcgccgtccgtaaaatacaaggtgcatctaaggaacggcgaagaaatcatgatcgacaaccctatggaataccccgatgaaggcagaatagacagcgcggaagagccgtatatccgcgcaagcgtaattactcctaccgattatcttggaaacataatgactctgtgccttgaaaaacgcggagtacaaaccaacatgacctatcttgatgagaaacgcgtggagcttatttacgatatgccgctttccgaagtgttattcgatttttatgacaaattaaaaagtataagccgaggttacgcgtcatttgattatgatatttcaggctacaaaccgacggaactcgcgaaaatggacattcttcttaacggcaaacctgttgacgctctttcacagcttgtattcaaaggcaacgcctacgaccgcgcgagaaaagtctgcgaaaggttacgcgacgagatcccgcgccagcaattcaagataccgattcaaggctccattggcagtcatataatcgcgcgggaaactgtcaacgctctacgcaaagacgtacttgccaaatgctacggcggcgacattacgcgcaaacgcaaattgcttgaaaaacaaaaagaaggcaaaaaacgcatgaagatggtgggagatgttgagttgccgcaaagcgcgttcttagccgtcttgaaagccaaagacgagtaa

SEQ ID NO: 61224 - protein, 601 aa, Unknown
  Obtained from environmental sample
  DOMAIN (19)...(185): Ras family
  misc_feature (1)..(601): Xaa is any amino acid
MAETKFIRNFCIIAHIDHGKSTLADRLIQKAKLVDDRDFQNQILDNMDIERERGITIKSQAVRIPYTAQDGHDYELNLVDTPGHVDFTYEVSRAINSCEGALLLIDATQGVQAQTLSNMYLALEHNLEIVPVINKIDMQAADIESAKKQIDKDLGLDAETALLVSARNGTGVDELFEAIVKRVPPPSGDRNAPLRALIFDCHYDSYRGVVVHLRVYDGTIKKGMKISFMSXGSIYEVETTGVFKIALVXTNELSAGDVXYFLAGIKTVSDVRVGDTVTGADNPCPEPLPGFREVKPVVFSSIYPVDSNDYEELRASMDKLKLNDASLVFEKDSSAALGFGFRCGFLGLLHLEVIQERLEREFDQSVIFTAPSVKYKVHLRNGEEIMIDNPMEYPDEGRIDSAEEPYIRASVITPTDYLGNIMTLCLEKRGVQTNMTYLDEKRVELIYDMPLSEVLFDFYDKLKSISRGYASFDYDISGYKPTELAKMDILLNGKPVDALSQLVFKGNAYDRARKVCERLRDEIPRQQFKIPIQGSIGSHIIARETVNALRKDVLAKCYGGDITRKRKLLEKQKEGKKRMKMVGDVELPQSAFLAVLKAKDE

SEQ ID NO: 61225 - DNA, 1386 bp, Unknown
  Obtained from environmental sample
  misc_feature (1)..(1386): n is a, c, g, or t
ttgcatgcaaatattgactcttccattacttccaataaattatttcatcttacaaatatatgcggcagcgagggcgtttattctcttgtgcgcgaaaaatggggcgcgcgggcattccgccgcgttgaaatattacgtctaacaggcggctggcaattattccccgagttgtacgattctatctgcgattcgcttcgccgcgaaattgccgtagattggagtaacgccttaactctcgcgaaaatgggacgcctatacattcgcaacgcgttacgcaatctcccgcttgttttaaaatacccgtccatgcaggatttgtctttcggctgcgcgcccattcttgtacttggcgcaggtccctctcttgatgaaacccttgacgcgcttgcagcaaaatacgccgacgttcttgcctatcccgaaaaacgtaattttaaaattatttgcgcagacacatgccttggcgcgttaaaagaaagaaacattgtccccgaccttgccgtaattttggaaagccagcactggaatatcaacgactttttaacttgcaggggctggaaagttaacgcggcaatagacctttcttcgcttcccgcttctgtaaatattctatccggtgaaaattttattttttttacgccatggacacagttaaaaatctttgaacgccttaaaattacgggactgttacccgccgtcgtccctcctcttggctccgtggggcttacggcggtagaactagcccggcggcttacaacaggtaaaataatctgcgccggtcttgatttttcatttactcaggacaagtaccacgcccgttcaacgccgggacaccgttcccgcctgaacctgcaaagccgttttaagagattatttaaccccgcggcgtacaatcagtattcaaccgccgccgtttcaaaatccggtcttaccgtttataccaatcccgccatgaaaaattaccgcgatctttttgaacaggagttcggcggcgattcgagtatatttgacatcgcaagcacaggactcccgttaggaataaaaaccctctccctcgaagacgcgatggctctgttgaacacagaaaagctgactcccgcgcaaaatgttcgtgtggttcgtggtaaaaattccgaattaacttctttctttgaaaacgaaaaaacccgattagaggaattacgcaatctattaacaggcgaagcggcggctgataatgagcgattgaatacgctgatagaagaatgtgattacctatgggcgcatttccccgattacgctggcggtcgccgtccggcggtaaccgatatttcgtttctaaaacgtgttcgcgcggaaattgaccctatgctgaaattactcgtctttggctttcaagacggctaa

SEQ ID NO: 61226 - protein, 461 aa, Unknown
  Obtained from environmental sample
  DOMAIN (89)...(263): Protein of unknown function DUF115
  misc_feature (1)..(461): Xaa is any amino acid
MHANIDSSITSNKLFHLTNICGSEGVYSLVREKWGARAFRRVEILRLTGGWQLFPELYDSICDSLRREIAVDWSNALTLAKMGRLYIRNALRNLPLVLKYPSMQDLSFGCAPILVLGAGPSLDETLDALAAKYADVLAYPEKRNFKIICADTCLGALKERNIVPDLAVILESQHWNINDFLTCRGWKVNAAIDLSSLPASVNILSGENFIFFTPWTQLKIFERLKITGLLPAVVPPLGSVGLTAVELARRLTTGKIICAGLDFSFTQDKYHARSTPGHRSRLNLQSRFKRLFNPAAYNQYSTAAVSKSGLTVYTNPAMKNYRDLFEQEFGGDSSIFDIASTGLPLGIKTLSLEDAMALLNTEKLTPAQNVRVVRGKNSELTSFFENEKTRLEELRNLLTGEAAADNERLNTLIEECDYLWAHFPDYAGGRRPAVTDISFLKRVRAEIDPMLKLLVFGFQDG

SEQ ID NO: 61227 - DNA, 1146 bp, Unknown
  Obtained from environmental sample
  misc_feature (1)..(1146): n is a, c, g, or t
atgaatatgcatctacttttctgcaaaaaaataatgagttacggtcttgatgaggacgatttggtgctgctaagtcttttttgctttctgttttacgaagacagagatgatcatattcttttcagcgatctttattttttgtacgatgacaaaacagacgctaaatatgttgaaagaaacttgtccgatggctctcatattttaattgaaaataagcatgttgaattcgtaaacgataacggctttgtggacaacgaagcctggaaactgtcggatatggcaaaaaaagaactgctctgcgagctaaaaatcgaaaagaagaatgatcataaaaacataattcttcacaaaaccatacaaagcaaaaaattgttttacaatgaaaaagaaagcgaaagcatacaaaaactaatttctctattgaaagaagaaaactaccgtaaggtacagggacggctttcggagaatggaatgaggaagggctttgcctgccttttttcaggaacgccgggaacgggaaaaaccgagactgcctaccagattgcccgcgagaccggccgaaacattatgatgatagatatatcaaacacaaagagctgctggtttggccaaagcgaaaaaaagataaaggaagttttcgataattaccgaaatgcggtcgaaaattcggaacttgccccgattctattgctaaacgaagcggacgcggtaatagggaaacggaaagaatttgacgggtcaagaggggcggtagaccaaaccgaaaacgccattcagaacatcatcctgcaggagatggaaaacctttcggggataatgatcgctaccactaacctgacccggaacatggacaatgcctttgaacggcgctttttgtataagattgagtttgcaaagccctgccttgaagcccggcagtccatctggcagagcatgatgccttctctttcctcagacgataccgaaaagcttgcctcgcgctatgacttgtcaggcgggcagattgaaaatatcgcgcgcaaagtcgaagttgaccttgtcattaacggcggcgaggtttcattggataccctcgcacggcattgcatggacgagagctcgaatcaatttaacgctgtaaaaaggatagggtttgcccatgaatga

SEQ ID NO: 61228 - protein, 381 aa, Unknown
  Obtained from environmental sample
  DOMAIN (163)...(348): ATPase family associated with various cellular activities (AAA)
  misc_feature (1)..(381): Xaa is any amino acid
MNMHLLFCKKIMSYGLDEDDLVLLSLFCFLFYEDRDDHILFSDLYFLYDDKTDAKYVERNLSDGSHILIENKHVEFVNDNGFVDNEAWKLSDMAKKELLCELKIEKKNDHKNIILHKTIQSKKLFYNEKESESIQKLISLLKEENYRKVQGRLSENGMRKGFACLFSGTPGTGKTETAYQIARETGRNIMMIDISNTKSCWFGQSEKKIKEVFDNYRNAVENSELAPILLLNEADAVIGKRKEFDGSRGAVDQTENAIQNIILQEMENLSGIMIATTNLTRNMDNAFERRFLYKIEFAKPCLEARQSIWQSMMPSLSSDDTEKLASRYDLSGGQIENIARKVEVDLVINGGEVSLDTLARHCMDESSNQFNAVKRIGFAHE

SEQ ID NO: 61229 - DNA, 1086 bp, Unknown
  Obtained from environmental sample
  misc_feature (1)..(1086): n is a, c, g, or t
ttgcccatgaatgattccagcataaacgggcggtatgatataataagctccatgagagccaaaaagaaacccgcgagggcgtcaatgcccaaatcggcccttgccaggctgtattacatcgacgaggagatagcttcgggaaagcatcccagcaccgcttatctggcagaaaattggggagatgcaagcgtctccacgataggcagggatattagctttatgaaagaaaccctgaaggctccaataaaatacgatgccaaatgccgtggcttttattactcaaagccaaaataccgcatccctatgggcttttccggcgcggaagagcttttggccttgggcatggcgaggagtattcttgccatgtataaagacactcccatctataacgcggcgtataatctacttaacagcattatcgcgcccctggctgccgagagcaattccgattggtacgaaaaccgcattgtagtccctttgcttccttcatccccggtactgcctgatgtgtggaattcgataattacgtcactgcgggaaaaccgcattcttactttcgattataaaggcgaaaaagataccgactacaaaggccgccgcgtctggccgtatcagttgctttttgacaacggcctttggtatttatacggatacgccgagggacggaacggccccagggtttactcgcttagccggatgaaaaaagttattcttgccaagagtacttttaccctgccaaagaattttgactaccgcgccatttttggcggcagccatttcggtattttcgccgggcttaaaaagtaccagttcaaaatcgctttttacggcaattccgccgactgggtaagggagcgcaaatgggcggacgaccagataattaccgatacggaaaacggggttattatcacttttacaagcacccaatttgaaaaagttaccgagtggatgttttcaaggggcagtaccgcccgcccgctggagcctgaattgctggtaacaacgtggctaaagaatattgaggaaacgcagaagctggcaaatagcgttaaggaagaagaaaagataaaatcagggcaactatga

SEQ ID NO: 61230 - protein, 361 aa, Unknown
  Obtained from environmental sample
  misc_feature (1)..(361): Xaa is any amino acid
MPMNDSSINGRYDIISSMRAKKKPARASMPKSALARLYYIDEEIASGKHPSTAYLAENWGDASVSTIGRDISFMKETLKAPIKYDAKCRGFYYSKPKYRIPMGFSGAEELLALGMARSILAMYKDTPIYNAAYNLLNSIIAPLAAESNSDWYENRIVVPLLPSSPVLPDVWNSIITSLRENRILTFDYKGEKDTDYKGRRVWPYQLLFDNGLWYLYGYAEGRNGPRVYSLSRMKKVILAKSTFTLPKNFDYRAIFGGSHFGIFAGLKKYQFKIAFYGNSADWVRERKWADDQIITDTENGVIITFTSTQFEKVTEWMFSRGSTARPLEPELLVTTWLKNIEETQKLANSVKEEEKIKSGQL

SEQ ID NO: 61231 - DNA, 471 bp, Unknown
  Obtained from environmental sample
  misc_feature (1)..(471): n is a, c, g, or t
gtggtagaaaggttaaaaggacaatctgaagttactcttgatgaaaagggtagaatcagtttgcccgccgctttacgaagggctttaggagatgcggaattaacgcttaaaccatgcgattatgaagaatgtttgtggcttttcccgacaagcgtttatcaggaaatgctcgccgaatacagcaaaaataccaatattttatcaaagaaagatcgtgacttccgcagacgcctttttaactctcaggatgtggaaattgataaagcgggaagaattccaattccccaaacctatcgtgaatttgccgggctaaccaaagactgtctggtttttggtcagggtgattatattgaaatttgggacaaggaaaaataccaccagtattattctgaaagcaaagaagactttgtttccgtttccgaagaacttgccagtaaattaaaaaacagcgggggaggaagtcaagaatga

SEQ ID NO: 61232 - protein, 156 aa, Unknown
  Obtained from environmental sample
  DOMAIN (4)...(77): MraZ protein
  misc_feature (1)..(156): Xaa is any amino acid
MVERLKGQSEVTLDEKGRISLPAALRRALGDAELTLKPCDYEECLWLFPTSVYQEMLAEYSKNTNILSKKDRDFRRRLFNSQDVEIDKAGRIPIPQTYREFAGLTKDCLVFGQGDYIEIWDKEKYHQYYSESKEDFVSVSEELASKLKNSGGGSQE

SEQ ID NO: 61233 - DNA, 831 bp, Unknown
  Obtained from environmental sample
  misc_feature (1)..(831): n is a, c, g, or t
ttgaggcaggccggacagcaactgcggcccatgagaacatcaggggccagaaggcttttgggtgaggaggttattatgatacagcaaacccgccaattattacgggaactccgccttcccgccatggaaaaagcgtattccgcccaactggaacttcccgcctgtagcgcgttgggctttgacgaacggttcgccctgctggtgcaggccgaagaggaaagccggaaggagaaaaagctcgcgaggcttttgaaagccgcccgcctgagggactcaggcgcctgccttgaggaggtggactgccgtccgggcaggaaccttgaaaaaagcgcggtggcccttcttgccgactgccgctggattcgcaaagggcataaccttttaatatccggtgcttgcggaaccggcaagacctacctggcgagcgcgttcggcaacgccgcctgccgccagggatactctgtccgctgctaccgccttccccgccttcttgtggacttgcacatcgcacggggggacggctcctgggagaagctcctgagcgatcttaaaaagcccgacttgctcatcctcgacgatttcggcctcgccccccttgagccgctgcaatgccgggactttctggaagtggtggaagaccgttatgcgtcagcctcgacggcagtggcttcccagcttccggtatcctgctggcacggggtctttgccgacgcgaccattgccgatgcggtgttggaccggctgcttcaaggggcgtaccgctttgagcttaaaggcccttccctgcggcagcggaatgtgccggatgaaggcacggcggcagaaaaataa

SEQ ID NO: 61234 - protein, 276 aa, Unknown
  Obtained from environmental sample
  DOMAIN (47)...(76): IstB-like ATP binding N-terminal
  misc_feature (1)..(276): Xaa is any amino acid
MRQAGQQLRPMRTSGARRLLGEEVIMIQQTRQLLRELRLPAMEKAYSAQLELPACSALGFDERFALLVQAEEESRKEKKLARLLKAARLRDSGACLEEVDCRPGRNLEKSAVALLADCRWIRKGHNLLISGACGTGKTYLASAFGNAACRQGYSVRCYRLPRLLVDLHIARGDGSWEKLLSDLKKPDLLILDDFGLAPLEPLQCRDFLEVVEDRYASASTAVASQLPVSCWHGVFADATIADAVLDRLLQGAYRFELKGPSLRQRNVPDEGTAAEK

SEQ ID NO: 61235 - DNA, 1404 bp, Unknown
  Obtained from environmental sample
  misc_feature (1)..(1404): n is a, c, g, or t
atgaccgacggggctgttaccagactggcgtatccggcctgccggggcggacgcccggccaggaacgagccagactgggaagccgtccagaaacggcttgacgggaacaagcggcttaacctgcagtacctgtatgaggagtaccgggatacagtgaaagagcctctggggcgcagccagttctacgcgcgttatacgacatggaaggcccaggcggggaaagacgtggtgatggtgcaggagcgggagccggggaaggaactgttcgtggactggatgggggacacccttgaatgcgtactggacagcgagacgggaaagctgctgaaggcgcacttctttgtggcggcgttgggtgattcgggatacccggtggtactggcttacccgaatgagaagagcgagaactggatacacgcgcatgtggaaaccttcaaccggcttggcgggctgccccaggtcgtagtgccggataactgcaagaccgcggtcagcaaggcaaactattacgacccccagctgaacaaggcgtactacgaccttgcgctgtattataacatcgcggtcattcccgcacgggtccgccggccgcaggataaaagtttggtggaaggcagcatcgggtggcttgagacctggcttgtccaatggctgaaaggcggcgggccttcgccccggcagttttcaagcttcgccgaacttaacgcggcggtaaaaatccgccttgccgaactggtgaaacggccgttccagaaaagggcgggcagccgggaaagcgtgttcctggaacttgaccgccccgccntgcgccctctgccgggtacaccttatgaacaccccagttacgtcaaaaggcgggtgccgaacaactaccacgtcgaatatatgggtttttactactcggtcccccaccggtactacaaacagcaggtaaccgtaaaagcgacatattcggtaattgaagtgtatgcggacaggcttaaccggatagccgtccacgaacggcggtacaccgggaaccggtatagtacggagcggggccacatgccgcccgcccaccaggcgcaaaaggacgcgaacatgtttgacgggaaacgcttcaggaactgggcgtcgtcaatcggagtgaacgccttttacgtcattgacagcctgctgaaagaacaggaggcggagcagacggcctaccgcgcctgtatggggatcctgcagttctcgcgcaaggacgggaacgcgcgccttgaggcggcgtgccggaaggcccgggaactggggacaatttcctatgccgtcatcaaaaacattttaaaaaacaaacaggaaggcaccccgttattgtttgaggcaggccggacagcaactgcggcccatgagaacatcaggggccagaaggcttttgggtga

SEQ ID NO: 61236 - protein, 467 aa, Unknown
  Obtained from environmental sample
  DOMAIN (80)...(262): Integrase core domain
  misc_feature (1)..(467): Xaa is any amino acid
MTDGAVTRLAYPACRGGRPARNEPDWEAVQKRLDGNKRLNLQYLYEEYRDTVKEPLGRSQFYARYTTWKAQAGKDVVMVQEREPGKELFVDWMGDTLECVLDSETGKLLKAHFFVAALGDSGYPVVLAYPNEKSENWIHAHVETFNRLGGLPQVVVPDNCKTAVSKANYYDPQLNKAYYDLALYYNIAVIPARVRRPQDKSLVEGSIGWLETWLVQWLKGGGPSPRQFSSFAELNAAVKIRLAELVKRPFQKRAGSRESVFLELDRPAXRPLPGTPYEHPSYVKRRVPNNYHVEYMGFYYSVPHRYYKQQVTVKATYSVIEVYADRLNRIAVHERRYTGNRYSTERGHMPPAHQAQKDANMFDGKRFRNWASSIGVNAFYVIDSLLKEQEAEQTAYRACMGILQFSRKDGNARLEAACRKARELGTISYAVIKNILKNKQEGTPLLFEAGRTATAAHENIRGQKAFG

SEQ ID NO: 61237 - DNA, 324 bp, Unknown
  Obtained from environmental sample
  misc_feature (1)..(324): n is a, c, g, or t
atgtatattacaaggcatttcgaacctgttgtatcgcgtatagcggggcgcaaacccgtaattgttttaacaggcgcaaggcaggtgggaaaatccacaatgctgaaagaggtttatagggatacgcgctatattacgctgaacaaccccgcagtcaggcaaagcgcaaaagacaacccgtcgctgttttttgacgtcaataagccgcctgttattgtagatgaaatacaaaaagcgcccgaactttttgattacataaaaaatgtagtcgatgaggacaaaaccaaaggtcgattttttttaactggctcgcaaagtgggtaa

SEQ ID NO: 61238 - protein, 107 aa, Unknown
  Obtained from environmental sample
  misc_feature (1)..(107): Xaa is any amino acid
MYITRHFEPVVSRIAGRKPVIVLTGARQVGKSTMLKEVYRDTRYITLNNPAVRQSAKDNPSLFFDVNKPPVIVDEIQKAPELFDYIKNVVDEDKTKGRFFLTGSQSG

SEQ ID NO: 61239 - DNA, 867 bp, Unknown
  Obtained from environmental sample
  misc_feature (1)..(867): n is a, c, g, or t
gtgttcccctcccaggacatggtgttgggaataaatttccttacccgcgtcagaccgaacggcaaaaagcccgaatcttccaatcctgaatacaagaacaggataccctattattcttctcctgaagaagccatgatggcggtggagaataaaattcttgattggggatcccttatacgggttaagcccgtgaaattccctatatgggacaagattgaccatgaaatggaaatcccgaaggacggaatcatagaaaccactgtcggaaggctggtgttcaacgaggaacagcccaaggaaataccctttatcaattatgaaatgaaagacaaggagcttcgcgctcttattgagcatgtcttcaagaaaaacggttcctggattacggtaaaaatgctggacgcgattaagtcaaccggctaccgttatgcgacagtttttggggccaccattggcattgatgatattgtggttcccaaagaaaaacccgaaatgatcgataaggcaaacagggaagttgaagcgattcagacccagtggcgcaagggcattatgacccaggaggaacgctacaataaagttattgatgtatggaacaagaccaacgaggaactgaccaacattatgatgaagaccctggaggcggatcgtgacggttttaactcaatttatatgatggctaactccggggcgcgcggaagccgcaaccagatacgccagcttgccgcgatgcggggccttatgggcaagccttccggcgaaattatcgaactgccgatacgctcaaatttcagggagggctttctgttattgagttttttatttcaactaacggtgcgcgcaagggtcttgcggacccgctcttaa

SEQ ID NO: 61240 - protein, 288 aa, Unknown
  Obtained from environmental sample
  DOMAIN (1)...(156): RNA polymerase Rpb1, domain 3
  misc_feature (1)..(288): Xaa is any amino acid
MFPSQDMVLGINFLTRVRPNGKKPESSNPEYKNRIPYYSSPEEAMMAVENKILDWGSLIRVKPVKFPIWDKIDHEMEIPKDGIIETTVGRLVFNEEQPKEIPFINYEMKDKELRALIEHVFKKNGSWITVKMLDAIKSTGYRYATVFGATIGIDDIVVPKEKPEMIDKANREVEAIQTQWRKGIMTQEERYNKVIDVWNKTNEELTNIMMKTLEADRDGFNSIYMMANSGARGSRNQIRQLAAMRGLMGKPSGEIIELPIRSNFREGFLLLSFLFQLTVRARVLRTRS

SEQ ID NO: 61241 - DNA, 330 bp, Unknown
  Obtained from environmental sample
  misc_feature (1)..(330): n is a, c, g, or t
atgaataaagagtcaaaatcggctaagaaaagcgaaggaaaaagcacatctttttttgatgtactcacgtgcacttcggtgcaagtttatcctttcaaagagtccggcggcaaaaccaaagcctttgcaagggcaaccataaacgaccaactccagctaaccggtttaagggttgtggacggcgcaaacggatttttcgtctcttacccgctagacccaaactataagggcgaagactatcactccatctattacccgctcaacaaagaactacgagaccacattgaacaatgtgtcttagaaaaatatcaggaattagtcagtaattga

SEQ ID NO: 61242 - protein, 109 aa, Unknown
  Obtained from environmental sample
  DOMAIN (22)...(105): SpoVG
  misc_feature (1)..(109): Xaa is any amino acid
MNKESKSAKKSEGKSTSFFDVLTCTSVQVYPFKESGGKTKAFARATINDQLQLTGLRVVDGANGFFVSYPLDPNYKGEDYHSIYYPLNKELRDHIEQCVLEKYQELVSN

SEQ ID NO: 61243 - DNA, 1272 bp, Unknown
  Obtained from environmental sample
  misc_feature (1)..(1272): n is a, c, g, or t
atgaagaagatgcctgacaaaagcgatcatctgtcgggagccgataacgccaatttaaccaattcgatatctcaaaatacttttatagaagtggagtatttccaattttgtaaatataaacagaacgctccgggggatgtgtttgtttctcaaaaaaaccccagcgacggacgggtaatcaccgttctttccgacggtcttggctcgggaataaaagcgggagtgctcgcgactctcaccgcgaccatggcagccaaattcatttctaataatattccgattaagagagcgtctaaaatcatcatggacaccctgcctgtatgcagtgtgcgaaaaataagttatgcgacattcacgcttgttgatattgctccggacgctacggtaaaaattctggagtatgataatccgccctatatgtttatcagagaagaaaatgcgattgaaccgccaaaaaaagcgaccgcgtttgatcagcgggacgaaccaaccggacctaaaaatgacgctaacgtgctctattcgcattttaaagcgcaaagcggagatcgcctgatttttttctccgacggggtaagtcaagccggcataggaaacaaagcctaccccttcggttggacaacagccaaagcccgtgagttcgcccttcagagcgtccgggaaaaaccggaaatcagcgcgcgcgaattggctcactgcatagtccagaaggcttcacaaatagatctgttcaagccgaaagacgatatttcctgcggcgttatttatttccgggagccaagggatatgctggtactcaccggcccgccggttcaccccgaaagcgacagggagattacgaatatttnttcgtcattcaacggaaagaaagtggtttccggcggcacaaccgccgccattatcagccgggagcttaaccggcagataaaagtgaacatgaaaagctacgacaaaaacataccgccctggtcggagatggaaggggcggacatggtaaccgagggcatcatcaccctgggggcggtcgaaaggatgctggagaaccgcactgaaatcgaggcccacgcgggaggcagggacgccgcttcccgcatgatcgatctccttctggacagcgaccggatcacgtttatcgtgggcaccaagatcaacgaggcccaccaggatcctaccatgccggtagagctggaaataaggcgtaacgtgattaagcgcatcgcttccctgctgaaagaaaaataccttaaagaggtacaaatacgctatttttag

SEQ ID NO: 61244 - protein, 423 aa, Unknown
  Obtained from environmental sample
  DOMAIN (55)...(258): Stage II sporulation protein E (SpoIIE)
  misc_feature (1)..(423): Xaa is any amino acid
MKKMPDKSDHLSGADNANLTNSISQNTFIEVEYFQFCKYKQNAPGDVFVSQKNPSDGRVITVLSDGLGSGIKAGVLATLTATMAAKFISNNIPIKRASKIIMDTLPVCSVRKISYATFTLVDIAPDATVKILEYDNPPYMFIREENAIEPPKKATAFDQRDEPTGPKNDANVLYSHFKAQSGDRLIFFSDGVSQAGIGNKAYPFGWTTAKAREFALQSVREKPEISARELAHCIVQKASQIDLFKPKDDISCGVIYFREPRDMLVLTGPPVHPESDREITNIXSSFNGKKVVSGGTTAAIISRELNRQIKVNMKSYDKNIPPWSEMEGADMVTEGIITLGAVERMLENRTEIEAHAGGRDAASRMIDLLLDSDRITFIVGTKINEAHQDPTMPVELEIRRNVIKRIASLLKEKYLKEVQIRYF

SEQ ID NO: 61245 - DNA, 1041 bp, Unknown
  Obtained from environmental sample
  misc_feature (1)..(1041): n is a, c, g, or t
ttgaaggcggaagaaataaccgctttttccgcctacgttgcggaagcggcggagaaagaaaagatacctaaaatacataccatctcggcgtcgggttttcacgcggtaggtgatctgttagatgaatttgatccttctgcgctgaaagaacctgtgtttctggaactgcttgcctgtcccggcggctgcctaaacggtcccggagtaaccgacgcaacgccgggcattatccgccatttgcgccttcaagactatgccgacagcgccgacagcactctcgacagcggaatgctttccaaatcgcccgcagttgaagctgattattcgctggctccgctgccggaatcagagcacacggagcatgaaattaccgaagcgctttggaaggtgggaaaatacagccttgccgacaggctcaactgcgcaagctgcggttataatacctgccgtgatttcgcctccgctctgctgaacggacgggcggaaaaatccatgtgcgctccgtatatgcgaaaacttgccaacaaaacagctaacagccttatcaaggcgattccttccggcgttgtcatcgttgatagggatttaaaaatcatcgactgcaacgaacagtttgcccgtcttctggggaacgaagctgaagagctgtatgccataatgccggggatggaaggcgcggaactcgcgaaaatatcgtcttttacgcagtatttccaaacgattattgatccgtccggaccggaacttgcgacatccgatgtgcgggtaggcaacaaaatatttcatctaacggttttcgccgtggaaaaaggcattgccgcggctggggttgtggaagacattaccgcgccaagagtgcaaattgagacaactgttgatagggcaagggaactcatcaaaaaaaatgtttcaactgttcagcaaatagcgtttcttttgggagaaagcgcagcggaatccgaatccatcctcaattccattatcgactcttacactataaaagaggaagtgaaagaggaggaggatgaagaagatgcctga

SEQ ID NO: 61246 - protein, 346 aa, Unknown
  Obtained from environmental sample
  DOMAIN (135)...(169): Putative Fe-S cluster
  misc_feature (1)..(346): Xaa is any amino acid
MKAEEITAFSAYVAEAAEKEKIPKIHTISASGFHAVGDLLDEFDPSALKEPVFLELLACPGGCLNGPGVTDATPGIIRHLRLQDYADSADSTLDSGMLSKSPAVEADYSLAPLPESEHTEHEITEALWKVGKYSLADRLNCASCGYNTCRDFASALLNGRAEKSMCAPYMRKLANKTANSLIKAIPSGVVIVDRDLKIIDCNEQFARLLGNEAEELYAIMPGMEGAELAKISSFTQYFQTIIDPSGPELATSDVRVGNKIFHLTVFAVEKGIAAAGVVEDITAPRVQIETTVDRARELIKKNVSTVQQIAFLLGESAAESESILNSIIDSYTIKEEVKEEEDEEDA

SEQ ID NO: 61247 - DNA, 792 bp, Unknown
  Obtained from environmental sample
  misc_feature (1)..(792): n is a, c, g, or t
ttggaaattgtttcacagccggattttcgtaatgcggaagaagtaaccgcctatcttgaaaaattacgcgaaatactcctgtaccttgacgtttgcgactgcaaaatgcaggaaggctctatacgcgcggacatcaatctgtccgtgcgtccagtcggcggagaattaggcgtgcgtacagagacaaagaacatgaactcgttcaaggctattggccgcgtaattgaacatgaaatcaagcgccagatagaaatacttgaagacggcgggcagattgttcaggagacccgccgctgggacgatgacaaagggcagtcatccggtatgcgttcaaaagagaatgcccaggattaccgttattttccagagcctgacttactcccaatgcaaattgacgatacatggctttcgcaattaagagaaaccttgcctgaactggcgcagcaaaaacgggaacgttatacgcgcgattacggactttcggaatatgaagcgcaggttctgactgtccataaaaacatctgcgatttatttgaaactgtttcacagatgagcggacagccgctggaaacagcgcatcttctgacaggtgaaattatgcgtttgatgaacaatgcgaatattctgcctgaagatttgtctctcgatgcacgtaaactttcgactctaatagaacttgtttgcaccggaaaaataaaccgcagtgcttataaagaaactgtggaagcggtatttatgaataatgccgatccacagacctatattgcagaaaaagggattactcatgattaa

SEQ ID NO: 61248 - protein, 263 aa, Unknown
  Obtained from environmental sample
  DOMAIN (1)...(89): PET112 family, N terminal region
  misc_feature (1)..(263): Xaa is any amino acid
MEIVSQPDFRNAEEVTAYLEKLREILLYLDVCDCKMQEGSIRADINLSVRPVGGELGVRTETKNMNSFKAIGRVIEHEIKRQIEILEDGGQIVQETRRWDDDKGQSSGMRSKENAQDYRYFPEPDLLPMQIDDTWLSQLRETLPELAQQKRERYTRDYGLSEYEAQVLTVHKNICDLFETVSQMSGQPLETAHLLTGEIMRLMNNANILPEDLSLDARKLSTLIELVCTGKINRSAYKETVEAVFMNNADPQTYIAEKGITHD

SEQ ID NO: 61249 - DNA, 495 bp, Unknown
  Obtained from environmental sample
  misc_feature (1)..(495): n is a, c, g, or t
atgaagtgggaaactgtcatcggccttgaggttcacgccgagctgtcaacaaagtcaaaaattttctgcggctgtacaacagcctatggcggagaaccgaacacccatgtctgtcctgtctgcgcgggaatgccgggcgtattaccaaagcttaaccgctccgtagtcgaatacgctttacggcttggtatcgcgcttgactttaacattaccaaacactgcaagtttgatcgtaaaaattatttttatcccgatctgccgaaggcttatcaaatatcgcaactgtacgcccctatctgccgggacggtcatcttgacatcgaggttgacggtaagaaaaaaacaatcaacatacgcgagatacacatggaagaagacgcgggaaagctgatacacgacgcaaacggcgcgtctactttcatggacttcaaccgctgcggagtaccgctttggaaattgtttcacagccggattttcgtaatgcggaagaagtaa

SEQ ID NO: 61250 - protein, 164 aa, Unknown
  Obtained from environmental sample
  DOMAIN (1)...(157): PET112 family, N terminal region
  misc_feature (1)..(164): Xaa is any amino acid
MKWETVIGLEVHAELSTKSKIFCGCTTAYGGEPNTHVCPVCAGMPGVLPKLNRSVVEYALRLGIALDFNITKHCKFDRKNYFYPDLPKAYQISQLYAPICRDGHLDIEVDGKKKTINIREIHMEEDAGKLIHDANGASTFMDFNRCGVPLWKLFHSRIFVMRKK

SEQ ID NO: 61251 - DNA, 1470 bp, Unknown
  Obtained from environmental sample
  misc_feature (1)..(1470): n is a, c, g, or t
ttgatgacgatgtttggaaaaaccgccttggaattagcggcgcttataaaagaaaaaaagctcagcgcggttgaagccctggaagcgtgcctcgaaaaaatcgaaaagaacgacagcagttataacgctttcctctcggtgtcaaaagagaatgctctggcgcgcgcgaaagaagtccagtcgcggatagataaaggcgaaattttttcgccgcttgcgggcgtgccgatagcgataaaagataatatttccacacaaggaatcgaaaccacttgcgcgtcaaaaatgctcggtggttatacgcccgtgttcaacgcggcggttatagaaaagctggaaaaagccggcatggtcgtggccggcaaactcaacatggacgagtacgcgatgggcggctccagcgaaacaggggcctttggtccggtacgcaatccctgggatgttgtgcgcgtcgcaggcggttcgtccgggggcgccgccgctgccgtagcctcgggggaaattccgctggcgctcggttccgataccggcggcagcatacgccagcccagcgccttctgcggcgttacaggcatcaagcccacctacggctcagtgtcgcggtacgggcttttagcttacgcctcatcgctggatcagatcggccccatcgggcaaaacattgacgactgcgccgctttactttcgattatttcagggccagatacacgcgacagtacctgcgttatagaaaagccgtttgaattcggcgaaccaaaatcagaacttgaaggcgtgaagatagggctgccccgcaactatttttccggcggcattgacgatgaggtaaagaccgctgtattggctgtcgcaaaagaattcgaggtggcaggcgcaattgtcgaagagtttgaaatgccgctgatggattatatgatccccgcctactacatcatcgcttgcgccgaggcatcatcaaacctttcgcgctatgatggtttgaagtacggttatcgcagctcaaacgcccaatccctttccgaagtgtaccgtctttcccgtaacgaaggttttggactggaagtaaaaagaaggatcatgctaggttcgtttgtgctttcgtcagggtactatgacgcttattacaaaaaagccctggaagtacgcgcccttatcaaagacgcttacacgcggctgtttaccaaatttgacatgatactttctccggtcgctcctacaacggcatacaggatcggggaaaatgtaggcgatcccatgaagatgtacatgggggatatttataccgtgtcgatcaatctggcaggtcttccctcggtggcgctaccttgcggatttgattcggcaggtttgcccatcggctttcagctaattgggaacgctttctcggaaagcaaacttattggcgcggcaaagatttatcaagcgcgtactaactaccacataaaaagacctgagggtgcaaaagcatga

SEQ ID NO: 61252 - protein, 489 aa, Unknown
  Obtained from environmental sample
  DOMAIN (25)...(467): Amidase
  misc_feature (1)..(489): Xaa is any amino acid
MMTMFGKTALELAALIKEKKLSAVEALEACLEKIEKNDSSYNAFLSVSKENALARAKEVQSRIDKGEIFSPLAGVPIAIKDNISTQGIETTCASKMLGGYTPVFNAAVIEKLEKAGMVVAGKLNMDEYAMGGSSETGAFGPVRNPWDVVRVAGGSSGGAAAAVASGEIPLALGSDTGGSIRQPSAFCGVTGIKPTYGSVSRYGLLAYASSLDQIGPIGQNIDDCAALLSIISGPDTRDSTCVIEKPFEFGEPKSELEGVKIGLPRNYFSGGIDDEVKTAVLAVAKEFEVAGAIVEEFEMPLMDYMIPAYYIIACAEASSNLSRYDGLKYGYRSSNAQSLSEVYRLSRNEGFGLEVKRRIMLGSFVLSSGYYDAYYKKALEVRALIKDAYTRLFTKFDMILSPVAPTTAYRIGENVGDPMKMYMGDIYTVSINLAGLPSVALPCGFDSAGLPIGFQLIGNAFSESKLIGAAKIYQARTNYHIKRPEGAKA

SEQ ID NO: 61253 - DNA, 714 bp, Unknown
  Obtained from environmental sample
  misc_feature (1)..(714): n is a, c, g, or t
atgtatcgtgctttcaacccaggtaaagcgcacggggctcactccaagcggatacgaggttttcatagacggggcaaggctggcgacgggcatggacgccatcgaatgggtaaaacgcgggcaggaactcggcgcaggggaaatatgcgtaaacagcatcgaccgcgacggaaccctttccggttacgatatcgagcttatgaagcttgcccaggccgccgtatcggttccgctaatcgcttcaggcggcgcgggaaaacccgaacacctgaaagatcttttcaccgccacggaagtgcaggcggccatcatcagcagtatgttgtactcgccgcgcctggagcgaaattttccggtcagcgagttgaangattatttgatacaaaatggcgtagccgcgcgtccggttctngcggnagaatcatcatgcaaatagacgataaactgctcgcgtatctggaggatttgtcctgcctgacgctttcggcagatgaaaaaaccaggttaacccatgatttgcaggaaattcttgattatatggcgcggctcggcgagatcgatacaaacggcgtggtcgagcgcagccatccctttgataacgtgaatgatttccgggaggacgaggcgcgcccctcgtttgaccgcgcgctgatactgcaaaacgcgccgttcaggaatgacgagatgattatcgcgccaaaaacggttgaatag

SEQ ID NO: 61254 - protein, 237 aa, Unknown
  Obtained from environmental sample
  DOMAIN (161)...(232): Glu-tRNAGln amidotransferase C subunit
  misc_feature (1)..(237): Xaa is any amino acid
MYRAFNPGKAHGAHSKRIRGFHRRGKAGDGHGRHRMGKTRAGTRRRGNMRKQHRPRRNPFRLRYRAYEACPGRRIGSANRFRRRGKTRTPERSFHRHGSAGGHHQQYVVLAAPGAKFSGQRVEXLFDTKWRSRASGSXGRIIMQIDDKLLAYLEDLSCLTLSADEKTRLTHDLQEILDYMARLGEIDTNGVVERSHPFDNVNDFREDEARPSFDRALILQNAPFRNDEMIIAPKTVE

SEQ ID NO: 61255 - DNA, 804 bp, Unknown
  Obtained from environmental sample
  misc_feature (1)..(804): n is a, c, g, or t
atgctgacaaaaagacttatagcctgctttgacattattaacggtacggtaacaaaagcgatacaatttcaggacaacataaacgtcgcccctgccgaggaactggcggaaacaatgtacaacgagcaaatcgacgaactgattttttacgatattactgcgagcgcggaaaagcgcgggattgatatcgaaaccgtaaaaaaagtggcgcgtcgtttgtttatccccttcacagtcggcggcggcataaaaaatctgcaagacatgtacgaggcgctaaaagcgggggcggaaaagatcagcgttgattcgatggccgtcagaaacccgcaaattattacagagggctcaaaagccttcggcgcacaatgtatcgtgctttcaacccaggtaaagcgcacggggctcactccaagcggatacgaggttttcatagacggggcaaggctggcgacgggcatggacgccatcgaatgggtaaaacgcgggcaggaactcggcgcaggggaaatatgcgtaaacagcatcgaccgcgacggaaccctttccggttacgatatcgagcttatgaagcttgcccaggccgccgtatcggttccgctaatcgcttcaggcggcgcgggaaaacccgaacacctgaaagatcttttcaccgccacggaagtgcaggcggccatcatcagcagtatgttgtactcgccgcgcctggagcgaaattttccggtcagcgagttgaangattatttgatacaaaatggcgtagccgcgcgtccggttctngcggnagaatcatcatgcaaatag

SEQ ID NO: 61256 - protein, 267 aa, Unknown
  Obtained from environmental sample
  DOMAIN (5)...(237): Histidine biosynthesis protein
  misc_feature (1)..(267): Xaa is any amino acid
MLTKRLIACFDIINGTVTKAIQFQDNINVAPAEELAETMYNEQIDELIFYDITASAEKRGIDIETVKKVARRLFIPFTVGGGIKNLQDMYEALKAGAEKISVDSMAVRNPQIITEGSKAFGAQCIVLSTQVKRTGLTPSGYEVFIDGARLATGMDAIEWVKRGQELGAGEICVNSIDRDGTLSGYDIELMKLAQAAVSVPLIASGGAGKPEHLKDLFTATEVQAAIISSMLYSPRLERNFPVSELXDYLIQNGVAARPVLAXESSCK

SEQ ID NO: 61257 - DNA, 381 bp, Unknown
  Obtained from environmental sample
  misc_feature (1)..(381): n is a, c, g, or t
atgctgtttacgcatatttcccctgcgccgagttcctgcccgcgttttacccattcgatggcgtccatgcccgtcgccagccttgccccgtctatgaaaacctcgtatccgcttggagtgagccccgtgcgctttacctgggttgaaagcacgatacattgtgcgccgaaggcttttgagccctctgtaataatttgcgggtttctgacggccatcgaatcaacgctgatcttttccgcccccgcttttagcgcctcgtacatgtcttgcagattttttatgccgccgccgactgtgaaggggataaacaaacgacgcgccactttttttacggtttcgatatcaatcccgcgcttttccgcgctcgcagtaatatcgtaa

SEQ ID NO: 61258 - protein, 126 aa, Unknown
  Obtained from environmental sample
  misc_feature (1)..(126): Xaa is any amino acid
MLFTHISPAPSSCPRFTHSMASMPVASLAPSMKTSYPLGVSPVRFTWVESTIHCAPKAFEPSVIICGFLTAIESTLIFSAPAFSASYMSCRFFMPPPTVKGINKRRATFFTVSISIPRFSALAVIS

SEQ ID NO: 61259 - DNA, 660 bp, Unknown
  Obtained from environmental sample
  misc_feature (1)..(660): n is a, c, g, or t
ttgtccaaaaaaaatggatcaaataataatctttcccctcttccctccgcgcctctgcgtctctgcgtgaggtcttcttggaatagctttataaacgcggaattgctttttattgccgggctgttaatggctttaatttttctgtttaaccgttccatggaaatacgcatagcgcaatttgttttcttttgcctgcttgcctttttattcggaaaaaaaatcaacctgtttgtgacgctgctttttatgatcagtatagttttcttccatctgctcgcgcccttcgggaaagtgcttgcggtttttggccctctgcgtattacgcaaggcagcctgtacgcgggaattgacaaggcgcttaccgtttcgggccttgtgattctttcccgcgcctgcgtaaagacagatctcaggctgccgggaacaataggttcgcttcttggagaatcctttcgtatattggaattgatgcgggaaaggaggggaatgataaaatacccccacatagtgagcggtctggatcaactaatgctggagatggaaacaataactcctgatgatacggcaataaaaaaacagggaataaacgttaaaagcatcgcgctgttaagcgtgatggtactaataacggcgggaatgaatttattaaataggggctag

SEQ ID NO: 61260 - protein, 219 aa, Unknown
  Obtained from environmental sample
  misc_feature (1)..(219): Xaa is any amino acid
MSKKNGSNNNLSPLPSAPLRLCVRSSWNSFINAELLFIAGLLMALIFLFNRSMEIRIAQFVFFCLLAFLFGKKINLFVTLLFMISIVFFHLLAPFGKVLAVFGPLRITQGSLYAGIDKALTVSGLVILSRACVKTDLRLPGTIGSLLGESFRILELMRERRGMIKYPHIVSGLDQLMLEMETITPDDTAIKKQGINVKSIALLSVMVLITAGMNLLNRG

SEQ ID NO: 61261 - DNA, 822 bp, Unknown
  Obtained from environmental sample
  misc_feature (1)..(822): n is a, c, g, or t
atgtggggtatcttttgtggaaatcagaagctgccctttaacagaaggccgcgcgcgctgcgctctggagtcgtagcgaanaaattcttaaagcggaggctatacaaattatttaagcaatatgataaactaattaagatgcggtgttttttcagcgtaattatctgtattattctcacatcttttcccgcaggagctcaatcaacgggcggggcggaaaccctttccccgatggagaattaccgccggggcagggagttggaagaccagaaccgcatgaatgacgctaacacccattacaacgaggcggtgcgccaatgccttgacgaagtgtcaggcagcgccgccacgcgcaccacctatacggttttgacatggacgctgcagaggcaaagaagatataacgaagtcataacctggggagaacggggcctcaggcagtttcctgacgaataccgcctggtggaaataatgggagaggcgttcttctaccttgccgattacccgcgttcgctttcttatatgcagcgttatacaaacgcgttaccccagggggatcgcgtttcaatcgcgtatttctttaccggtgaaatataccgtttaacgcaaagataccaccatgcggatattgcctataccacggcattacgtttcgagccgtaccttgccctttggtggtacaggctcggctccgtgcgcgaagaaataggcgacagaacccaggcgattgacgcgtaccagcaggccctgcggctcaaccccaactacaacgaagcccgaaacgggcttgcgagactgcaaggagcggggaccggggactag

SEQ ID NO: 61262 - protein, 273 aa, Unknown
  Obtained from environmental sample
  DOMAIN (223)...(256): Tetratricopeptide repeat
  misc_feature (1)..(273): Xaa is any amino acid
MWGIFCGNQKLPFNRRPRALRSGVVAXKFLKRRLYKLFKQYDKLIKMRCFFSVIICIILTSFPAGAQSTGGAETLSPMENYRRGRELEDQNRMNDANTHYNEAVRQCLDEVSGSAATRTTYTVLTWTLQRQRRYNEVITWGERGLRQFPDEYRLVEIMGEAFFYLADYPRSLSYMQRYTNALPQGDRVSIAYFFTGEIYRLTQRYHHADIAYTTALRFEPYLALWWYRLGSVREEIGDRTQAIDAYQQALRLNPNYNEARNGLARLQGAGTGD

SEQ ID NO: 61263 - DNA, 1389 bp, Unknown
  Obtained from environmental sample
  misc_feature (1)..(1389): n is a, c, g, or t
atgagcgacaaaaacgttaccctcaccattgacggcctttctgtaaccgtgcctgaaggcacgaccattttagaagcggcccgcaaagtaaatgtcaaaatccccaccctctgcaatcacccggatctgtgcaaacgggctgtttgccgcatatgcgttgttgaaaacgacgggcggggaaagctgcttgcttcgtgtgcacacgacgcggaagaagggatgaatatcgttacaaacaaccaccgcatttttgacatccgtaaaacgatcatagccctgatcctttccagccatccccataatgattgccttgcctgcatacgcaacacaaaatgtgaaactgcatccctggcgggaatttacagtactagggaatctcccttcccaaagaatttttcaggtctgagcttgaagaacttaaaggaaatagcctgcaacgctcttgtcagggacatggataaatgcgttaaatgcgggcgctgcgttgaagcctgccaggagatccagacagtccgggcgattaacacttcccgacgcagcgccgattacacgatttgtaccccttacgaccgggccctctccgacagtacctgcgtcttttgcggccagtgcgccgaagtgtgcccggtaggcgcgatttacgagtacgaccaaagcgccgaggcctgggccgcgattaacgacagcgagcgccgcacagccgcgcaattcagcacaacactgtgcgcggaattagacaatgcgcttggccttcatgcgggaaccgtcagccccggtaaaacagtcaccgcgctcaaacggctcggctttgaccaggtttatgacgcccaattcacaatagacctcgcggcttcggaactcaactatgaactgcaaaaccgcgtaaaaaacggcggcaaacctttacccattatcagcgcctgttcgcaaagcgcggttaaatttattgagaatttttaccccgacctcgtcgccaacctttcgccgtgcagaagcccccgtgtaatattcggttccttagtgaaagaagaaaaaacgacagtcatctccattgagccctgcattagcaataaaagcaaaataaagtccgccaatgaacctgatttaacgcttaccgtaaaggagcttgcgcggatgttcaggcttgccggcatagattttgcttccctgccggaaagcccttttgattctattaagactgaaattgacttgattcacatgaaggaacaggctctggatataagaaccaaatgcctggctgtaaacggccttgggaaagccaggacaattctggattcgattagaaagggcgaatgtggggtatcttttgtggaaatcagaagctgccctttaacagaaggccgcgcgcgctgcgctctggagtcgtag

SEQ ID NO: 61264 - protein, 462 aa, Unknown
  Obtained from environmental sample
  DOMAIN (8)...(72): 2Fe-2S iron-sulfur cluster binding domain
  misc_feature (1)..(462): Xaa is any amino acid
MSDKNVTLTIDGLSVTVPEGTTILEAARKVNVKIPTLCNHPDLCKRAVCRICVVENDGRGKLLASCAHDAEEGMNIVTNNHRIFDIRKTIIALILSSHPHNDCLACIRNTKCETASLAGIYSTRESPFPKNFSGLSLKNLKEIACNALVRDMDKCVKCGRCVEACQEIQTVRAINTSRRSADYTICTPYDRALSDSTCVFCGQCAEVCPVGAIYEYDQSAEAWAAINDSERRTAAQFSTTLCAELDNALGLHAGTVSPGKTVTALKRLGFDQVYDAQFTIDLAASELNYELQNRVKNGGKPLPIISACSQSAVKFIENFYPDLVANLSPCRSPRVIFGSLVKEEKTTVISIEPCISNKSKIKSANEPDLTLTVKELARMFRLAGIDFASLPESPFDSIKTEIDLIHMKEQALDIRTKCLAVNGLGKARTILDSIRKGECGVSFVEIRSCPLTEGRARCALES

SEQ ID NO: 61265 - DNA, 498 bp, Unknown
  Obtained from environmental sample
  misc_feature (1)..(498): n is a, c, g, or t
gtgagcctccgtgatgtaatctttgacagcaaatttggcggcggaatggctaacggcaaaaagctaaaattctttcacatcggcggccagagcggacacatcggaagcccgtcacagctcgacacggtttacagttacaccgatctgagaaaagagggccttgctgtcggttccggggccatagtggtcatggacgaaagcgtccccatcttggaataccttaaagcggtaacaggtttctttattcacgagtcttgtggaaagtgcgttccatgcagggaaggcaacaggcagcttttaaattatctgcaaatgttatcaactcccggagcagccacaattcacgaccttcacactctgcacagccttgtccgcacaatgaccgacgcttcgttctgcggcctgggtcaaacttccgccaccgccttaagcagcgcgtggaagcacttcaaaagcgaatttgaagccaatgtcaggcacggcggaggaacacgatga

SEQ ID NO: 61266 - protein, 165 aa, Unknown
  Obtained from environmental sample
  misc_feature (1)..(165): Xaa is any amino acid
MSLRDVIFDSKFGGGMANGKKLKFFHIGGQSGHIGSPSQLDTVYSYTDLRKEGLAVGSGAIVVMDESVPILEYLKAVTGFFIHESCGKCVPCREGNRQLLNYLQMLSTPGAATIHDLHTLHSLVRTMTDASFCGLGQTSATALSSAWKHFKSEFEANVRHGGGTR

SEQ ID NO: 61267 - DNA, 591 bp, Unknown
  Obtained from environmental sample
  misc_feature (1)..(591): n is a, c, g, or t
gtggcactgtctggtgacccggaggacatatacaagacggacgcgaagctaaaggaactgttcccccagaaccagcacgtccaccgctggctggacatggcgcgcgagcgcatagccttccagggcctgcccgcgcgtatctgctggctgggtttgggcgagcgccacctggcgggcctggcgttcaacgaaatggtcaagtccggcgagctgaatgcgccgatagtcatcggccgcgaccacctggacaccggcagcgtggccagcccgaaccgcgagaccgagggcatgaaggacggcacggacgccgtttcggactggccgctgctcaatgcgatgctcaacgtcgctggtggggccacgtgggtcagcttccaccacggcgggggcgtgggcatgggctacagccagcattccggcgtggtaatagtggccgacggcacagacgccgccgccgccagactgggcagggtgctgtggaacgactgcggcaccggcgtgatgcgtcacgcagacgccggctacgaactggccataaagacggccaaggagaaaggactgaaactgccgatggtcggggcgggactataa

SEQ ID NO: 61268 - protein, 196 aa, Unknown
  Obtained from environmental sample
  DOMAIN (1)...(193): Urocanase
  misc_feature (1)..(196): Xaa is any amino acid
MALSGDPEDIYKTDAKLKELFPQNQHVHRWLDMARERIAFQGLPARICWLGLGERHLAGLAFNEMVKSGELNAPIVIGRDHLDTGSVASPNRETEGMKDGTDAVSDWPLLNAMLNVAGGATWVSFHHGGGVGMGYSQHSGVVIVADGTDAAAARLGRVLWNDCGTGVMRHADAGYELAIKTAKEKGLKLPMVGAGL

SEQ ID NO: 61269 - DNA, 462 bp, Unknown
  Obtained from environmental sample
  misc_feature (1)..(462): n is a, c, g, or t
gtgacgcatcacgccggtgccgcagtcgttccacagcaccctgcccagtctggcggcggcggcgtctgtgccgtcggccactattaccacgccggaatgctggctgtagcccatgcccacgcccccgccgtggtggaagctgacccacgtggccccaccagcgacgttgagcatcgcattgagcagcggccagtccgaaacggcgtccgtgccgtccttcatgccctcggtctcgcggttcgggctggccacgctgccggtgtccaggtggtcgcggccgatgactatcggcgcattcagctcgccggacttgaccatttcgttgaacgccaggcccgccaggtggcgctcgcccaaacccagccagcagatacgcgcgggcaggccctggaaggctatgcgctcgcgcgccatgtccagccagcggtggacgtgctggttctgggggaacagttcctttag

SEQ ID NO: 61270 - protein, 153 aa, Unknown
  Obtained from environmental sample
  misc_feature (1)..(153): Xaa is any amino acid
MTHHAGAAVVPQHPAQSGGGGVCAVGHYYHAGMLAVAHAHAPAVVEADPRGPTSDVEHRIEQRPVRNGVRAVLHALGLAVRAGHAAGVQVVAADDYRRIQLAGLDHFVERQARQVALAQTQPADTRGQALEGYALARHVQPAVDVLVLGEQFL

SEQ ID NO: 61271 - DNA, 1572 bp, Unknown
  Obtained from environmental sample
  misc_feature (1)..(1572): n is a, c, g, or t
ttgcggtttccctcgccccgtcgtttgtttcggaatttaccgactggaaacaggaagaacttatcgccgcgcttaaaaaactggggttcgccggcgtatcagagacagctctgggcgctgattttctttcggcccgcagcgcccttgnatttggcgtcgctcgcagagcggagcgccgccgcaggcagcagcccgttgatgatttcctcggcctgtcctgtcattgttgactatataaaactatacaaaccccttctcgcgccctttatttcgccttacgcctcgccgctccttacccacgcccgctttctccgttcccattacggcgggaaatctgcggtggtgtttatagggccttgtatcgccaagaaacacgaggccgatctgtacagtgaggagattgacgccgccattagctttgcggaactgcgtgagtggctgcacaaagagcgtgtaacgccacggacaatctcgtcttcgctttccccttctgcccttgcggactgcgcgtttgagccacgccggagcgcgaaaggggcttttttccccctcgaaggcggtgagataaccgctttttccgcttatgtcgaaaaagcggcggcggaagcgggaacaagggtacgcaccctctcggcatcgggctttcatgcggtgggaagtctgttggatggattcgatcctgccacgctgaatgcgccgttgtttctggaactcctgtcctgtcccggcggctgtctcaacggccctggaatgaccggcgcggtgtcgggcgctatccgtcaagttcttctaaaagactatgctttctctgctgataacaccctcgacgatgacgcgctttccctctcgcctcagattgatgccggttataccctggccccactgcctccctcggagcacacggaaaaggaaatcgctgaagcacttttgaaggtgggaaggtacagccctgctgatcggcccaactgctcaagctgtggttacgatacctgccgggatttcgcagtcgccctgctggacggacgggcggagaaatccatgtgcgcttcgtatatgcgcgagcttgccaataaaacagccaacggacttatcaaggcgattccttccggcgttgccatcgttgatcgggatttgaaaataatcgactgtaacgagcagtttgcccgtctcatgggaagcgaggccgaggagctgtttgccatgatgccggggctggtaggggcggacttcgcaaaagtgtcgcctttcccgcagtatttccagacgattattgatccgtcagggccggagcttgcgcagaccgacgtgcgggtcggcagtaaaatatttcacctgactgttttcgccgttgaaaagggcattgcggcggcaggggttgtggaagacattaccgcgcctcgggtgcgaatcgaaaaaaccgtcgagcgtgcgcgagagataatcaaaaagaatgtttccactgttcagcaaatagcttttcttctgggagaaaatgcggcggaatccgaggctatcctaaattccattatcgagtcttacacgatagaggaagaagatgacggacaacattga

SEQ ID NO: 61272 - protein, 523 aa, Unknown
  Obtained from environmental sample
  DOMAIN (320)...(351): Putative Fe-S cluster
  misc_feature (1)..(523): Xaa is any amino acid
MRFPSPRRLFRNLPTGNRKNLSPRLKNWGSPAYQRQLWALIFFRPAAPLXLASLAERSAAAGSSPLMISSACPVIVDYIKLYKPLLAPFISPYASPLLTHARFLRSHYGGKSAVVFIGPCIAKKHEADLYSEEIDAAISFAELREWLHKERVTPRTISSSLSPSALADCAFEPRRSAKGAFFPLEGGEITAFSAYVEKAAAEAGTRVRTLSASGFHAVGSLLDGFDPATLNAPLFLELLSCPGGCLNGPGMTGAVSGAIRQVLLKDYAFSADNTLDDDALSLSPQIDAGYTLAPLPPSEHTEKEIAEALLKVGRYSPADRPNCSSCGYDTCRDFAVALLDGRAEKSMCASYMRELANKTANGLIKAIPSGVAIVDRDLKIIDCNEQFARLMGSEAEELFAMMPGLVGADFAKVSPFPQYFQTIIDPSGPELAQTDVRVGSKIFHLTVFAVEKGIAAAGVVEDITAPRVRIEKTVERAREIIKKNVSTVQQIAFLLGENAAESEAILNSIIESYTIEEEDDGQH

SEQ ID NO: 61273 - DNA, 477 bp, Unknown
  Obtained from environmental sample
  misc_feature (1)..(477): n is a, c, g, or t
atgagcgccacgttgggcgccgccgcaaaagcgccggtttacacggatcttgccgaatgtcatgactgttacaagtgcatccgcaaatgccctgtaaagtctatcaaggtggaaaaaggacaggcgagcatcctgtttgaccgctgtatttactgcgggcgctgcgtaatgagctgtcccgcccacgccaaacattaccggaacgatgttgagaaagtaaagcacctgttggcggacgggcggaaagttgcggtttccctcgccccgtcgtttgtttcggaatttaccgactggaaacaggaagaacttatcgccgcgcttaaaaaactggggttcgccggcgtatcagagacagctctgggcgctgattttctttcggcccgcagcgcccttgnatttggcgtcgctcgcagagcggagcgccgccgcaggcagcagcccgttgatgatttcctcggcctgtcctgtcattgttga

SEQ ID NO: 61274 - protein, 158 aa, Unknown
  Obtained from environmental sample
  DOMAIN (13)...(36): 4Fe-4S binding domain
  misc_feature (1)..(158): Xaa is any amino acid
MSATLGAAAKAPVYTDLAECHDCYKCIRKCPVKSIKVEKGQASILFDRCIYCGRCVMSCPAHAKHYRNDVEKVKHLLADGRKVAVSLAPSFVSEFTDWKQEELIAALKKLGFAGVSETALGADFLSARSALXFGVARRAERRRRQQPVDDFLGLSCHC

SEQ ID NO: 61275 - DNA, 1368 bp, Unknown
  Obtained from environmental sample
  misc_feature (1)..(1368): n is a, c, g, or t
gtgaatagaaaaaagttaaaatgcctaatgaggggatgtagaatgaaaattattttgagtaaaaaatttgattctttttggaagaaaaatacaaggcgatctgaagatttggaaacggagaaagttgtaaaaaagataattgcggaagtacgcgagaaaggggatgctgctgtcagaaaatttgcgtctaagtttgataagtcttctccgaaacagcttgaagttcctttttctgaagcaaaacgcgctcttgaacagttatgcgcaaacgaaccgtctttggcgcaggcgcttgagcttgcggcgaagcacattaaacgcttttctgacaaacagagagaacaatttgccgattttgaatttgaaatggagcctggtttggttaccagccagcgtatactccccattgaaagagcggcaatttacgtccccggcggacggtttcccctgttttcctcggtactcatgtgcataatccccgctttttccgccggtgtggaagaagtgatactttcatcgccgcctacgaaagacggtctgccggataaaaaaatactcgccgccgccgctgttgccgctgaagcagcgggtaacaaaaaagtgcgcgttttcgctatcggcggcgctcaggctatagccgctcttgcgcttggcacgaaatctgttccgcgcgttgatgttatcgccggacccggcaataaatttgtcgccgccgccaagcgtcagcttttcggcgaagtagggatagactttatcgccggtcccaccgacgtgctggttatcgcggacgggcaatcagacggtgatattgataagacagccgatcttgtcgcggcggatatgcttgggcaggcggaacatgatcctgacgcgagggcgcgggcgttggttccaagtgaagaacttgccgagaaaattcttgcggctattgaaagaagaattaaaaaactgccgacggaaaaaaccgcacgcgcttctttggatacgggcgggttaattgttgtttatgaaacgcgggaagatgcgatacgtatagcgaacacaatcgcgcctgaacatcttgagcttcaaattgccgatgcggataattggattccacagttgaaaaattacggctctctttttataggaagcctatgcgcggaagttctcggcgattattcggcggggattaaccacacgctgcctacgtcgacaagcgcccgttttacgggcggcttgtctgtgcggcattttttgaagacggttaccactttgcgctgcgctcaaggcgaagggtttgaaagagcgcgtaacgcggcggaagcgcttgcgagggcggaagggctggaggggcatgcgttgagcgcggcggctaggaaggggtaa

SEQ ID NO: 61276 - protein, 455 aa, Unknown
  Obtained from environmental sample
  DOMAIN (27)...(455): Histidinol dehydrogenase
  misc_feature (1)..(455): Xaa is any amino acid
MNRKKLKCLMRGCRMKIILSKKFDSFWKKNTRRSEDLETEKVVKKIIAEVREKGDAAVRKFASKFDKSSPKQLEVPFSEAKRALEQLCANEPSLAQALELAAKHIKRFSDKQREQFADFEFEMEPGLVTSQRILPIERAAIYVPGGRFPLFSSVLMCIIPAFSAGVEEVILSSPPTKDGLPDKKILAAAAVAAEAAGNKKVRVFAIGGAQAIAALALGTKSVPRVDVIAGPGNKFVAAAKRQLFGEVGIDFIAGPTDVLVIADGQSDGDIDKTADLVAADMLGQAEHDPDARARALVPSEELAEKILAAIERRIKKLPTEKTARASLDTGGLIVVYETREDAIRIANTIAPEHLELQIADADNWIPQLKNYGSLFIGSLCAEVLGDYSAGINHTLPTSTSARFTGGLSVRHFLKTVTTLRCAQGEGFERARNAAEALARAEGLEGHALSAAARKG

SEQ ID NO: 61277 - DNA, 1095 bp, Unknown
  Obtained from environmental sample
  misc_feature (1)..(1095): n is a, c, g, or t
atgagcgaattttggaacagccgaataaaaaaactttctccgtatactcccggcgaacaaccgaaggacaggcagataattaaacttaacaccaacgaaaacccctatcctgtttctcccaaagttatagaagcgattaaaaacgccgcagacgagcgtcttcgcctgtatcccgaccctgaatgtacggcgttccgtgaagccgccgccgcccgttacggcgtaagagaacaggaactttttgcaggtaacggctccgatgagatattagcgtttgctttcggcgctttttttgaaagcggcgaaaaagcggcgcagatactttttcccgacatcacctacagtttttatcctgtttacgccaatctttgggaaatcccgtacaacacaatcccgcttgatcaggatttctcgattaacataaaagattataaaatccattcaggcggcgtaatatttcncaatccaaacgccccaaccgcggttggaaagccgttagacgaagtattgtctcttgcggaataccttgaaaaacagggaaaagttcttattgttgatgaagcctacatcgcgttttcaggctcaagcgaagttaaaacggcggtaagctctattaatactcacccaaatctgttaaccgtacacacgttttcaaaatccgcgtctcttgccggtttgcgctttggttttgccattggcaatgaaaaattgatcgaaggcctttgccgcatacgcgattcatttaattcatacaccatcgacattcttgccctggcgggagcgacagcggcggtctctgacgcggcgtattatgaggaaatcaacggcagagttattgccacgagagaaaagactgcgggagcattacaagatcttggttttacggttttgccgtcgtcggctaactttttatttgtaaaaccgcccaaagtaagcggcgcggaattatttaccgcgttacgcggccggaatattttggtacggcatttcaataaagacagaatagcggattatctacgggtaagtatagggacggacgaggatatggagaaggttgttgaggcgtgtagggagataattagcaaagagcaatga

SEQ ID NO: 61278 - protein, 364 aa, Unknown
  Obtained from environmental sample
  DOMAIN (24)...(356): Aminotransferase class I and II
  misc_feature (1)..(364): Xaa is any amino acid
MSEFWNSRIKKLSPYTPGEQPKDRQIIKLNTNENPYPVSPKVIEAIKNAADERLRLYPDPECTAFREAAAARYGVREQELFAGNGSDEILAFAFGAFFESGEKAAQILFPDITYSFYPVYANLWEIPYNTIPLDQDFSINIKDYKIHSGGVIFXNPNAPTAVGKPLDEVLSLAEYLEKQGKVLIVDEAYIAFSGSSEVKTAVSSINTHPNLLTVHTFSKSASLAGLRFGFAIGNEKLIEGLCRIRDSFNSYTIDILALAGATAAVSDAAYYEEINGRVIATREKTAGALQDLGFTVLPSSANFLFVKPPKVSGAELFTALRGRNILVRHFNKDRIADYLRVSIGTDEDMEKVVEACREIISKEQ

SEQ ID NO: 61279 - DNA, 405 bp, Unknown
  Obtained from environmental sample
  misc_feature (1)..(405): n is a, c, g, or t
atgaaaggggaaaattcaggcaatgtgttaaaacttgtcagattgagaaccgattgcgacagagacgcattactggcgacagcacagcccgcaggtcccgtctgccacacaggagcgtggtcatgtttcgccactaacaaagaatatacattgcaatttttgcagaatataataaaggagcgttttcgcaaccccgcgcccggttcgtatacagccacacttgacgacgaacttgtgcgtgaaaaagtcatggaagaggcgcaagagttatgcgacgcaaaaactcatgaagaaattatctgggaagccgctgatcttctttatttttccaccgtattgatgacaagagccggagtaaccgttcaggaaatacttgacgagcttgatcggaggcacaaaaagtaa

SEQ ID NO: 61280 - protein, 134 aa, Unknown
  Obtained from environmental sample
  DOMAIN (1)...(45): Phosphoribosyl-AMP cyclohydrolase
  misc_feature (1)..(134): Xaa is any amino acid
MKGENSGNVLKLVRLRTDCDRDALLATAQPAGPVCHTGAWSCFATNKEYTLQFLQNIIKERFRNPAPGSYTATLDDELVREKVMEEAQELCDAKTHEEIIWEAADLLYFSTVLMTRAGVTVQEILDELDRRHKK

SEQ ID NO: 61281 - DNA, 708 bp, Unknown
  Obtained from environmental sample
  misc_feature (1)..(708): n is a, c, g, or t
gtgtgcgcagttatgaactttataaaaaccacgatgcttcttgccacgctgacggcgatagtcgtcgcgttcggttactattacggcggggaaagcgggatgttcatagcgtttgccgccgccgctttgatgaactttttttcgtattggttttccgacaagattgtgcttaaaatgtatcgggcgcgccaagtagggcgtaacgacgcgccgcggttgtacgagatcgttgagaagctcgcccgtaaggcgcaaatacccatgccgaaggtgtacatcatccccaccgacacgcccaacgctttcgccacaggccgcagcccgtcgcacgcgtcggtagcggcgacggagggcattatgcgcctgcttagcgccgacgagcttgagggcgttatggcgcacgagttggcgcatgtgaagcaccgcgacatcctgacctgcaccatcgccgcgacgctcggcggcgcgataagcatgctggggcgccctatttttcatattcggcggcggcgacggggacagaaacagggagggcgccggtataggcgccgtggcggatatggttctcgcgccgatagccgcaatgcttatccaaatggccatatcgagaagccgcgagtatgccgccgacgccgccggagcccgcatctgcggcaaaccgatggcgctggccagcgcgctcaaccgtctggaattaggctcgaatag

SEQ ID NO: 61282 - protein, 235 aa, Unknown
  Obtained from environmental sample
  SIGNAL (1)...(25)
  DOMAIN (77)...(215): Peptidase family M48
  misc_feature (1)..(235): Xaa is any amino acid
MCAVMNFIKTTMLLATLTAIVVAFGYYYGGESGMFIAFAAAALMNFFSYWFSDKIVLKMYRARQVGRNDAPRLYEIVEKLARKAQIPMPKVYIIPTDTPNAFATGRSPSHASVAATEGIMRLLSADELEGVMAHELAHVKHRDILTCTIAATLGGAISMLGRPIFHIRRRRRGQKQGGRRYRRRGGYGSRADSRNAYPNGHIEKPRVCRRRRRSPHLRQTDGAGQRAQPSGIRLE

SEQ ID NO: 61283 - DNA, 312 bp, Unknown
  Obtained from environmental sample
  misc_feature (1)..(312): n is a, c, g, or t
gtggcggatatggttctcgcgccgatagccgcaatgcttatccaaatggccatatcgagaagccgcgagtatgccgccgacgccgccggagcccgcatctgcggcaaaccgatggcgctggccagcgcgctcaaccgtctggaattaggctcgaatagagtcccgatggacatgggcgaccccgccacgtcgagcctcttcatagtcaacccgttcaaagcgggcttcatggccaaaatcttcagcacccacccacccatggacgagcgcgtcaaacgcttgcgcgagatggagcgcgggcacgccctctaa

SEQ ID NO: 61284 - protein, 103 aa, Unknown
  Obtained from environmental sample
  SIGNAL (1)...(25)
  misc_feature (1)..(103): Xaa is any amino acid
MADMVLAPIAAMLIQMAISRSREYAADAAGARICGKPMALASALNRLELGSNRVPMDMGDPATSSLFIVNPFKAGFMAKIFSTHPPMDERVKRLREMERGHAL

SEQ ID NO: 61285 - DNA, 1395 bp, Unknown
  Obtained from environmental sample
  misc_feature (1)..(1395): n is a, c, g, or t
atggcatcaagcattcgttcgaaaatcctcattccgtgcgtcggcatagccgtggtctgcgtcgtcgcaagcacggccgtaaccatcgacctggcttggaaactcgtcgtcaactcgctgtacgacaagctgaagaccacccaccacatgaccgagtccaccgtggagcgctaccgagaagaagccgccctcgtggcgaagatagccgctgaggacgatatcgtcgtttcggcgctctccgcgtacctgagcgcgaaggacggggcgtcgcgtgacaagatgctcaaggcggcgtcgcttgtggccgccgagggcggcgtcgacttcttgaccattcttgacgccgctggggtggcggtggcgaatacgcacgaaccggctaagtacggagacaagcagatcgataatgtaagcgtccgaaacgccctcatcggaaagcagtacacgaccatagagaccggtacgcaggtcaagatgtcgatatgctccggcgcacccgtcaaggacgcgtccgggcgggtaataggcgccgtttcagccggttataggttggatcagaacaggtttatcgacgagttgaaggagtctaccctctccgacgtggttatgtttttgagggacacacgggtggcttccacgataaaagacagcaaaggcgcgtacgcggttgggacaaaagcgccggtagaggttagcaaaaaggtcttgggcggagagaactatatgtccggagacaagatagacggtaaactcggccgcgccgagtactcgcctctgcgcaacgcggagggggaggtggtcgggatgctgtacagcaggatagacacagactacgttttgacggacggtgtcaagatgataaccaccgctctatcgatcggtgtggttttgtgcgtcgcggcggcgtttttcgcgacatcggtggccaaccgcataaccaagccgctcaaggagatcaccgccgtcgccggacacgtggcgcagggcgacgtggagttcgagatgaacatacccgccgaccacaattcaaaagatgagaccatgcagctcgccgcctctttcaaggacatgatagaggccagccgggagcagggacgcttgttagaaggcgtggcccacggcgacatatcgcacaatatcgtgcccaaaagcgacaaagacaaactcagctacgccattgagcacatgttggaaaattccaagacccaggtgtcggtcatggaacgcttggcgaacaacgacctgacagccgccgtcgtcccacggtcggatttggactccatgaacatcgctataaagaagatgctcggcaacctgaacaccgccatgggggagataaacgacgcctccgccagatttagggacgtagcacatcagatttcgagcggttcctag

SEQ ID NO: 61286 - protein, 464 aa, Unknown
  Obtained from environmental sample
  SIGNAL (1)...(26)
  DOMAIN (290)...(363): HAMP domain
  misc_feature (1)..(464): Xaa is any amino acid
MASSIRSKILIPCVGIAVVCVVASTAVTIDLAWKLVVNSLYDKLKTTHHMTESTVERYREEAALVAKIAAEDDIVVSALSAYLSAKDGASRDKMLKAASLVAAEGGVDFLTILDAAGVAVANTHEPAKYGDKQIDNVSVRNALIGKQYTTIETGTQVKMSICSGAPVKDASGRVIGAVSAGYRLDQNRFIDELKESTLSDVVMFLRDTRVASTIKDSKGAYAVGTKAPVEVSKKVLGGENYMSGDKIDGKLGRAEYSPLRNAEGEVVGMLYSRIDTDYVLTDGVKMITTALSIGVVLCVAAAFFATSVANRITKPLKEITAVAGHVAQGDVEFEMNIPADHNSKDETMQLAASFKDMIEASREQGRLLEGVAHGDISHNIVPKSDKDKLSYAIEHMLENSKTQVSVMERLANNDLTAAVVPRSDLDSMNIAIKKMLGNLNTAMGEINDASARFRDVAHQISSGS

SEQ ID NO: 61287 - DNA, 1896 bp, Unknown
  Obtained from environmental sample
  misc_feature (1)..(1896): n is a, c, g, or t
atgagcgatcgcgccgttagataccgtaaattggaagatattcgcaaccttaaaggcactgcggtaaacgttcaatcaatggttttcggcaatttcggcgatgattcgggaacgggagtatgtttcagccgcgaccccagtaacggtattaatgaattttacggcgaatatttaatgaacgcgcagggagaggacgtagtagcgggtatcagaacccccgaaagaatcactactctggcaaagaagaatcctgctatatacaaacagcttgtcgccattaaaaacagactggaaaagcactttaaagatatgcaggatatggaatttacagtacaacagggcgagcttttccttctgcaaacgcgtaacggtaaacgcgccggaaccgcggcggtaaaatgcgcggttgacatggtagcggaaggtttaatcgataaaacaaccgctattatgcgcgtttcacccaaccaccttgaccagcttttgcacccgatgatcgattttaaggcgcaaaaagatgtaaaagcccttacaaaagggttaaacgcctcccccggagccggtacgggcaggatcgtttttaacgcgaaggacgcagagctttggcacgcaagaggcgaaaaagtcattttggttcgtaaagatacaagtcccgaagacatcggcggtatggttgtttcgcagggtattcttacctcgacgggcggcatgacaagccatgcggcggttgtcgcgcgcggtatgggaactccttgtgtcgccggcgcaaaaggcattttagtagaaggtaatacggtagaaatcggcgggaaaaaatttaatgaaggcgattggataacaattgacggcacttccggcgaagtatacgaaggaaaattgccgctggtagcaccttcaatttccaaagatgtaaatactttccttaaatggtgcgatgacgttcgcgcaagctcggttcgcggcagaataaaaggttttgccgtaagaaccaacgccgatcagcctgacgacgcaaagagagcgtttgctttcggcgctcagggtatcggtctttgccgcacagagcacatgttctttgataaagaaaaacttatccacttccgcgccatgattgtcgcggaaacggaagcggagagaaaagagcagttaaagaagattcttccccttcaacagaaagatttttacggtattttcaaggcgatggagggtcgccctgtaacaatcaggcttttagacccgcctttgcatgaatttgtaccccatacaaaggaagaagttgaagaattagccggacatttaaacataagcgttgataaattaaacgctaaaatcggcactcttatagaaagcaacccaatgttagggcatcgcggctgcagattggcggtaacataccctgaaatctacgatatgcaggtagaagctatcgctcttgccgctgttgaatgcgtaaaagaaaaaattccggtacatcccgaaattatgatacctatcgtagtaaccgcaagagaactcaggcttttacgccccaacgtggagaaaatatttgaaaaagtgctttctgcggcaggagtaaaggttcctgtaaccattggtacgatgattgaagtgccgcgcgccgcgattcgctcagcgcatatcgcgcattatgcggactttttcagttttggaacaaacgatcttacacagatgacattcgcctttagccgcgatgacgttgcgtcgttcctgcctttctatcttgaaaaaaatgttcttgatgttgatcccttcaagaccattgaccaggacggagtaggcggtttgatggagttggcgattaaagaaggtcgatctgtaaaaccggacatgaagatgggatctgcggagagcacggcggagaccctgcaactatag

SEQ ID NO: 61288 - protein, 631 aa, Unknown
  Obtained from environmental sample
  DOMAIN (1)...(151): Pyruvate phosphate dikinase, PEP/pyruvate binding domain
  misc_feature (1)..(631): Xaa is any amino acid
MSDRAVRYRKLEDIRNLKGTAVNVQSMVFGNFGDDSGTGVCFSRDPSNGINEFYGEYLMNAQGEDVVAGIRTPERITTLAKKNPAIYKQLVAIKNRLEKHFKDMQDMEFTVQQGELFLLQTRNGKRAGTAAVKCAVDMVAEGLIDKTTAIMRVSPNHLDQLLHPMIDFKAQKDVKALTKGLNASPGAGTGRIVFNAKDAELWHARGEKVILVRKDTSPEDIGGMVVSQGILTSTGGMTSHAAVVARGMGTPCVAGAKGILVEGNTVEIGGKKFNEGDWITIDGTSGEVYEGKLPLVAPSISKDVNTFLKWCDDVRASSVRGRIKGFAVRTNADQPDDAKRAFAFGAQGIGLCRTEHMFFDKEKLIHFRAMIVAETEAERKEQLKKILPLQQKDFYGIFKAMEGRPVTIRLLDPPLHEFVPHTKEEVEELAGHLNISVDKLNAKIGTLIESNPMLGHRGCRLAVTYPEIYDMQVEAIALAAVECVKEKIPVHPEIMIPIVVTARELRLLRPNVEKIFEKVLSAAGVKVPVTIGTMIEVPRAAIRSAHIAHYADFFSFGTNDLTQMTFAFSRDDVASFLPFYLEKNVLDVDPFKTIDQDGVGGLMELAIKEGRSVKPDMKMGSAESTAETLQL

SEQ ID NO: 61289 - DNA, 735 bp, Unknown
  Obtained from environmental sample
  misc_feature (1)..(735): n is a, c, g, or t
ttgcctattattcaaaaaaataatatgaatgtgggagttccctcggttgcgactaccgtgcaggcgaatatcgacttttcgaactttcttgcccatcttttccagcgcggcggccgtttgtacaacgatgagggttcccgcaccctgctggacagcgagaccgccgttgaagcgtttgacgtttacacgaaattttttacccattataaaacgcccccggtatatgattttgtcaaccgtttccgcactggcgagatgcctcttgcctttgccgattatacaaactttaacacgctggaagttttcgcgccggaactgcggggactgtggggcttcgcccacatgcccggccttcgcaagccggacggcggaattgaccgttcggtgccgacaggaacgctcgcctcgatgattttttccaacgcgaagaggccggatcttgcctgggaattcctgaagtggtgggccagcgccgatacccagctccgctttggccgggagcttgaaagcgtcatgggcgcggcggcgcggtatcccacggcgaattatgacgcttttacgcggctttcctggggttcggagcagatggccgtactgcgggaacagcgttcatggacggtgggtacgccggaagtgccgggcggttactacgtcagcagacatataaccaacgcggtgcgccgcattttgaacgaaggcgaggatacgcgagagacctgctggattacagcataa

SEQ ID NO: 61290 - protein, 244 aa, Unknown
  Obtained from environmental sample
  misc_feature (1)..(244): Xaa is any amino acid
MPIIQKNNMNVGVPSVATTVQANIDFSNFLAHLFQRGGRLYNDEGSRTLLDSETAVEAFDVYTKFFTHYKTPPVYDFVNRFRTGEMPLAFADYTNFNTLEVFAPELRGLWGFAHMPGLRKPDGGIDRSVPTGTLASMIFSNAKRPDLAWEFLKWWASADTQLRFGRELESVMGAAARYPTANYDAFTRLSWGSEQMAVLREQRSWTVGTPEVPGGYYVSRHITNAVRRILNEGEDTRETCWITA

SEQ ID NO: 61291 - DNA, 933 bp, Unknown
  Obtained from environmental sample
  misc_feature (1)..(933): n is a, c, g, or t
atgagtttaggacggtatacggcaaaaaagaaagcggccttttcgcatctgttaaaggaaatagtaaaaagccgcgtgtgttatatttttctcgccccatacgcgatagtctttgccctgttctttatcgctccgctggtggtttcggtattttacagttttacctattttaatattcttgagccacccaaatttatcggcctgcgcaattatatcaaccttttgctgggcgacgatgtgttcctcaaggcgatgaaaaacacctttatcatggcggcgataacaggcccaatcggttatatcttttcattcctgttcgcctggtttatcaatgaactgccccgctatatccgcgccgtggtaacgcttgttttttacgcgccctcaatttccggcgccgtctacatgatatgggcgatcattttctccggcgacgcctacggctacatcaacgggcttttgctgaacctgggaattctggatcagccggtgctctggctgaccgatccaaggtacatgatgccggttatgttagttgtcattctttggatgagcctgggaacgggattcctggcttttatagcgggcctgagcactattgacgtgtcgctctacgaggccggcctggtggacgggataaagaaccgctggcaggaactctggtacattaccctgcccaatatgaaaggtatgctgatgttcggcgcggtcatggcgattacccagtcattcggcgtcgccgacgtcactgtggccctggcgggcttccccagcaccgattatgcggtgcataccgtggtgaaccacctggttgattacggttcccttcgctttgaaatgggttatgcgtcagcgattgcgacactgctgttcctgacccatgatatctgcaatacggtggtgcagaaattactgcgccgcgtggggacctga

SEQ ID NO: 61292 - protein, 310 aa, Unknown
  Obtained from environmental sample
  DOMAIN (81)...(310): Binding-protein-dependent transport system inner membrane component
  misc_feature (1)..(310): Xaa is any amino acid
MSLGRYTAKKKAAFSHLLKEIVKSRVCYIFLAPYAIVFALFFIAPLVVSVFYSFTYFNILEPPKFIGLRNYINLLLGDDVFLKAMKNTFIMAAITGPIGYIFSFLFAWFINELPRYIRAVVTLVFYAPSISGAVYMIWAIIFSGDAYGYINGLLLNLGILDQPVLWLTDPRYMMPVMLVVILWMSLGTGFLAFIAGLSTIDVSLYEAGLVDGIKNRWQELWYITLPNMKGMLMFGAVMAITQSFGVADVTVALAGFPSTDYAVHTVVNHLVDYGSLRFEMGYASAIATLLFLTHDICNTVVQKLLRRVGT

SEQ ID NO: 61293 - DNA, 849 bp, Unknown
  Obtained from environmental sample
  misc_feature (1)..(849): n is a, c, g, or t
gtggccgggcagaaggtgaaccgctcctacggcggcgacgcgtttatttttgtaatcctgacggttttcggcctgttcttcgcctaccccctggtttacgccattaacaacgccttcaagcccctgaatgaaattttcctgtttccgccgagtctctgggtgcgccagcccacgatgaataactttcaggatctgtttatcattatgagcaagtcctgggttactttttcccgctatatttttaacaccgtgctgatcaccgccgttggaacgggcggcctcattatcgtggcttcgatgggggccttcgtggtatccaaataccgcttccccggcgcgaagctgttttttaacgtggtcattgtcaccctgatgttctccggttatgttacggctattcccaattacctggttatggcgaaactcggctgggtggatacctacctttcggttatagttccggcgttcgccatgccgatggggttcttcctgctcaaacagtttattgacaccataccgaacaccctgcttgaagcggcgaaggttgacggcgcgaaagagtggcgcattttcctggtgataatccttcccatgataaagcccgcgtggctgaccgtgatgattttttccgtgcagaatctgtggaacgcccgcgcttccaactttatttattcggagcagcttaaaaccctgccctacgcgctctcgcagataatcacaggcggcatagcccgcgccggagtaggggctgcggtaacgctttttgtaatgatcgtgccgctggtaatgttcattttcgcgcagagcaacattctgcagacgatggccagttcagggatcaaagaatga

SEQ ID NO: 61294 - protein, 282 aa, Unknown
  Obtained from environmental sample
  DOMAIN (76)...(282): Binding-protein-dependent transport system inner membrane component
  misc_feature (1)..(282): Xaa is any amino acid
MAGQKVNRSYGGDAFIFVILTVFGLFFAYPLVYAINNAFKPLNEIFLFPPSLWVRQPTMNNFQDLFIIMSKSWVTFSRYIFNTVLITAVGTGGLIIVASMGAFVVSKYRFPGAKLFFNVVIVTLMFSGYVTAIPNYLVMAKLGWVDTYLSVIVPAFAMPMGFFLLKQFIDTIPNTLLEAAKVDGAKEWRIFLVIILPMIKPAWLTVMIFSVQNLWNARASNFIYSEQLKTLPYALSQIITGGIARAGVGAAVTLFVMIVPLVMFIFAQSNILQTMASSGIKE

SEQ ID NO: 61295 - DNA, 1248 bp, Unknown
  Obtained from environmental sample
  misc_feature (1)..(1248): n is a, c, g, or t
atggaagccctgcgctgtccgccgggtgatgagattgtcgatcacctttccggcggcgagcggcggcgggtggcgctgtgccgcctgcttttgcaaaagccggacattctgctgctggacgagccgaccaaccaccttgacgcggaaactgtcgcctggcttgagcggcatttgcgggattacgcgggaacggttatcgccgtcacccacgaccgttactttttggacaatgttgccggctggattctggaacttgaccgcggcgagggtattccatggaaagggaactattccggctggctggagcagaaagagcagcgcatggctcaggaagaaaagggcgaaagcgaccggcgcaaaaccttacagcgggaacttgagtggatacggatgagtcccaaaggccgccatgccaaaagtaaggcccgcattacccaatatgaaaaactctttcaggacgatgagcgggagcgttcccgcggcgcggcgcagagcagcaaaattaccataccggcggggccgcatttgggcaagctggtcattgaggcgcaagggcttgcgaaatcgtacggcgaccgcatactgtttgaaaaactggattttaccataccgcccggcgcctgtgtcggcattatcgggccgaacggcgcgggcaaaaccacgttgtttaaaatcatcaccggcgcggaaaagcccgattccggcgaactgcggttaggcgacagtgttaagctgggttatgccgaccagatgcgcgccgtgttagacgacaataaaagcgtgtgggaacagctttccggcggtcaggatttgattaaactgggactagggcagggggcgcgggaagtcaactcacgggcctattgcgcatggtataacttttccggcggcgaccagcagaaaaaagtcggcgtactttccggcggcgagcgcaaccgcctcaatctggcgatgatgctcaaggaaggcgccaatgtgctgctgttggacgagccgaccaacgaccttgatgtcaacaccctgcgggcgcttgaagacgcgctggacagttttgccggtgtaagcctcgtgataagccacgaccgctggttccttgaccgcattgtcacccacattctggcatttgaagacggcgaagtagtctggtatgacggcaactggtcagaatacgccgaatggcggcgggaaaggcttggcacgacggcggacagcccccaccgctatgtgtaccgcaagctggaacggtaa

SEQ ID NO: 61296 - protein, 415 aa, Unknown
  Obtained from environmental sample
  DOMAIN (1)...(88): ABC transporter
  misc_feature (1)..(415): Xaa is any amino acid
MEALRCPPGDEIVDHLSGGERRRVALCRLLLQKPDILLLDEPTNHLDAETVAWLERHLRDYAGTVIAVTHDRYFLDNVAGWILELDRGEGIPWKGNYSGWLEQKEQRMAQEEKGESDRRKTLQRELEWIRMSPKGRHAKSKARITQYEKLFQDDERERSRGAAQSSKITIPAGPHLGKLVIEAQGLAKSYGDRILFEKLDFTIPPGACVGIIGPNGAGKTTLFKIITGAEKPDSGELRLGDSVKLGYADQMRAVLDDNKSVWEQLSGGQDLIKLGLGQGAREVNSRAYCAWYNFSGGDQQKKVGVLSGGERNRLNLAMMLKEGANVLLLDEPTNDLDVNTLRALEDALDSFAGVSLVISHDRWFLDRIVTHILAFEDGEVVWYDGNWSEYAEWRRERLGTTADSPHRYVYRKLER

SEQ ID NO: 61297 - DNA, 348 bp, Unknown
  Obtained from environmental sample
  misc_feature (1)..(348): n is a, c, g, or t
atgactgttcaagaatatcttgcgcttccctatcacattgttattcaacaccttaacgatgaatccggttcttattattttgccactgtaaaggaatttgacggttgtatgagccacgggaaaaactatgatgaagcgtttaagaacattcaagaagcaatggaagggtggatcgaaacaaaacttgaaaacgagttcccggttcccatgccgatggaagataaccagtatagcggaaaatttgtccttcgtatccccaaaagtctccattcccgtcttgcaatggaagcagaacaggagggagtatcgcttaaccaatacgcactgtaccggttaagcgctcgatga

SEQ ID NO: 61298 - protein, 115 aa, Unknown
  Obtained from environmental sample
  DOMAIN (10)...(60): Uncharacterised protein family (UPF0150)
  misc_feature (1)..(115): Xaa is any amino acid
MTVQEYLALPYHIVIQHLNDESGSYYFATVKEFDGCMSHGKNYDEAFKNIQEAMEGWIETKLENEFPVPMPMEDNQYSGKFVLRIPKSLHSRLAMEAEQEGVSLNQYALYRLSAR

SEQ ID NO: 61299 - DNA, 579 bp, Unknown
  Obtained from environmental sample
  misc_feature (1)..(579): n is a, c, g, or t
gtgtatattgcaaataacgcgtttgaaagcgccaattacaatgctttttccgccgatttttacaacagtcaggggcgcaaggcagcgacatacaccaacaactggagaatagcaggcgcgcccatcagtccggcggtaacaacacaattacagcaggcatctgtaaaaaccgcgcaacccgcgcaagtaacaaacacacagcaacctgtcgtgtcaacgagtatcccgccggctgggaaaagcgttgtacttataaacggcggaaccatacctacgaaggaacatataacggttagcagtttttatatgtggaaatatgaaataacgcagaaagaatataaggaagtgatgaagaataatcccagttataaaaaaggagataaactgccggtggaacaggttagctggtatgaagcaatagagttctgcaataaattaagttctaaggaaggattaactccggcatataccataaacggcgaagatgtaacatggaaccggagcgctaacggataccgactgccgacggaagcagaatgggaatacgcttgccgcgcccgagacaaatacaaaatttaa

SEQ ID NO: 61300 - protein, 192 aa, Unknown
  Obtained from environmental sample
  DOMAIN (78)...(191): Domain of unknown function (DUF323)
  misc_feature (1)..(192): Xaa is any amino acid
MYIANNAFESANYNAFSADFYNSQGRKAATYTNNWRIAGAPISPAVTTQLQQASVKTAQPAQVTNTQQPVVSTSIPPAGKSVVLINGGTIPTKEHITVSSFYMWKYEITQKEYKEVMKNNPSYKKGDKLPVEQVSWYEAIEFCNKLSSKEGLTPAYTINGEDVTWNRSANGYRLPTEAEWEYACRARDKYKI

SEQ ID NO: 61301 - DNA, 300 bp, Unknown
  Obtained from environmental sample
  misc_feature (1)..(300): n is a, c, g, or t
gtggctgtaagccgggttctgttcgttttcacgtggctgtcatttctcttgagccgccgttgccagcggcttccagcaacctacccgaaatgctgcaaaagcgaaacgcgagcagcgttagcatttctgtttggtcttgcatcaagtggggcttgcactgccgcttttgttgccaaaaacgcggtgagcttttacctcgccatttcacccttaccgattcaaagaaccggcggtatattttctgttgcgctatccataccgttaccggtcccggccgttagccggcactttgctctatga

SEQ ID NO: 61302 - protein, 99 aa, Unknown
  Obtained from environmental sample
  misc_feature (1)..(99): Xaa is any amino acid
MAVSRVLFVFTWLSFLLSRRCQRLPATYPKCCKSETRAALAFLFGLASSGACTAAFVAKNAVSFYLAISPLPIQRTGGIFSVALSIPLPVPAVSRHFAL

SEQ ID NO: 61303 - DNA, 630 bp, Unknown
  Obtained from environmental sample
  misc_feature (1)..(630): n is a, c, g, or t
atgcggagcanacttgcattcataaaatcaacattagacaaattatacccaaatccgcctattcctcttgcttatacggatgctttttcatttttaattgcggttgtgctatctgcgcaatgcaaagattccgtttgtcatacggttactccaaaccttatggcaaaagctcccacaccgcaaaaaatggcagagctttctgaacagcaaaattactctcttataaaattgtgcgggtggctaaaaaacaaaagcaggtttttgaaagaactctcaaaaataatagtgaaaaagcacgggggaaagatgcctgattcgtttggagagttggaagcattgccgggcgttgggcacaaaacggcaagtgttgttatgtctcatatttttggagctgctgcctttcccatagatactcacatacacaggcttgcacataggtggggtttaagcgatggtagctctgttttgcaaacagaaaaagatttaaaagccgcttttccaaaaaacgaatggacaaagaggcatttgcaatttatttactacggcagagaatattgccctgcgcgagggcacaatttaaagcgatgtgttatatgtgcagagctttggggcaaagctcgctcaaactaa

SEQ ID NO: 61304 - protein, 209 aa, Unknown
  Obtained from environmental sample
  DOMAIN (98)...(127): Helix-hairpin-helix motif
  misc_feature (1)..(209): Xaa is any amino acid
MRSXLAFIKSTLDKLYPNPPIPLAYTDAFSFLIAVVLSAQCKDSVCHTVTPNLMAKAPTPQKMAELSEQQNYSLIKLCGWLKNKSRFLKELSKIIVKKHGGKMPDSFGELEALPGVGHKTASVVMSHIFGAAAFPIDTHIHRLAHRWGLSDGSSVLQTEKDLKAAFPKNEWTKRHLQFIYYGREYCPARGHNLKRCVICAELWGKARSN

SEQ ID NO: 61305 - DNA, 1338 bp, Unknown
  Obtained from environmental sample
  misc_feature (1)..(1338): n is a, c, g, or t
atgaaatatggtttttttgatcccaaaaacagggaatatgttatcgataagcccgatacgcccgctccctgggcgaattatctaggttctccggcgtacggtgcgattatttccaacaatgcaggcggctacagttttgtaaaaagcggcgcggcgggcagaataatccgttaccgttttaacgagcaggaccggcccggacgatacatctacctgctctactatgaatccggcgattactggtctgcctcgtggccccctgccggcaaaccgcttgaacagtacaagtcgatatgccgtcttggtacgggctacacccaacttgaatcggattataaggatattcactctcaggcgctttactatgtgccccaggacgctgactacgaagtgtggaaaataaaagtgacaaataacggcggtaatgcgcggaaaatttcctgttttggttttgttgagcttacctgcgaaagtttttatgagcaggatcaggtgaaccttcaatatactcagtttattacccgtacatattttaaggaaaaatttatcctgcaaaccatcaacgaaaactgtctgaacgccgtcaatgaaagccgtgtagagacgcgctttttcgcccttgccggggcgaaggtcgcgagctactgcggcgaccgcgcgtctttcctgggcaaataccgcgattacgggaatcctgtctccgtggaaaacggcaaactggacggcactctcaactacaacctgaacccctgcggcgcgttacacacaaattttgatcttgagcccggcgaaacaaaagaatttattttccttttggggcagaaacgcgaggcgcaggtaaaaaagctcgtgtcgcgttacgaggatacaagcctgcctgaaaaagaaattgacaaattaaaaacctggtggcacagccgccttgccaaccttacggtgaacacgcctgatgacaactttaacaacatgatcaatacatggaacgcctaccagtgttttattacatttatctggtcccgcgccgcctcgcttacatactgcggacagcgcaacggttatggctaccgcgacacggtacaggatattcagggcatcatccaccttgatccgcagatggcccttgaaaagatcaggtttatggtttccgcgcangtaaaccacggcggctcccttcccctggttaagtacaaccacaacccggggacacgaagacaagccgggaagacgagtcctaccgtaaaaatacgggacacccgtcttatcgcgcggacgacgcgttgtggctgttccctactgtatggaaatatatcgcggagacgggcaatacctgtctgttag

SEQ ID NO: 61306 - protein, 445 aa, Unknown
  Obtained from environmental sample
  DOMAIN (194)...(280): Glycosyltransferase 36 associated family
  misc_feature (1)..(445): Xaa is any amino acid
MKYGFFDPKNREYVIDKPDTPAPWANYLGSPAYGAIISNNAGGYSFVKSGAAGRIIRYRFNEQDRPGRYIYLLYYESGDYWSASWPPAGKPLEQYKSICRLGTGYTQLESDYKDIHSQALYYVPQDADYEVWKIKVTNNGGNARKISCFGFVELTCESFYEQDQVNLQYTQFITRTYFKEKFILQTINENCLNAVNESRVETRFFALAGAKVASYCGDRASFLGKYRDYGNPVSVENGKLDGTLNYNLNPCGALHTNFDLEPGETKEFIFLLGQKREAQVKKLVSRYEDTSLPEKEIDKLKTWWHSRLANLTVNTPDDNFNNMINTWNAYQCFITFIWSRAASLTYCGQRNGYGYRDTVQDIQGIIHLDPQMALEKIRFMVSAXVNHGGSLPLVKYNHNPGTRRQAGKTSPTVKIRDTRLIARTTRCGCSLLYGNISRRRAIPVC

SEQ ID NO: 61307 - DNA, 987 bp, Unknown
  Obtained from environmental sample
  misc_feature (1)..(987): n is a, c, g, or t
gtggctgttccctactgtatggaaatatatcgcggagacgggcaatacctgtctgttagacgaaaaaatcccctacgcggacaagggcaaggagctttattcaacctcctgaaaaaagcgattggcttttcgcttaacaatttgggaatacacggccttcccgccggtctgcacgcggactggaacgactgcctccgacttggggcaaagggcgtctccgtatttgtcgcgttccagttgtactacgcctttgaaataatgatccgttttgcgaaattcaaaaaagattccgagaccgagcgggaaatgacaaagcaaaaaacccgttttggaaaaattatcgaaaaatactgctggaaagacgaccgctttgtgcgcggcatcaccgaacacgacgttacagtcgggaagaagggcgatccggaagcgaacgtctggcttaacccgcagagctgggcggtaatcagcggttacgcggatgaaaaacgtggcaaacagatacttgatttggtctacaaaaaattgaatacaaaatacggagcacgtcttatgtctcccccgtaccgcaaacacgcttttgacggggcgcttgccctgctcttcaacccgggtacaaaagagaacggcggcatcttcctgcagacacagggttggataatccttgccgaggcccttttgggacacggaaaccgcgccgttgaatattatctggaaagctgcccggcggcgcagaatgaaattgccgacactcgccttatggagccttatgtttactcacagtttactggaagtgtggatagtccctttgaggggcgcagtcccgttcactggcttaaaggcacggcaagcactggtatggtcggcagcgttgaaggcattttgggattaaggccggacatgaaggactgcgcctgtcgcccgcgattccctcttcatggaaatcttttacaatggaaaaatctttccggggcaaaaagcttaacataa

SEQ ID NO: 61308 - protein, 328 aa, Unknown
  Obtained from environmental sample
  misc_feature (1)..(328): Xaa is any amino acid
MAVPYCMEIYRGDGQYLSVRRKNPLRGQGQGALFNLLKKAIGFSLNNLGIHGLPAGLHADWNDCLRLGAKGVSVFVAFQLYYAFEIMIRFAKFKKDSETEREMTKQKTRFGKIIEKYCWKDDRFVRGITEHDVTVGKKGDPEANVWLNPQSWAVISGYADEKRGKQILDLVYKKLNTKYGARLMSPPYRKHAFDGALALLFNPGTKENGGIFLQTQGWIILAEALLGHGNRAVEYYLESCPAAQNEIADTRLMEPYVYSQFTGSVDSPFEGRSPVHWLKGTASTGMVGSVEGILGLRPDMKDCACRPRFPLHGNLLQWKNLSGAKSLT

SEQ ID NO: 61309 - DNA, 750 bp, Unknown
  Obtained from environmental sample
  misc_feature (1)..(750): n is a, c, g, or t
ttgaacttaggcgagcagataaaccttgccgcctccgatattacaagtccgcttttttatgttttcttcagcgatatgaaaatagtcgcgggcggaacggcaaaacgaatggcggaacgtttaagtattgagcacgaagataaagataattttgaaaacaaaggcggttttaaaagactctgcacagttccaataatgatgaattcaaaatacgaagtattaccgactgttgtagttccgatgactcagcgcagaaaaatgactcccgcctttctggaaccgcagaacgaagatgaattaagcctgtacccctttgacggagccggtatctatgacagaaagcgttttattaacataggcggatttgacataacgctaagcaactcattttggcaattaatggattttggttttagggcaagcctttggggcgaggaaataacgctgagccagcatttaaaactttcgtataacggagaattgccgacggagaactttaccatagacgaaaactacagacgtttttacatgaaaaatcttgccccggtatttaaaaacgattacgcttatcttccgttttaccgtttttcttcttatctgtttaaatcatcagacgatcttttttcctcatgggaagaatttaaagaatgtaaaaaatgggtgttaaaaaacaaattcagatggaaatgcgacgcgcgagaagtaacaaaccgctgggattcatcatcggaaaaaacgaggcataattga

SEQ ID NO: 61310 - protein, 249 aa, Unknown
  Obtained from environmental sample
  misc_feature (1)..(249): Xaa is any amino acid
MNLGEQINLAASDITSPLFYVFFSDMKIVAGGTAKRMAERLSIEHEDKDNFENKGGFKRLCTVPIMMNSKYEVLPTVVVPMTQRRKMTPAFLEPQNEDELSLYPFDGAGIYDRKRFINIGGFDITLSNSFWQLMDFGFRASLWGEEITLSQHLKLSYNGELPTENFTIDENYRRFYMKNLAPVFKNDYAYLPFYRFSSYLFKSSDDLFSSWEEFKECKKWVLKNKFRWKCDAREVTNRWDSSSEKTRHN

SEQ ID NO: 61311 - DNA, 672 bp, Unknown
  Obtained from environmental sample
  misc_feature (1)..(672): n is a, c, g, or t
ttgacagcaattgtactgcaggcaagaattgattctacgagactgcccggcaaaagcctgctcttacttgacggacagccgctcatattccgtgtaatggaagccttaaaccaagtccccgccgatatcagaatactcgcctgtcccgaagattcgctttcttctttctctcctattgcaaaggaagcgggttttcaaatactaacaggaccaaaagaggacgttcttgaacgttactgccttgcaatccgcaaatattcaatagacagggtaatcagggcgacaggcgacaacccgtttgtattcgccgacgccgccgcctcgctaaacgatgaagccgtttccctaaaagccgattacgcgggttacacggaacttccctacggcgcgggcgttgaatccgccgccgcttccgcccttctacgcgcctcagagcaggcaaaactcccttccgaacgcgagcatgtctgcccgtatttatacaatcaccctgaactgtttactcttcaccgccccgccgctcccgcccgctggcattatcccgatatccgccttaccgtggacactcaggaagactttgaccgcgcaaaagaactttacggcgcgttaaaaaacgagccaaacaggcacaacggagagacaataataaaaaaatatgcgaaaatgttttaa

SEQ ID NO: 61312 - protein, 223 aa, Unknown
  Obtained from environmental sample
  DOMAIN (3)...(215): Cytidylyltransferase
  misc_feature (1)..(223): Xaa is any amino acid
MTAIVLQARIDSTRLPGKSLLLLDGQPLIFRVMEALNQVPADIRILACPEDSLSSFSPIAKEAGFQILTGPKEDVLERYCLAIRKYSIDRVIRATGDNPFVFADAAASLNDEAVSLKADYAGYTELPYGAGVESAAASALLRASEQAKLPSEREHVCPYLYNHPELFTLHRPAAPARWHYPDIRLTVDTQEDFDRAKELYGALKNEPNRHNGETIIKKYAKMF

SEQ ID NO: 61313 - DNA, 813 bp, Unknown
  Obtained from environmental sample
  misc_feature (1)..(813): n is a, c, g, or t
ttgaatatatttcatggcggggagatttggaatttgaccgggcgccctttaacccgngttgataacattattttttcccaactgtcctatctgccgatggagggaattgttcccggcccccgggaacacggctgggtcactattgaggaactggccgcgaagtacgcggtaatgcagcaggaaaaacctgaaggattaagcaatgatttgacggtcatcgacgcgatttccgttatcaacgcgattggatcggccccccgttataaaaactgcaaactgtttgcttacaccaacaatattgaccttgagcaggaaaaacagtttgccgctttttgcgcgataatcggcaggaggcgtttaaccagaaaaatgcttgtggtttaccggggcacggatatgacccttatcggctggaaagaaagtttaaacatgagcttcattacctctatcccctcgcaaaaagaagccgtatcctaccttgagagaacggccaggagatgccgttatcccctgatcatagcaggacattcaaaaggcgggaacctggcggtttacgcgtccgccttttgcagaaaacgcgtccaaaatcgcataacggtcgtttacagcaatgacgcgccgggctttcacaaacaagtgatagaaagcgagggctacagggcaatctgctcccggattcgttcctttattcctcagtcgtcattagtcgggatgttgtttgagcatggcgagaccccgatggttgttaaagcaccgcaagcggccccatgcagcacagtctctgttcatgggaagttacatataacaacatga

SEQ ID NO: 61314 - protein, 270 aa, Unknown
  Obtained from environmental sample
  misc_feature (1)..(270): Xaa is any amino acid
MNIFHGGEIWNLTGRPLTRVDNIIFSQLSYLPMEGIVPGPREHGWVTIEELAAKYAVMQQEKPEGLSNDLTVIDAISVINAIGSAPRYKNCKLFAYTNNIDLEQEKQFAAFCAIIGRRRLTRKMLVVYRGTDMTLIGWKESLNMSFITSIPSQKEAVSYLERTARRCRYPLIIAGHSKGGNLAVYASAFCRKRVQNRITVVYSNDAPGFHKQVIESEGYRAICSRIRSFIPQSSLVGMLFEHGETPMVVKAPQAAPCSTVSVHGKLHITT

SEQ ID NO: 61315 - DNA, 360 bp, Unknown
  Obtained from environmental sample
  misc_feature (1)..(360): n is a, c, g, or t
atgcagcacagtctctgttcatgggaagttacatataacaacatgatcgatgccggggaactcacggagcagagccgctttattgacaatattatctgcgaatggatcaatcagattgacgagagccagcggcagcagtttattcaggctatatattcgatccttgtttcctgcgacgcggaatccgtggccgatcttaccgatgactggaaaaacaccgccggcggtataatcaatgcccttagaaatatggacaagtccacaaaaaaacttttggggaaaataataggggatctctttaagacagcgaaggaaaatctcggaaaacgcggcaaaaataattcagggggtagggagtag

SEQ ID NO: 61316 - protein, 119 aa, Unknown
  Obtained from environmental sample
  misc_feature (1)..(119): Xaa is any amino acid
MQHSLCSWEVTYNNMIDAGELTEQSRFIDNIICEWINQIDESQRQQFIQAIYSILVSCDAESVADLTDDWKNTAGGIINALRNMDKSTKKLLGKIIGDLFKTAKENLGKRGKNNSGGRE

SEQ ID NO: 61317 - DNA, 1038 bp, Unknown
  Obtained from environmental sample
  misc_feature (1)..(1038): n is a, c, g, or t
ttgcgccctgcaacggtctgctgtttacattacgcgaataccccgtcgtctttggcggctcgctgttggcgcggatcatggaggactccaaaaatggttaaagacattatatattcgatcaagtcgccctaccggcagagcatggatatcatcgggtacaccttcggctcgggcgagcgttccagttgcgtgataggcgcgttgcgcggcaatgagattcagcaaatggcgatctgcgcccagttagtcgacacgctcaagcgcctggaggaaaacggctgcgtcctcttcggcaaaagcataatgatcatcccctgcgcgaaccactattccatgaatatcggcaaacgcttctggacgatggacaacaccgacatcaaccgtatgttccccggatacgatcagggcgagacaacgcagcgtatcgccgacgggctgttcaagacggtcaaggattacgtctacggcatacagatggcaagcttctaccgcgatggcgagtttctgccgcacgtcaaggtgatggacaccgattgcagaaaaagcgaaacctacgattcgctgtcggatttcggcctgccctacggcttgatcaggataccgcagccctacgacaccgcgaccctcaactacaactggcagatttggggctgccaggcctactcgctgttctctacntacaccgagcatatagggaagcagtccacacaaaccgccgtgaacgcggttctgcgtttccttatcgcaaaggggatactcaaatgggcgctgcacggaggcatgcacacccgcatactgaacgaggaaatgataagaaacgtccagacgagccgcgccgggatactgaaaaaacacgtcgcagtgggcgacgaggtcgcagagggtgatctgctctgcgagataatccatcctttagaggggaacacgataggccggattgaatcgccgatggacgggacggttttcttcgcctacaacaaacagctggtgatggagcacaccgacgtgtttaacatcgtgccgttttcgaatgtgtag

SEQ ID NO: 61318 - protein, 345 aa, Unknown
  Obtained from environmental sample
  DOMAIN (58)...(342): Succinylglutamate desuccinylase / Aspartoacylase family
  misc_feature (1)..(345): Xaa is any amino acid
MRPATVCCLHYANTPSSLAARCWRGSWRTPKMVKDIIYSIKSPYRQSMDIIGYTFGSGERSSCVIGALRGNEIQQMAICAQLVDTLKRLEENGCVLFGKSIMIIPCANHYSMNIGKRFWTMDNTDINRMFPGYDQGETTQRIADGLFKTVKDYVYGIQMASFYRDGEFLPHVKVMDTDCRKSETYDSLSDFGLPYGLIRIPQPYDTATLNYNWQIWGCQAYSLFSTYTEHIGKQSTQTAVNAVLRFLIAKGILKWALHGGMHTRILNEEMIRNVQTSRAGILKKHVAVGDEVAEGDLLCEIIHPLEGNTIGRIESPMDGTVFFAYNKQLVMEHTDVFNIVPFSNV

SEQ ID NO: 61319 - DNA, 951 bp, Unknown
  Obtained from environmental sample
  misc_feature (1)..(951): n is a, c, g, or t
atgggggttttaatgataaaacacgtgtctgtggcggcgctgcctgtcgcggaggacttcattatacagaaaaaccgcatcgagaacaacgcggcggcgggcagcaagcgcgtctgcattgttacgggaacccacggcgacgaactggaggggcagtacgtctgcgcgcggctggcaaagattctgaacgacgggaggcagaagctgacgggcatcgtggacatctaccccgcggtaaaccccctggggatcgattctgtcacgcggggttttcctttgttcgatctggacatgaaccgcatattccccggctcttcttcggggtcgctcgccgaggtcgcggcaagcgacgtaatccgcgatattgagggcgcggatatgtgcatagacatacactccagcaacattttcctgcgcgagataccgcaggtgcgcgtgagcgaacagactgcggaagaactgctgccatacgcgatgatggtcaacgccgatctcgtgtggatacacgcctcggcgaccgttctggaatcgacgctggcgcactcgctcaacatgcgcggcgtgaagacgctggtcgttgagatgggcgtcggtatgcgcataacggaaagttattgcgtacagcttgtggacggcgtactgaacctgctgtgcgaactgggaatgtggaacgggaacagaggaaggacaaggcagccgcttgtctcaaaggatcacagcgtcggctttttgaattcggacgcgggaggaatatttatcccgtgtgccgagcatggcagccatgtaaactcaggcgatctcatcggcagcgtcatagacccgcttacgggaaccgtcgtcgaggaaacgcttgcgccctgcaacggtctgctgtttacattacgcgaataccccgtcgtctttggcggctcgctgttggcgcggatcatggaggactccaaaaatggttaa

SEQ ID NO: 61320 - protein, 316 aa, Unknown
  Obtained from environmental sample
  DOMAIN (34)...(312): Succinylglutamate desuccinylase / Aspartoacylase family
  misc_feature (1)..(316): Xaa is any amino acid
MGVLMIKHVSVAALPVAEDFIIQKNRIENNAAAGSKRVCIVTGTHGDELEGQYVCARLAKILNDGRQKLTGIVDIYPAVNPLGIDSVTRGFPLFDLDMNRIFPGSSSGSLAEVAASDVIRDIEGADMCIDIHSSNIFLREIPQVRVSEQTAEELLPYAMMVNADLVWIHASATVLESTLAHSLNMRGVKTLVVEMGVGMRITESYCVQLVDGVLNLLCELGMWNGNRGRTRQPLVSKDHSVGFLNSDAGGIFIPCAEHGSHVNSGDLIGSVIDPLTGTVVEETLAPCNGLLFTLREYPVVFGGSLLARIMEDSKNG

SEQ ID NO: 61321 - DNA, 963 bp, Unknown
  Obtained from environmental sample
  misc_feature (1)..(963): n is a, c, g, or t
atgattcccagacgcggaaaaaaaataatgcccgatttttcccatacgatagatgaacattttacccgccccgtcagacttgaccgctatgtgtcggaaactttacgccttctctcccgttcgcaaatcaaggcaaggtctttaaccgcaaaagtaaacggaaaggacgtaaaaaattctcgccttgtaaaaaagggagacattattgaattgcgctggcaggattccccgcccgtaaatattatacctcaggacattccccttgaaataatttatgaagatgaaaattgtattgtcgtaaacaaagcgcagggaatggtagtccacccgggagcgggcaacaggcaggacactcttgcaaatgcgctgtactttagaagacttaacaggggcggcaaaataagcgatgcggaaacagacaatgtgcgtcccggcattgttcatcgtcttgataaagacacgtcgggaataattatcgccgcttacaacgaagaagcccacgcttttcttgcgggacagtttaaggcgcgcaagacgcgaaaaacttatacggcgattgttcagggcgcgccgaaggaaaccaacggacgcatagaaacttttatcgcaagagacccgaaggatcgcaaaaagtttacggtctccgccaacggaagaaacgccgttacttattacaaagtggttaattcatggcgcagtcattcgctcctgcttctgcgtccgcgcaccgggcgcacccatcaacttagagtccatctgcgatacataggctgtccgatactcggagacccaatctacggcggcgcggataaattattccccgacgcaagccttatgctccactccaaaagtcttgcgattattttgccgggagaaacagaggagcgtgttttttcatcgcctatccctcagcggtttacggcggtaattaaaaaattggacaggataaacgcaaatggatag

SEQ ID NO: 61322 - protein, 320 aa, Unknown
  Obtained from environmental sample
  DOMAIN (96)...(255): RNA pseudouridylate synthase
  misc_feature (1)..(320): Xaa is any amino acid
MIPRRGKKIMPDFSHTIDEHFTRPVRLDRYVSETLRLLSRSQIKARSLTAKVNGKDVKNSRLVKKGDIIELRWQDSPPVNIIPQDIPLEIIYEDENCIVVNKAQGMVVHPGAGNRQDTLANALYFRRLNRGGKISDAETDNVRPGIVHRLDKDTSGIIIAAYNEEAHAFLAGQFKARKTRKTYTAIVQGAPKETNGRIETFIARDPKDRKKFTVSANGRNAVTYYKVVNSWRSHSLLLLRPRTGRTHQLRVHLRYIGCPILGDPIYGGADKLFPDASLMLHSKSLAIILPGETEERVFSSPIPQRFTAVIKKLDRINANG

SEQ ID NO: 61323 - DNA, 1239 bp, Unknown
  Obtained from environmental sample
  misc_feature (1)..(1239): n is a, c, g, or t
ttgatggccgaggggccggacaaaatagaaacgccccagcagttcgcgtcctcgctggaaacggcaaaaaaactcgggctgaacgccgtggtcatcataggcggcgacgattccaatacaaacgccgcgctgcttgcggaatatttccttaaaaacgggtcggacatacaggtaataggctgccccaaaaccatagacggcgatcttaaaaatgaatatatcgaaacttccttcggctttgacaccgcctgcaagacctacagcgagcttatcggcaacctgatgcgcgacgcgaacagctcgaagaaatactggcatttcatcaagctgatgggccgcgccgcgagccacatcgcccttgaatgcgccctgcagacgcagcctaacatctgccttatctccgaagaaatagaaaaacaccacatgtcgcttgaggcggttgtcaattcaatctgctcctccgtcgtcaagagggcggaaaacggcgacaactacgggatagttcttatccccgagggccttgtggaatttatcccggaaataaaaagcctcatcgacgagctcaacaataccattgcgcataacgaagcggaattttcaaaactcgacgcgtacgccgaacagctcgcctggctgtacaagcatatctccgcggcttcatataatgtcctccattccctgccccatgaaatcggcagggaatttttgatggaccgcgatccgcacgggaacgtgcaggtttcactgatcgaaacggaaaaactcctcatcggcatggtgaagaaaaaactccacgagctgaagaaaacgggaacctataaaggaaaattcaccgcccttgcccatttcttcggttatgagggaaggtgcgccttcccctccaactttgacgccgattactgttattcgctgggctacagcgcctttgtgttaatcgccgaaggctttaccggctatctttccagcgtgcgcaaccttaccgccaaagcttccgaatggattgccggcggcgttcccattaccatgatgatgaacattgagcggcgccacggcgaggaaaaaccggtcatcaagaaagcccttgtcgaactggacagcaagcccttcaaggccttcaaagcaatacgggacgaatgggcagtaaaaaccagctttatcgtgccaggctccatacagtatttcggcccgcccgaagtctgcgacgaaccgacgataacgttgaaactggagaagaattag

SEQ ID NO: 61324 - protein, 412 aa, Unknown
  Obtained from environmental sample
  DOMAIN (1)...(211): Phosphofructokinase
  misc_feature (1)..(412): Xaa is any amino acid
MMAEGPDKIETPQQFASSLETAKKLGLNAVVIIGGDDSNTNAALLAEYFLKNGSDIQVIGCPKTIDGDLKNEYIETSFGFDTACKTYSELIGNLMRDANSSKKYWHFIKLMGRAASHIALECALQTQPNICLISEEIEKHHMSLEAVVNSICSSVVKRAENGDNYGIVLIPEGLVEFIPEIKSLIDELNNTIAHNEAEFSKLDAYAEQLAWLYKHISAASYNVLHSLPHEIGREFLMDRDPHGNVQVSLIETEKLLIGMVKKKLHELKKTGTYKGKFTALAHFFGYEGRCAFPSNFDADYCYSLGYSAFVLIAEGFTGYLSSVRNLTAKASEWIAGGVPITMMMNIERRHGEEKPVIKKALVELDSKPFKAFKAIRDEWAVKTSFIVPGSIQYFGPPEVCDEPTITLKLEKN

SEQ ID NO: 61325 - DNA, 2082 bp, Unknown
  Obtained from environmental sample
  misc_feature (1)..(2082): n is a, c, g, or t
atgccgcaaggagcgttcatgaaaaaatatattctttgtttttcaatcttttgtctctgtctgccggtaattttcgcgcaaggaatacaagatgcaggaatgggatcgcagactttgccggtaaccaaaatcgccatttattcttcggggctcgcttattttgaacatacggggacattgaatggcgcggcttctataaggctgccttttaaggaaaacgcggtaaatgacgcgctcatgtcccttgtgctgaatgattccgcttcggcaaacccctctgtttcataccaatcttctaatacattgttccaaactctgcggtctcttaagatcgaccttgtcgacaatatggatattgcgaatacgttaagcttaatgcgcggggcggcagttgaaatcaccgtcccctcacctgtcagcgggaggataatgggcgtcgattaccgtcagcagagaacccccaccggcaatgaaactttcgaatcttttctttccttgtacaccgagcaggggatcagaaggtttagttttgccgatattatcaccattaagttcaaggacccggcgatagaagcggacttaaaccgggcgcttgatttgattgccgcttcgagaaataacgactcgcgggatttgacaataaacctgcccggaacaggcagccgcaaagtttccttaagttacgttattccggctccggtgtggaaagcttcatacaggctcgatctcggcggcgtaaacgcaaagccccgcttgcagggctgggctattgttgacaatgacggcgacacggactgggacaaggtcgagctttcattggtagcgggccgacccgcctcctttatacaaaacttgtatcccccgtattatgttttccggcccgtgcttccccttgccatcgcagggtcagccggcgccatgacccacgaccagggctacgccccggttccggctccggctcccgctgccccgcgctttgaaagcggcggttcggcgcggacgtcaatggctgaaaaggtaatgatggatcaggttggggaagcggaatacataagggagcgtccagccgcaaatgttattgagacagccataagcggcgcttcggcttccgcggccggcgagcagtttgaatttaccataaaaaccccggtaagcatcgcgcggcggatgagcgccatgctacccctgacggacgtatctgtcgaagtgcgcaagctgcttatattttccgcagccaactggatgaacggaaataaaaacccgcggcttggcgcggaactgaccaacaccagcggaatcaaacttcccgccggacccataaccgtatatgacggagggacttactccggggacgcccttatcgaattctggaacgagggcgagaaacgacttatatcctatggcgaggacctttcagttataggcgccgttatgaacaacagttccaatacattttcttcagtgactatatcagacggcgtaatgaccattacccgcagccaggagtacctgaagacctacactttcaaaaacaacgccgcgcaggaaaaacagctcctcattgaacatcccaaaagccagggatattcccttaattcccccaaagccgatgaggagaccccgaccctataccgcttcaccgtagccctgcccgccgggggcgaacttgccgtccctgtccgcgaatcccgcccaatcatagaacgcgtaaccctgttgcagctcagacntgaggcgtttctgtcatacacggccagccaggaacttcccgcaaacgtgaaggatagtctgcagcaggcggtgaacctgcgttcttcgcttaacagtgcgcagtcagccgtcaccgaagcggaaaggcagagacaggggtttgtttcagagcaggatcgaatcaggaaaaaccttgaagccgcaggcagtacaacccagcaggggcaggaatacctgaaaaggcttttatcgcttgacgacagcattgacaaacttgacgcggaactgcaaaaactgagggaaaacgcaagaaccgcccagaaaacgtacgaagactaccttggcaatttaagactagggatcggggactag

SEQ ID NO: 61326 - protein, 693 aa, Unknown
  Obtained from environmental sample
  SIGNAL (1)...(26)
  misc_feature (1)..(693): Xaa is any amino acid
MPQGAFMKKYILCFSIFCLCLPVIFAQGIQDAGMGSQTLPVTKIAIYSSGLAYFEHTGTLNGAASIRLPFKENAVNDALMSLVLNDSASANPSVSYQSSNTLFQTLRSLKIDLVDNMDIANTLSLMRGAAVEITVPSPVSGRIMGVDYRQQRTPTGNETFESFLSLYTEQGIRRFSFADIITIKFKDPAIEADLNRALDLIAASRNNDSRDLTINLPGTGSRKVSLSYVIPAPVWKASYRLDLGGVNAKPRLQGWAIVDNDGDTDWDKVELSLVAGRPASFIQNLYPPYYVFRPVLPLAIAGSAGAMTHDQGYAPVPAPAPAAPRFESGGSARTSMAEKVMMDQVGEAEYIRERPAANVIETAISGASASAAGEQFEFTIKTPVSIARRMSAMLPLTDVSVEVRKLLIFSAANWMNGNKNPRLGAELTNTSGIKLPAGPITVYDGGTYSGDALIEFWNEGEKRLISYGEDLSVIGAVMNNSSNTFSSVTISDGVMTITRSQEYLKTYTFKNNAAQEKQLLIEHPKSQGYSLNSPKADEETPTLYRFTVALPAGGELAVPVRESRPIIERVTLLQLRXEAFLSYTASQELPANVKDSLQQAVNLRSSLNSAQSAVTEAERQRQGFVSEQDRIRKNLEAAGSTTQQGQEYLKRLLSLDDSIDKLDAELQKLRENARTAQKTYEDYLGNLRLGIGD

SEQ ID NO: 61327 - DNA, 1014 bp, Unknown
  Obtained from environmental sample
  misc_feature (1)..(1014): n is a, c, g, or t
gtggtatcagatcggccgagcgccgctcttgccatgtttatttatgtgttgggacttatctgggcgcttcctttattaattcctttgcttaatcttgttgattttatttttcccggagaccccaaggcggcaggtcccggcaacgctgtgatacctgttcatcttgcggggcttcatactttatttaacataatcaatacgattatcttcctgccctttgtaaaacaatacgcaaaactgatttccataatgattcccgaaaaacatgaagaaaaagacgaccattacaaatttgcgtatatatccgcgcgtaacaccaatactcccgaactcaatatccttagagcggaaaaagaaatcagcgacatggcgggaattgtctcttttatgttttcacgtttttgcacggtattgcgcgaattgcgcgaaagcgaaagcgagagcgaaaacaatgacaaagagaataccgctgagttatgcgcggaactgttaaagaaagaagagtatatcgatgaaatgcgcgaggtactgagcagtttcttaattgaatgttcccgcgtaaaactaaacccaaagaccgaagcccgtattaactacctaatgcaagttattgtttcgcttgaatcaatgagcgatgaatgttacagcatcagccgtttgctggaaaaaagcgtcgacaaggattgcgtttttaaagataaggaaatgaaccagcttattccttatgtcgggctggttgaggaatttttaagcttactcgaagatcaactcggacgtaatccttcgtcggaacgaaaattacgcgcagcggaactggaagctcaaatcgacaaagaccgcaaaaaattgcaaaaacttgggcgtaagcgtatcgaagccggcggcaatgtaaaaaccgaattgctttttatagatttagtccgcagaatagaaagacttggggattactgttttgagatttcagaagaaaatacgctcaaaaaattgattaacaccattattaataaaaagtga

SEQ ID NO: 61328 - protein, 337 aa, Unknown
  Obtained from environmental sample
  misc_feature (1)..(337): Xaa is any amino acid
MVSDRPSAALAMFIYVLGLIWALPLLIPLLNLVDFIFPGDPKAAGPGNAVIPVHLAGLHTLFNIINTIIFLPFVKQYAKLISIMIPEKHEEKDDHYKFAYISARNTNTPELNILRAEKEISDMAGIVSFMFSRFCTVLRELRESESESENNDKENTAELCAELLKKEEYIDEMREVLSSFLIECSRVKLNPKTEARINYLMQVIVSLESMSDECYSISRLLEKSVDKDCVFKDKEMNQLIPYVGLVEEFLSLLEDQLGRNPSSERKLRAAELEAQIDKDRKKLQKLGRKRIEAGGNVKTELLFIDLVRRIERLGDYCFEISEENTLKKLINTIINKK

SEQ ID NO: 61329 - DNA, 2094 bp, Unknown
  Obtained from environmental sample
  misc_feature (1)..(2094): n is a, c, g, or t
ttggccgagcggcacgagntctttcccgccgttccgggtcggtttttcgttcactccttcgggattctttccctcctgattccggcgtatttcttttatgccgcggttgttttgtccgacaaaaaatggcgtcccgataggatattccttttgaatgggtttttaatcccgttcttaactctttccatcggctttgtttttatccgcgattttgatgtccgttcccagcaatcctcgtttttgtatactctgggaaaaacaggtttcagcctttttatcattaccgttacagtgctggaaattctgcttttgcaggtggtaagaaatattctcttctttaaagacacaagaataatgcgtaaaaaaataatgcttccgccgccgcttgaagtaagtgagaataaaacggaagatttaccctcatcggtcgtccatgaagaggatcgggaaacccaaacaacatctcagacggaaaattcagaaacagataacgaagaagttgacgagcttgatgaagttgatgtcggaatggatattgaaaccgaagaggaagacaccgaggaagataccgatgatattgacgcggtaacccgcgcgttagaagaagcggaaatcgccgccgccgctcatgcggaattgatgcgcaataaaggcaaacagttaaataaccttcgcaataaaaaatacatggttcccgtggatattcttaacgaatatcccgacggcgaatattgggtaattgatcaagctacaagagatgcggctatcgctttaaaagaaactcttaacgaatttaatattcaagctgaagttacgggtataagaaaaggtccggttattacaatgtttgagattcttcccgctcccggcgttaaactttcaaaaatagtcggcttgcaggacaatatcgccctgcgtcttgccgcttcgtccgtgcgtattgtcgccccgattcccggaaaacacgccgtaggcatcgaggttccaaacgctaagcgtaacatcgtctcttttaaagaaattatagaaaacgaacttcaacgcgccgagaaaaaaatggagattcccgttgtcatggggaaagacatcacgggagaggcgcagacggttgaccttgttcaaatgccgcacctgctaatcgccggcgctaccggctccggaaaatcagtctgtgtaaacgcgataatactttcgatactgtatcagcttcatccggcggagtgcagacttatgcttattgaccctaagattgtagaattgaagttatacaacgacattccccatttgttgacgccggtaattaccgattccaagaaagcgtttcaagctcttcaatactgcatttatgaaatggagagacgctatgcctgccttgactcgatgggagtacgcgacatccgcagttacaataaacgtgtaaaagaaaaaaatatcgctcaggagcacatgccctatatcgtcgtggtaattgacgaatacgccgatttaatgacgactaccgggaaggaacttgagtccacggtagcaaggcttgccgcaatgagccgcgccgttgggattcatcttgtgcttgcgacccagcgtccttcaattgacgtaattacggggcttatcaaggcgaacattccaagccgtatcgcgtttatggtggcaagtaaaactgacagcagaattataatcgacatgattggggctgaaaaacttttaggtaagggtgatatgctttattcgggcgttgtcgatccttttccaatccgaatgcagggcgcgtttatttccgaagaagaagtggaagctgttgttgaatatgtaaaatcattcggggagccggaatacatagacgatgaaattttttatgaagaagaggaagaccagggcgcttccctgttttctgacggtgatgatccgttatatgaaaaagcgctggaaatagtttgtcagcaggggaaggcaagcgccagctacattcaacgcagactgaagatcgggtttaaccgcgccgcaagaattgttgatgagatggaacataatggggtagttggtccggcgcacggaagcaagccaagagaattggtaagggcgatgggggcttga

SEQ ID NO: 61330 - protein, 697 aa, Unknown
  Obtained from environmental sample
  DOMAIN (337)...(531): FtsK/SpoIIIE family
  misc_feature (1)..(697): Xaa is any amino acid
MAERHEXFPAVPGRFFVHSFGILSLLIPAYFFYAAVVLSDKKWRPDRIFLLNGFLIPFLTLSIGFVFIRDFDVRSQQSSFLYTLGKTGFSLFIITVTVLEILLLQVVRNILFFKDTRIMRKKIMLPPPLEVSENKTEDLPSSVVHEEDRETQTTSQTENSETDNEEVDELDEVDVGMDIETEEEDTEEDTDDIDAVTRALEEAEIAAAAHAELMRNKGKQLNNLRNKKYMVPVDILNEYPDGEYWVIDQATRDAAIALKETLNEFNIQAEVTGIRKGPVITMFEILPAPGVKLSKIVGLQDNIALRLAASSVRIVAPIPGKHAVGIEVPNAKRNIVSFKEIIENELQRAEKKMEIPVVMGKDITGEAQTVDLVQMPHLLIAGATGSGKSVCVNAIILSILYQLHPAECRLMLIDPKIVELKLYNDIPHLLTPVITDSKKAFQALQYCIYEMERRYACLDSMGVRDIRSYNKRVKEKNIAQEHMPYIVVVIDEYADLMTTTGKELESTVARLAAMSRAVGIHLVLATQRPSIDVITGLIKANIPSRIAFMVASKTDSRIIIDMIGAEKLLGKGDMLYSGVVDPFPIRMQGAFISEEEVEAVVEYVKSFGEPEYIDDEIFYEEEEDQGASLFSDGDDPLYEKALEIVCQQGKASASYIQRRLKIGFNRAARIVDEMEHNGVVGPAHGSKPRELVRAMGA

SEQ ID NO: 61331 - DNA, 1446 bp, Unknown
  Obtained from environmental sample
  misc_feature (1)..(1446): n is a, c, g, or t
ttgaggatgtggaagtgggtaactactatgattacagctaacggttacggcctgcctgatccaaaagaacttgaacagtgggcgttgccgtattttcccgaattccaggaaaaaaagctcgataatgacaaagacgccaatgccgcgtattctcctgttgtcgtgccgcatactagagcggcgaccgttacgccttcagagggaggttataaaagctctcctttgggggcaggcggttttgacgtaaaccgcataaggcaggattttcccatcctaaacgagaaggtctctggcggcaagcctcttgtctggtttgacaacggcgcgacaacgcagaaacctaacgcggtaatagaccgtatttcgtatttttaccggcacgagaactcaaacgtccatcgcggcgcgcatgaattggcggcgcgttccaccgacgcttacgaagcggcgcgggagactatcgccagatttttgggcgctccgtcgaaagacaatattgtgtttgtgcgcggaacaacggaagggattaaccttgcggcgcaggcttatgtgaaaccgctgctttcggcaggggatgaaatcatactgaccattcttgaacatcacgccaacattgtcccatggcagatgatagcgcaggagacgggcgcgctgataaaagtcgctcccgttgacgatacaggccagattattctgcccgaatacgcgcggcttttctgccgccgcacaaaatttgtttccgtaacgcacgtttcaaacgctcttgggacaattactccggttagggagatgattcaaatcgcgcacgcaaacggagtgcgaatccttgtagacggggcgcagtctgtcgcgcatacgccgcttaacgtaaccgagttggacgcggatttctttgtcttctccggccataaaattttcggccccacgggcataggcgcactgtacggaaaatcggacgctctggaagaggcaaagccgtatcagggcggcggaaacatgataaaggacgttacctttgaacgcactgtatacaacgacgctccggtaaaatttgaagcggggacgggcaatattgccgacgccgtcggtcttggcgccgcgctggactatgtttccggcataggaatagcgaacataagcgcctacgaacacgcgctgttaaattacgcgacaggcgagcttaaaaaaataaacggacttcatcttataggtaccgccgccgaaaaagcaagcgtcctgtccttcgttctcgacaatgcaagcgtagaacaagtaggaaaacacctggcaagcaaaggaatcgccgtccgcgccggccaccactgcgcccagccaatattgcgccgcttcggactggaagccacagtacgcccgacaatagcgttttacaatacagcggaagaaattgataagttggttatcgcgataaaggaaattgccatataa

SEQ ID NO: 61332 - protein, 481 aa, Unknown
  Obtained from environmental sample
  DOMAIN (138)...(395): Beta-eliminating lyase
  misc_feature (1)..(481): Xaa is any amino acid
MRMWKWVTTMITANGYGLPDPKELEQWALPYFPEFQEKKLDNDKDANAAYSPVVVPHTRAATVTPSEGGYKSSPLGAGGFDVNRIRQDFPILNEKVSGGKPLVWFDNGATTQKPNAVIDRISYFYRHENSNVHRGAHELAARSTDAYEAARETIARFLGAPSKDNIVFVRGTTEGINLAAQAYVKPLLSAGDEIILTILEHHANIVPWQMIAQETGALIKVAPVDDTGQIILPEYARLFCRRTKFVSVTHVSNALGTITPVREMIQIAHANGVRILVDGAQSVAHTPLNVTELDADFFVFSGHKIFGPTGIGALYGKSDALEEAKPYQGGGNMIKDVTFERTVYNDAPVKFEAGTGNIADAVGLGAALDYVSGIGIANISAYEHALLNYATGELKKINGLHLIGTAAEKASVLSFVLDNASVEQVGKHLASKGIAVRAGHHCAQPILRRFGLEATVRPTIAFYNTAEEIDKLVIAIKEIAI

SEQ ID NO: 61333 - DNA, 600 bp, Unknown
  Obtained from environmental sample
  misc_feature (1)..(600): n is a, c, g, or t
ttgactaaaatagcggtactggtaagcggcggcggcacaaaccttcaagcgttaattgacgcgtggaaaagcggcagtcttggagaaggggagttatcccttgttatttcgtcaaaatccggcgtttacgctcttgaacgcgcgcaaaaagcgggaataaaatccgtaacagtcgaaagaaaaaaatgcgcgactgccgaagactttgataccgctctctgcgccgcgttatctgaagaaaaaatagatcttatagttctcgcgggatttttatcagtcattggtacgcaagttcttaaaaaatatgaaaacaaaataatcaacgttcaccccgcgctaatcccatcattttgcggcaagggattttacggtctgcgcgttcatgaagcagtccttgaaaaaggtgtaaaaattacaggcgcgacagtccaccttgtaaacgaagaagtagacggcggaaaaataattctgcaaaaagcggtggacgttctacctgacgacacgcctgagtctctgcaacagagagtaatgcgcgaagcggagtgggtaattcttcctaaggcggtagaaatgttttgcaaaggagagataaaaatttga

SEQ ID NO: 61334 - protein, 199 aa, Unknown
  Obtained from environmental sample
  DOMAIN (2)...(189): Formyl transferase
  misc_feature (1)..(199): Xaa is any amino acid
MTKIAVLVSGGGTNLQALIDAWKSGSLGEGELSLVISSKSGVYALERAQKAGIKSVTVERKKCATAEDFDTALCAALSEEKIDLIVLAGFLSVIGTQVLKKYENKIINVHPALIPSFCGKGFYGLRVHEAVLEKGVKITGATVHLVNEEVDGGKIILQKAVDVLPDDTPESLQQRVMREAEWVILPKAVEMFCKGEIKI

SEQ ID NO: 61335 - DNA, 666 bp, Unknown
  Obtained from environmental sample
  misc_feature (1)..(666): n is a, c, g, or t
gtgtatgatctcttaaaagaaaaaaaagaacataatattgtgcttctttctttatgggacctattacgcgcaagaagaagcggcgagtaccgttcatacattaaaagcgccgctttaattattcctatttcaaaaagtatcatcagcggaataaaattccttactgggaaaaaggcatatcgttatatgccattcgattttattatcagcatacttaccgctctggaaaatcgggaattatcctgttacttattaggcggcaaaacaaaaattcttattaaaacagaacagaatatcaggcagacattcccccgtcttcgcattgtagggcgcttccccggttactttaaacggtacgaagaagcgaccatcatcaaagccataaaaaaatcgtcgccatcgctgttattggcgggtaaaggcatacgcggcgaagaacgctggattgccagaaacaatctctctcttggggacggcatgaggctatggtgcagcgacatttttgaagtattcgctgaaagaaaaaaatatccttcacgcggcgtttttaacgcggggcttgaatggataggctattgttttcacaacccatttaaattttttaggattttcccctacatagggtataagtttacattactgtattacaaactttttgttaaatag

SEQ ID NO: 61336 - protein, 221 aa, Unknown
  Obtained from environmental sample
  DOMAIN (32)...(203): Glycosyl transferase WecB/TagA/CpsF family
  misc_feature (1)..(221): Xaa is any amino acid
MYDLLKEKKEHNIVLLSLWDLLRARRSGEYRSYIKSAALIIPISKSIISGIKFLTGKKAYRYMPFDFIISILTALENRELSCYLLGGKTKILIKTEQNIRQTFPRLRIVGRFPGYFKRYEEATIIKAIKKSSPSLLLAGKGIRGEERWIARNNLSLGDGMRLWCSDIFEVFAERKKYPSRGVFNAGLEWIGYCFHNPFKFFRIFPYIGYKFTLLYYKLFVK

SEQ ID NO: 61337 - DNA, 645 bp, Unknown
  Obtained from environmental sample
  misc_feature (1)..(645): n is a, c, g, or t
atggatacgcttcctttccgccaccccggaaatttttcgtccgaaacaatacgggttatggccgaaaatcccgtcttctgccgccatctgcacctgcccgtccagcatggctcaaactcagtcttaaaagctatgaaccggggctatacaagggatagttatcttgagcttgtcggggaaatccgcgccgcaatgccggggattaccctgtccacggacattttggcgggtttcccgggcgaaacagaggaagatttggaacagactctccaattaatggaagaagttaagtttctttacgcttatatgtaccattttaacccaagggaggggacaaaggcctttgatttgccaggcagaataagcgatgaggtaaaaagagaaaggctttcccgggtaatcgcccttcaaaaaaaacatacaaccggcctattaaaaagcaggataggcagtaaagaaacggtactaatagagggaatttcccgaaaaaatgccgatgaattaataacaaggacagaaaaagacgaaatggcggtggttccggggcctgcttctatgataggatcttttgcggaagtcaccctttctgccctgaagggaaatacatttatttcgaaggagttgaatttatgcccggtcgattaa

SEQ ID NO: 61338 - protein, 214 aa, Unknown
  Obtained from environmental sample
  DOMAIN (146)...(209): TRAM domain
  misc_feature (1)..(214): Xaa is any amino acid
MDTLPFRHPGNFSSETIRVMAENPVFCRHLHLPVQHGSNSVLKAMNRGYTRDSYLELVGEIRAAMPGITLSTDILAGFPGETEEDLEQTLQLMEEVKFLYAYMYHFNPREGTKAFDLPGRISDEVKRERLSRVIALQKKHTTGLLKSRIGSKETVLIEGISRKNADELITRTEKDEMAVVPGPASMIGSFAEVTLSALKGNTFISKELNLCPVD

SEQ ID NO: 61339 - DNA, 360 bp, Unknown
  Obtained from environmental sample
  misc_feature (1)..(360): n is a, c, g, or t
atgcccggtcgattaatagtttttattataattcttgctataattcttttttttataggtttaaatcttgataataaatgcgatataaactttggttttaccaaattagaaaacacccctgtattctttcctatctttgtctcgtttgctttagggcttttatgttctttgcccttcattataaaaagtaaaatgggaaaaaagcgaaatgatacggtaaaagacctaaaaccggccaaagataatttttccggctctgacgacgttccttatattgttccggaacctgatgaaaaattaaaacaggatgccatgtcggcaagagaaaaattttttgccaggaagttcggaaaaaaataa

SEQ ID NO: 61340 - protein, 119 aa, Unknown
  Obtained from environmental sample
  misc_feature (1)..(119): Xaa is any amino acid
MPGRLIVFIIILAIILFFIGLNLDNKCDINFGFTKLENTPVFFPIFVSFALGLLCSLPFIIKSKMGKKRNDTVKDLKPAKDNFSGSDDVPYIVPEPDEKLKQDAMSAREKFFARKFGKK

SEQ ID NO: 61341 - DNA, 492 bp, Unknown
  Obtained from environmental sample
  misc_feature (1)..(492): n is a, c, g, or t
atgcgttgcccccattgcggcagctttgacgacaaagtaatcgaatcaagaaccctggcagacggagacgccatacgcagaaggagggagtgtacgtcttgcggttaccgcttcaccagttatgagcggactgaagacaagcaattcatggtagttaaaaagggcggccgcagggagccctttgacagagccaaaattgagcgcggtgtaagtcgcgcactggaaaagcgccctgtttcacaaatgggcattgaaagtcttgtaaacgaaatagaggatcaggccgccattctgggaaaggtaaaccacgaaatcgatgccgcgacaattggcgatcttgtgctggaaaaattggccgctctggataaggtggcatatataaggtttgcgtcggtttaccggcatttcgaaaacttggacgaattcttgcgggaaattcaaaaaatagacggacctaagaacgaagtagaagggggaataggttttgattaa

SEQ ID NO: 61342 - protein, 163 aa, Unknown
  Obtained from environmental sample
  DOMAIN (49)...(141): ATP cone domain
  misc_feature (1)..(163): Xaa is any amino acid
MRCPHCGSFDDKVIESRTLADGDAIRRRRECTSCGYRFTSYERTEDKQFMVVKKGGRREPFDRAKIERGVSRALEKRPVSQMGIESLVNEIEDQAAILGKVNHEIDAATIGDLVLEKLAALDKVAYIRFASVYRHFENLDEFLREIQKIDGPKNEVEGGIGFD

SEQ ID NO: 61343 - DNA, 687 bp, Unknown
  Obtained from environmental sample
  misc_feature (1)..(687): n is a, c, g, or t
ttgattaagcaggtggtcaaaaggtcgggggagatagagggatacgaccggaccaagatttcaaacgccgtaaggaaggcctttaacgcggcggagacgggaaaaaaccctgaggaattacaggccagaattgaaaaaattaccgccagggtagaagttttaatccacgagatgatgtccttgcggcacccaaattccattcccgccatagaggaaattcaggatttggtagagaacactctcatcgaagaaaaagaaacaagggtagccaaggcttatatcctttacagggcccgccatgaggcaatgagggacgccaaaaagctaatgctggatattgacggcacaatggacggctatctgaagcagtcggactggcgggtaaacgaaaacgccaacgtcaattattcgctgggcgggcttatcctccacaattcgggaagcatcaccgccaattactggctgaaaaatatttaccccgaagaaatcgcctcggcgcaccggaacgccgattttcacatacatgatctttcaatgttttcaggctactgcgccggctggtctttaangcagcttgttaccgagggtctgggggggggtgacggacaagataaccagcaagccggccaaacacctttctaccctgatgcagcaggcggtgaatttcctgggctgtttgcaaaatga

SEQ ID NO: 61344 - protein, 228 aa, Unknown
  Obtained from environmental sample
  DOMAIN (3)...(104): ATP cone domain
  misc_feature (1)..(228): Xaa is any amino acid
MIKQVVKRSGEIEGYDRTKISNAVRKAFNAAETGKNPEELQARIEKITARVEVLIHEMMSLRHPNSIPAIEEIQDLVENTLIEEKETRVAKAYILYRARHEAMRDAKKLMLDIDGTMDGYLKQSDWRVNENANVNYSLGGLILHNSGSITANYWLKNIYPEEIASAHRNADFHIHDLSMFSGYCAGWSLXQLVTEGLGGGDGQDNQQAGQTPFYPDAAGGEFPGLFAK

SEQ ID NO: 61345 - DNA, 1506 bp, Unknown
  Obtained from environmental sample
  misc_feature (1)..(1506): n is a, c, g, or t
ttgttaccgagggtctgggggggggtgacggacaagataaccagcaagccggccaaacacctttctaccctgatgcagcaggcggtgaatttcctgggctgtttgcaaaatgaatgggcaggcgcccaggcgttttcttcttttgacacctacatcgccccctttattaaggcggatgatctttcagacaaggaaatcaagcagtgccttcagagttttatattcggggtaaataccccaagccgctgggggagccaggcgccttttacaaacattactttggactggacctgcccggcggatcttagggagaaaaaagccctggtgggaggcgaggaaggggatttctgctatggagactgccaggaagagatgaaccgcgtgaaccgtatctttatcgagcttatgcttgagggggacgcggaaggcaggggtttccaatacccgattcccacctacaacatcactccttattttgactgggaaagcgataacgcccggcttctctttgaaatgacttcccgttacggaacgccctattttcagaattttatcaattccgaccttgacccttccgacgtgcgctccatgtgctgccgccttcaactggacaagcgggaactgcgaaagcgcggcggcggccttttcggctccgacgagcttacaggctccatcggggttgttaccataaaccttccgcgaatcggctaccttgccaaaagcgaagaagatttttaccgccgcctggagcgcctgatggtactggcaaaggacagcctcaggatcaagcgcaagatcgtcagccgtcttcttgagggcgggctttttccgtataccaagcgctaccttaaaaacctggataatcactttagcaccatagggcttgtgggcatgaacgaatgcctcttgaatttcctgggcagggaattcacaatagccaccgaccggggcagatctttcgcacttgaggttctgggctttatgcggaataagctcgcggactttcaggaagaaacaggcgagctctttaaccttgaagccaccccggccgaatccacctcttacaggcttgccaggcacgacaagaaaaaatacccgcgtattatcagcgccggcagggacgagccttactatacaaactcaacccaactgccggtaatggaaaccgacgacattttcgaagccctggatctgcaggaaaaactgcaaaccgcttataccggcggtacggttttccattgcttcctgggggaagctattgaagattggcggatatgcagggatctggtcagaacaatagccggcaagtaccgaattccctattttacaatttcgcctaccttctcggtgtgcccagtacacggatatctgaagggtgagcatttttactgcccaaaatgcagggaagataaagaaaatgagctccgcgaaaaaatcgcggtattggaagaagaacggtcggctgccaaggcagctgcagccgttatggcggccacagttttgtga

SEQ ID NO: 61346 - protein, 501 aa, Unknown
  Obtained from environmental sample
  misc_feature (1)..(501): Xaa is any amino acid
MLPRVWGGVTDKITSKPAKHLSTLMQQAVNFLGCLQNEWAGAQAFSSFDTYIAPFIKADDLSDKEIKQCLQSFIFGVNTPSRWGSQAPFTNITLDWTCPADLREKKALVGGEEGDFCYGDCQEEMNRVNRIFIELMLEGDAEGRGFQYPIPTYNITPYFDWESDNARLLFEMTSRYGTPYFQNFINSDLDPSDVRSMCCRLQLDKRELRKRGGGLFGSDELTGSIGVVTINLPRIGYLAKSEEDFYRRLERLMVLAKDSLRIKRKIVSRLLEGGLFPYTKRYLKNLDNHFSTIGLVGMNECLLNFLGREFTIATDRGRSFALEVLGFMRNKLADFQEETGELFNLEATPAESTSYRLARHDKKKYPRIISAGRDEPYYTNSTQLPVMETDDIFEALDLQEKLQTAYTGGTVFHCFLGEAIEDWRICRDLVRTIAGKYRIPYFTISPTFSVCPVHGYLKGEHFYCPKCREDKENELREKIAVLEEERSAAKAAAAVMAATVL

SEQ ID NO: 61347 - DNA, 675 bp, Unknown
  Obtained from environmental sample
  misc_feature (1)..(675): n is a, c, g, or t
gtgcttttcggcgtctgcagcgcggtggttgaccaagttgaggcgggcgatttctacaacataaagaaagtctactcgataaacatagcctattttaacctaagcgccaagcgcgaatacttattttccggcgatataaacacgtttaaaggcgtccactacaaagacgaacaaatcccgtttgagcgggctgtatctcctaagtcaaagaaaatggttgacattcatcctgaatattaccttatcttgccgagaatgttcgacgaaaagatgcgtagcaggttcgacgagtgggtatacgtcctgaagaaatccgccgttcgcgacgacttcaaggccgccggaataaaggaggcgaaggcgaagttagactatatccgaatgacgccggagcaaagaaaggtatactttaggtacatggacaaccgcagaggcgcggacagcgcgatccagacggcggagggcaaaggcgaacgcagaggcgagcgcagaggcttacggaaaggcctagagaaaggcctacaggaaggtctacagaaaggcctacagaaaggtcaggaattggaacgcgccaaactcataaaaagcctgtacgaaaacggcgtaaccgttgcaaaaatcgtaaaaagtacaaaactctccgaaaccgccgtcaagcggattttaggcttgtag

SEQ ID NO: 61348 - protein, 224 aa, Unknown
  Obtained from environmental sample
  misc_feature (1)..(224): Xaa is any amino acid
MLFGVCSAVVDQVEAGDFYNIKKVYSINIAYFNLSAKREYLFSGDINTFKGVHYKDEQIPFERAVSPKSKKMVDIHPEYYLILPRMFDEKMRSRFDEWVYVLKKSAVRDDFKAAGIKEAKAKLDYIRMTPEQRKVYFRYMDNRRGADSAIQTAEGKGERRGERRGLRKGLEKGLQEGLQKGLQKGQELERAKLIKSLYENGVTVAKIVKSTKLSETAVKRILGL

SEQ ID NO: 61349 - DNA, 390 bp, Unknown
  Obtained from environmental sample
  misc_feature (1)..(390): n is a, c, g, or t
atgcccgtcaaaacgaccgtcaaaaagaagcataccgcgaccgccgccaaaaccaccgccaagaagcccgtcgagcgcgagttggtctcgtttgacttcgccgtcaaatacctattgcgcggcaagcgcgactacgttgtcctcaacggctttctgtccgaacttctcggcaaaaaggtagaggtcaagtctatcgacgaccccgaaaacattaagacctacaaaaacgacaaggtaaaccgcgtagacattaaagcgcggattaacggcggtgaactcgccattttcgagatacaatttcttcagagtttgacttcttcgcgagggtgcttttcggcgtctgcagcgcggtggttgaccaagttgaggcgggcgatttctacaacataa

SEQ ID NO: 61350 - protein, 129 aa, Unknown
  Obtained from environmental sample
  misc_feature (1)..(129): Xaa is any amino acid
MPVKTTVKKKHTATAAKTTAKKPVERELVSFDFAVKYLLRGKRDYVVLNGFLSELLGKKVEVKSIDDPENIKTYKNDKVNRVDIKARINGGELAIFEIQFLQSLTSSRGCFSASAARWLTKLRRAISTT

SEQ ID NO: 61351 - DNA, 555 bp, Unknown
  Obtained from environmental sample
  misc_feature (1)..(555): n is a, c, g, or t
ttgaataaatttcccccaactgttcgcgaaataggcgaaaaatttggcataaaaagtaccaatggggttagagatgccttgatttcccttgaaaaaaagggcttgataaaaaaattttcccgccaggcccgcagcatagaacttttgcaaagcgctccctccattgccaccgccgcccacgtgcctcttattggacgaatagccgcaggcacgccaattttggcagaagagaacgtagaagacaccttggctgtggacaaagctctgctccctcgcagcagccagatttttgcccttagagtacaaggggattctatgaccggagacggaattttaaacggcgatttagcaattattcgtatgcaaaaaaatgcagaacgagggcaaataatagccgccataatagacggcgatgccacgctaaagcactactacccctcagaaaacagaattgagctaagagcttcaaacggggcatactcgccaataatcatagatgagggcgatagcttctccattgcgggaattttagctggcgttatacgcaagtgttga

SEQ ID NO: 61352 - protein, 184 aa, Unknown
  Obtained from environmental sample
  DOMAIN (1)...(45): LexA DNA binding domain
  misc_feature (1)..(184): Xaa is any amino acid
MNKFPPTVREIGEKFGIKSTNGVRDALISLEKKGLIKKFSRQARSIELLQSAPSIATAAHVPLIGRIAAGTPILAEENVEDTLAVDKALLPRSSQIFALRVQGDSMTGDGILNGDLAIIRMQKNAERGQIIAAIIDGDATLKHYYPSENRIELRASNGAYSPIIIDEGDSFSIAGILAGVIRKC

SEQ ID NO: 61353 - DNA, 960 bp, Unknown
  Obtained from environmental sample
  misc_feature (1)..(960): n is a, c, g, or t
atgaaagcaaacgatgccgcatccgccctgcttgaaggcgcgggtaagattatcaagggaaaagaaaatttcctggaactgttaatttcttctattcttgccggaggccatgtccttattgatgacaatcccggacttggaaaaaccacagtcgcgaagacacttgcaaaattaattgacggcggaaagaagggactggatttcaagcgcattcaatttactcccgatcttctgccttatgatataacgggcgttgatgtgttcgatccaaagtcgcgcacgtttcgttttatgcccggtccagtgctttccaacatcgtgcttgcggacgaaattaaccgcactacgccgaaggttcaatccgccatgcttgaaataatggccgaacggcaggttaccatcgggcaaaatacccacaaaccgccggagccgttttttgtgatagcgacggaaaaccctatagaaagcgaaggcacttttccccttcccgccgcgcagcttgacaggtttatgatgaagcttgctcttgggtatcccgatcgcgaggcggagcttgctatccttgacgaaaaccccgccgaagaagggcttgccaaattggagcctgttatacgaataacggattttatcgccgcgaaaaaagccgcggtcgccgtcttttgccatcaggcaattaaagaggcaatcgcggatataataagggacacgcgtattcataaaagctttagccttggggcaagccccagagccgccctgcattttttggcggcggtaaaggcgcgcgcttttgtaaagggcagggattatgttattgatgaagaccttgcgctccttgccgcgcctgtgctggcgcaccgcgtaaggcttcgcgacccaagaacttcgggcgaaaaaatcatacgcgaaatttgccttgccagaattgaaaatttggtaacagatggaaaagagaaaagttaa

SEQ ID NO: 61354 - protein, 319 aa, Unknown
  Obtained from environmental sample
  DOMAIN (37)...(230): ATPase family associated with various cellular activities (AAA)
  misc_feature (1)..(319): Xaa is any amino acid
MKANDAASALLEGAGKIIKGKENFLELLISSILAGGHVLIDDNPGLGKTTVAKTLAKLIDGGKKGLDFKRIQFTPDLLPYDITGVDVFDPKSRTFRFMPGPVLSNIVLADEINRTTPKVQSAMLEIMAERQVTIGQNTHKPPEPFFVIATENPIESEGTFPLPAAQLDRFMMKLALGYPDREAELAILDENPAEEGLAKLEPVIRITDFIAAKKAAVAVFCHQAIKEAIADIIRDTRIHKSFSLGASPRAALHFLAAVKARAFVKGRDYVIDEDLALLAAPVLAHRVRLRDPRTSGEKIIREICLARIENLVTDGKEKS

SEQ ID NO: 61355 - DNA, 1380 bp, Unknown
  Obtained from environmental sample
  misc_feature (1)..(1380): n is a, c, g, or t
atggaaaagagaaaagttaatcgcgccgcagttttttatccatgtacaatgggcgtgtttatcctgcttattattatcctttcttttacagcgggggcgatcaggcgcgagcttgttcttacgcttacaggcgcggtagttctggcgatatgggcatactgccttgttatgactttgcttctcgcgcttatgcaccgccaacgcgcgaaaaatatttttatccgccttgagcctgaaaagattgtacgcggcggttcggtaaacgcggtatacacggagaacaaccccgcatacgccggaaaaaatatttttcagtttccgggcattcttgtccgcttaaggataattttaaaaacaaaagacgggcggcgcgtaatttatgattttaaaccggaaaataaaaacaacgcgcaagaaaattttcaggtaaaaaaacggggagcgtatttttccgcatacgatgaattcgccgtttttgacatttttggattttttcgtttcgcgtaccgcataccgaccgtcgatgccgcggcaagcagcgccgcacgcctgcttgtcagcccgggcgcgggcgccgaacctttgcctgtcagagcgaagggcggagagacgaacaggcaggattcccctacgcttgaaagaaccgactaccttattgaccaccgtccctatgtgcccggcgacgatccccggcgcattaactggaaactatacagccacggcggggaacttattgtccgccagggagaacgcgaaccgccgccttcttccagcatgacaattttgattgatacccagtacgattcgctttactcaacaaataatgaagcggcaaacagcggcgctgaagctgttgatttactttgtgaaaacgcgcttgctattatcaacaacgccgggaaggagataaatgttcaaattggttttacgaccggctgcgcagcaggcgacggcgcagtaaacagcggcgcattaagcgacaattcattgactcaggcggatttgggatttttcttgtcttaccctgcggcgctgccaatggaaaccgaaacggcgccaacagcggcgcccatggcgaaacttcccgccgtaacggaagaccggggaattattattttagcgctgccaagactcaatacgggtaaattcgcgctggagaaatttttagcggataacgctaaccgctcaatagaactgatttttatttacgccgccggcgaaaacgccttacacgaaaagttggcggaagcatcgcagcaagcagcatcgcagcaagcagcatcgcagcaagcagcatcgcagctagcagcggcgcatacttgcgccggtttttataacaggcattacggcgtaagggcgcaaaccgcgggagcgctgtaa

SEQ ID NO: 61356 - protein, 459 aa, Unknown
  Obtained from environmental sample
  DOMAIN (144)...(252): Protein of unknown function DUF58
  misc_feature (1)..(459): Xaa is any amino acid
MEKRKVNRAAVFYPCTMGVFILLIIILSFTAGAIRRELVLTLTGAVVLAIWAYCLVMTLLLALMHRQRAKNIFIRLEPEKIVRGGSVNAVYTENNPAYAGKNIFQFPGILVRLRIILKTKDGRRVIYDFKPENKNNAQENFQVKKRGAYFSAYDEFAVFDIFGFFRFAYRIPTVDAAASSAARLLVSPGAGAEPLPVRAKGGETNRQDSPTLERTDYLIDHRPYVPGDDPRRINWKLYSHGGELIVRQGEREPPPSSSMTILIDTQYDSLYSTNNEAANSGAEAVDLLCENALAIINNAGKEINVQIGFTTGCAAGDGAVNSGALSDNSLTQADLGFFLSYPAALPMETETAPTAAPMAKLPAVTEDRGIIILALPRLNTGKFALEKFLADNANRSIELIFIYAAGENALHEKLAEASQQAASQQAASQQAASQLAAAHTCAGFYNRHYGVRAQTAGAL

SEQ ID NO: 61357 - DNA, 1611 bp, Unknown
  Obtained from environmental sample
  misc_feature (1)..(1611): n is a, c, g, or t
atggaaaaaaatgcagctcttgccttccggtccgccgctgtttttatcattctttttcagatacggcttatcgcggcggatcttgcggacactccgatttttactgtcaccctgcttgcgggattttcagccgccgcatttctttccgtcttaaaaacaggcggcaaacaaattaacgcggctgcggctattttatccatcgcgcttattccgtgggcaggcagatttttggttgcaatgcccagatattttattccaggcagaacggacgctttggcgattacttttgactccatgctgcttaacctggacagaaataattttgtatccctgtttccgtattactggagcgcggtaacgacattttttgccgtccgctcgcggaaatttttaagagcggccgtaatcgcggacgcttccatgcttctctttatttacagtgtcgcgcgcaccggcaaaatagaaatttaccgctggccggttgtaatgattgttatttttgcattagttgttttttttcaggcgctcgctctgctcttttcaatgccgattgaaacaaaactgcgcgttaaagaaaaatgttttgcgataacggcgcttattgtaattattgttacaggcgggattttattcataaaaccaattcaggaacaggcggcgcanatgggcggcggccttttggagccgaaatttttcagttttgatttttccaaattattaaggcttgatcctgaaatctccgtaaaaaacgatttaatcctgattgtaaaaaaagaaaacgataaccatgttcttctgcgccgctcggtgctttccggctacagcaagaggcacggcttttataaaatcgaggatattgatgaaaaaacgcatccgcaaaagcttccctcaaggcaggtttttcttacccctcctgcatttaaagatgcccgtctttcgacacaggaatattttttggtaaatgtggaaagcaccgcatttgtcggcatgaaagagcctgtcctaattactccttacgaaaattgggacgcttcatctttcaaagccgcctatgccgtgaacagccttgttagcgacgcggattttcaagaactgattattagcgcttttaactggcctgcggtttccgatctggggttaagtgaaaacgaatttaaaatttatacggaatacggaaatgataaaagcattcgttctcttgccgaagaaataacagacggatgtattacttacacagaaagagttatcgccgtatataattatcttaaaaacggcgattatcgctacagtttaaaacccggtatcgcgccggacggcgatcaacttggatggtttctcttcaaatcaaaaaagggttactgttcatattacgcgtttgccatgacgctgcttctgcgttctttgggaattccatctcgtttagccgcaggtttttttgtagatcaggaaacaaatactttcgattattatccggtgcgttccgatatggcgcacgcgtgggtcgaggtcgcttttcccgaatacggctggatcgaatttgatcctactacggaaaatcttgccgaagatgaagagttccggtttcggcaggcactgatcccgcgcttttga

SEQ ID NO: 61358 - protein, 536 aa, Unknown
  Obtained from environmental sample
  SIGNAL (1)...(25)
  DOMAIN (449)...(516): Transglutaminase-like superfamily
  misc_feature (1)..(536): Xaa is any amino acid
MEKNAALAFRSAAVFIILFQIRLIAADLADTPIFTVTLLAGFSAAAFLSVLKTGGKQINAAAAILSIALIPWAGRFLVAMPRYFIPGRTDALAITFDSMLLNLDRNNFVSLFPYYWSAVTTFFAVRSRKFLRAAVIADASMLLFIYSVARTGKIEIYRWPVVMIVIFALVVFFQALALLFSMPIETKLRVKEKCFAITALIVIIVTGGILFIKPIQEQAAXMGGGLLEPKFFSFDFSKLLRLDPEISVKNDLILIVKKENDNHVLLRRSVLSGYSKRHGFYKIEDIDEKTHPQKLPSRQVFLTPPAFKDARLSTQEYFLVNVESTAFVGMKEPVLITPYENWDASSFKAAYAVNSLVSDADFQELIISAFNWPAVSDLGLSENEFKIYTEYGNDKSIRSLAEEITDGCITYTERVIAVYNYLKNGDYRYSLKPGIAPDGDQLGWFLFKSKKGYCSYYAFAMTLLLRSLGIPSRLAAGFFVDQETNTFDYYPVRSDMAHAWVEVAFPEYGWIEFDPTTENLAEDEEFRFRQALIPRF

SEQ ID NO: 61359 - DNA, 1104 bp, Unknown
  Obtained from environmental sample
  misc_feature (1)..(1104): n is a, c, g, or t
atggaaaacggactaaagatttatggctcattcataaaacaaattaaagaccttatataccgccggcagtatgaagcgatgaaaaaggtcaatgctgaattgatacaactttattgggaaatcggtgaagaaattgaacgccaacaacgtgaacaaggctggggcatgtccgtagttgagattttagccaaagagcttcaaaaagagtttcccagagtaaaaggtttttccgcaagcaacctttggcgtatgcgaagtttttatcttgaatactcgcaaatttcaaatcagcaatcaatagatttggaaaacgaaaatacaaatctcgcaccaatggtgcgagaaataggaagaaaatcaatgccgccattagtggcagaaataagctggtcgaaaatatgtgttataaccgaaaaatgcaaagacaaaaatgagcgtgaattttatataaaaatgacaaaaaggtacggttggacaaaagacgtattgattaacaacatcgaaaataaagcgttcgaaaaatatcttacaaatcaaaccaattttgatgaaacagtgccggaaaagtatagacttcaggcaaaactcgcagttaaggatgaatacaattttgactttatcgaaatgggtattgagcacagcgaggctgaacttgaagcgggcattataaacaatatccgttcattcttatccgaaatgggcggagatttcagttttattggcaatcaatatcatcttgatgttaccgatgatgattattatattgacttacttttatatcacagaagacttcgatgtctgattgcaattgatttaaagattggcgaattcaaaccggaatatgcaggaaaaatgcaattctacctgactgcacttgatgaaaaaataagattaccagaggaaaacccttctattgggattatcatttgtaaaagtaaaaaccgtacaagagttgaatatacattaaaggcggcaaataaacctatcggtgttgcaacatattcattttatgacaacttaccggatgaaatacgttctttacttccatcaccggatgaaatagcggcaattattaatgtaatagatgtaaatgacagtgattaa

SEQ ID NO: 61360 - protein, 367 aa, Unknown
  Obtained from environmental sample
  DOMAIN (11)...(351): Protein of unknown function (DUF1016)
  misc_feature (1)..(367): Xaa is any amino acid
MENGLKIYGSFIKQIKDLIYRRQYEAMKKVNAELIQLYWEIGEEIERQQREQGWGMSVVEILAKELQKEFPRVKGFSASNLWRMRSFYLEYSQISNQQSIDLENENTNLAPMVREIGRKSMPPLVAEISWSKICVITEKCKDKNEREFYIKMTKRYGWTKDVLINNIENKAFEKYLTNQTNFDETVPEKYRLQAKLAVKDEYNFDFIEMGIEHSEAELEAGIINNIRSFLSEMGGDFSFIGNQYHLDVTDDDYYIDLLLYHRRLRCLIAIDLKIGEFKPEYAGKMQFYLTALDEKIRLPEENPSIGIIICKSKNRTRVEYTLKAANKPIGVATYSFYDNLPDEIRSLLPSPDEIAAIINVIDVNDSD

SEQ ID NO: 61361 - DNA, 1779 bp, Unknown
  Obtained from environmental sample
  misc_feature (1)..(1779): n is a, c, g, or t
gtggctgtaaatataacggggatacctccttttaattttgattttacggcggcggttcccgtttttttggtagagcttgagcctgttcagttaggcgataacaataatgttcttataacgggaatagtcaacgccgatccggacgcggaaaattccaaaatagaacagaccgtaagctcaagagaactgggcaagccctcgtggacgcacaccgacggcgttcaccgattttcttttgctcccgttaaacgcggcgaggcttccagaacagcggaagttacatggaaaggaaaaccggtgggatcggaaatggacggaggcactaccgtaatgattcccggcctggatatttttcagatgctggatcttaaatttgcaaataacataattgagatttctttttcaagcaacttaaaagcaaatcaggatttaagaggatttattattctttcgggcaacacggatgtccgttatacgatggaaggaaatgtcgtaaaaatatacggaaacagttcaggcggcattccctccggggcttcgctttatattcaggatttggtagatgtcgacgggaaacgattaattactcctattcagtacactgttcccgataaatgggaattaccggaggtgcgttttaccggaaacggcgccatcctgccgacaagtcagggcgcccagcttgtaatcgaaacaaaaaatgtttccggcattttggtggaagcctttcaaatatacaatcataatacgtttcagtttttgcagattaacagccttgagggcacttctcagcttgaccgcgtaggagagccggtgtggacaaaagcaatagatttccaatgggccccctccgatcaaaatcggtgggtacgcagagggctggatatggcggaactcagcaagaagtttccgggcggagtcttccatattagaatcagtttcagaaaaaggcatattaaatatctttgcgataaaaatcatcaggatttttccgggcttaatttcccggacgactctttttcgcgttattcgacaacaagcagcagtgaatcttcctattgggacaattatgatgatgacgatgattacagctggagcgaatggtataattaccgctatgacccgtgccatcccgctttttatgttaatatgagcggccacaatataacgaagagccggaacgtgcttgtttcggatttggggcttatcgcgaaacgctctcttgacggctcatggattatcgcgacaacaaatcttattaccgcccgcgccgctcccaatacagaatacaaagttttaacttatcagggacgcgttctgcatcagggcaaaacaaattcaaacggcatcgcggcgattcccgcgtcctcggacacggcaagcggctctcgtctttttgtgtacgccgaaagcaatttaggaagagcgtatctaagggctaatgattctcttgctctttctgtaagccattttgatatttcaggcggcactccttcatccggcatacgagggcttatctacggagagcgcgacgtttggcgtcccggcgacaatatttatcttaccttccttcttgccgatcccttgggcacacttcctcaaaatcatcccgtaacatttgaactggaagacccgagaggcagacctgtcatcaaccgcacttacactacttccgtagacggattttacgcgctcgccgccgcaacagcgtccgacgctcccacgggagactggactgccagagtgcgggtaggcggaaaaacattaacaaaaacgtaa

SEQ ID NO: 61362 - protein, 592 aa, Unknown
  Obtained from environmental sample
  DOMAIN (395)...(592): Alpha-2-macroglobulin family N-terminal region
  misc_feature (1)..(592): Xaa is any amino acid
MAVNITGIPPFNFDFTAAVPVFLVELEPVQLGDNNNVLITGIVNADPDAENSKIEQTVSSRELGKPSWTHTDGVHRFSFAPVKRGEASRTAEVTWKGKPVGSEMDGGTTVMIPGLDIFQMLDLKFANNIIEISFSSNLKANQDLRGFIILSGNTDVRYTMEGNVVKIYGNSSGGIPSGASLYIQDLVDVDGKRLITPIQYTVPDKWELPEVRFTGNGAILPTSQGAQLVIETKNVSGILVEAFQIYNHNTFQFLQINSLEGTSQLDRVGEPVWTKAIDFQWAPSDQNRWVRRGLDMAELSKKFPGGVFHIRISFRKRHIKYLCDKNHQDFSGLNFPDDSFSRYSTTSSSESSYWDNYDDDDDYSWSEWYNYRYDPCHPAFYVNMSGHNITKSRNVLVSDLGLIAKRSLDGSWIIATTNLITARAAPNTEYKVLTYQGRVLHQGKTNSNGIAAIPASSDTASGSRLFVYAESNLGRAYLRANDSLALSVSHFDISGGTPSSGIRGLIYGERDVWRPGDNIYLTFLLADPLGTLPQNHPVTFELEDPRGRPVINRTYTTSVDGFYALAAATASDAPTGDWTARVRVGGKTLTKT

SEQ ID NO: 61363 - DNA, 2295 bp, Unknown
  Obtained from environmental sample
  misc_feature (1)..(2295): n is a, c, g, or t
atgggtaagtatcacccccatggcgatatgtccctgtatgactccctggtacgtatggcgcaggacttttccctgcgttataccctggtgaaaggccagggcaacttcggcgccattgacgactctcctccggcggcaatgcgctataccgaagcgacaatctcgaaagtcggcagcgagatgctggtggatttacaaaaagagaccgtggactttgcccccaactacgacgactccctcaaagagccggtggtgctgccgtcggcaattcccaatttgctggtcaacggctcaagcggaatcgccgtgggcatggccaccaatatggccccccataaccttgttgaaatatgcgacgcgatctgcgcccatatcgacaatccggaaataagcattgacgatctgatgcgttatgtgcaaggcccggactttcccacaggcggggttattttcggcaggaagggcatccgcgaggcgtgcagaaccgggcggggaaaactgcttgtccggggcaaattcaatattgaaacaaccaagtccggaaaagaaaaaatagtctttaccgagattccctataacgtgaacccgaccgaactgctggataaaatcggccagcttatgcgcgacaagctgatcgacggcatcgtgaacgccaatgacgaatctgaccgtgagggcgtccgcattgttatagagcttaaaaaaggcgccatcgtcaaggttgtgcttaaccagcttttctccangacgcagctgcaaacgtctttcagtataatcaacctggccctggtaaacggcaggccccagtgcctcaacctgaaagaacttatccattattttatcgaacaccgcgtcgaggttgtcacccgccgcacccgctacgatctccgcaaggccgaggaacgcgcccatatcctggaaggcctgatcatcgccctggcaaatatcgacgaagtgatcgccattatcaaggcaagccgcgatgtctcaactgcccggctgaaattgcaggaacgcttcagcctttccgaggcccagtcagaggcaatcgtcgagatgcgcctcggccgccttaccagccttgaagtcgaaaaaattgaaaaggaactggaagagttaaaggttcagatagcctggttcaagtcgctgcttgccgatgataaaaaactacgctcggtgataaaggacgagacaagggccatatccgaaaaatacggcgacaaaaggcggaccgagatcatagccggcgaggttgagaacatcaacattgaagaccttatcaaaaaagaagagatgatgatcctcatttccaaccttggttatgtaaagagggtccccgtttcggcttaccgcaaccagggccggggaggaaagggcatgcagagcgcgaaactcgccgaggatgattttgtcgatcagatttttgtcgcatccacccatgaatacattatgttcatcaccagcgcgggcaaggcctactggatgaaggtgcatgaactgccggagggcagccggacaagcaagggctcccacataaaaagcctgttgacagtttcgcctaacgaggacatttcagctattgtctcgctcaaggatttttccgacaccgaattcctgtttatggggacggcacggggcgtcgtcaaaaaagccagaacctccgaattcgtcaacgctaaaaccaggggcgttatcgcgattaaccttgacgacggggacaggcttgtcagcgccctgctgaccaacggctctgacgaggtggtgctgatttcccgcaggggacaggccctgcgaacccatgaggatcatataagggcgatggggcgctcgtcgcgcggcgtgaccggcatgaggctgtcaaacggcgacgaacttgccggcatgctgcgtgttgataccggtaaagatctcccgcctgaaaaaaccgaaaaaatgctgatccttaccgaattcggctatggcaagagggttgacttcagcgaattctcatcgcatgggcgcgggacgggcggccagaaaatctacacggtcaatgaaaaaaccggcgagattataggctgcgtttccctgcttgacgacgatgagataatgtgcatcaccagccagggaaaatcaatcaagctgaaggtggacgagatccgcgttatgggacgggcagcccagggcgtgaggatactcagcatagacaggccggattttgttatcggccttgaccgtgttgtaaaagaggacgaacaagttgtaaaagaagacgaacaagttgtaaaagaggacgaacctcttgaaggagagtaa

SEQ ID NO: 61364 - protein, 764 aa, Unknown
  Obtained from environmental sample
  DOMAIN (642)...(692): DNA gyrase C-terminal domain, beta-propeller
  misc_feature (1)..(764): Xaa is any amino acid
MGKYHPHGDMSLYDSLVRMAQDFSLRYTLVKGQGNFGAIDDSPPAAMRYTEATISKVGSEMLVDLQKETVDFAPNYDDSLKEPVVLPSAIPNLLVNGSSGIAVGMATNMAPHNLVEICDAICAHIDNPEISIDDLMRYVQGPDFPTGGVIFGRKGIREACRTGRGKLLVRGKFNIETTKSGKEKIVFTEIPYNVNPTELLDKIGQLMRDKLIDGIVNANDESDREGVRIVIELKKGAIVKVVLNQLFSXTQLQTSFSIINLALVNGRPQCLNLKELIHYFIEHRVEVVTRRTRYDLRKAEERAHILEGLIIALANIDEVIAIIKASRDVSTARLKLQERFSLSEAQSEAIVEMRLGRLTSLEVEKIEKELEELKVQIAWFKSLLADDKKLRSVIKDETRAISEKYGDKRRTEIIAGEVENINIEDLIKKEEMMILISNLGYVKRVPVSAYRNQGRGGKGMQSAKLAEDDFVDQIFVASTHEYIMFITSAGKAYWMKVHELPEGSRTSKGSHIKSLLTVSPNEDISAIVSLKDFSDTEFLFMGTARGVVKKARTSEFVNAKTRGVIAINLDDGDRLVSALLTNGSDEVVLISRRGQALRTHEDHIRAMGRSSRGVTGMRLSNGDELAGMLRVDTGKDLPPEKTEKMLILTEFGYGKRVDFSEFSSHGRGTGGQKIYTVNEKTGEIIGCVSLLDDDEIMCITSQGKSIKLKVDEIRVMGRAAQGVRILSIDRPDFVIGLDRVVKEDEQVVKEDEQVVKEDEPLEGE

SEQ ID NO: 61365 - DNA, 621 bp, Unknown
  Obtained from environmental sample
  misc_feature (1)..(621): n is a, c, g, or t
atgggcgcgttcctcggccttgcggagatcgtagcgggtgcggcgggtgacaacctcgacgcggtgttcgataaaataatggataagttctttcaggttgaggcactggggcctgccgtttaccagggccaggttgattatactgaaagacgtttgcagctgcgtcntggagaaaagctggttaagcacaaccttgacgatggcgccttttttaagctctataacaatgcggacgccctcacggtcagattcgtcattggcgttcacgatgccgtcgatcagcttgtcgcgcataagctggccgattttatccagcagttcggtcgggttcacgttatagggaatctcggtaaagactattttttcttttccggacttggttgtttcaatattgaatttgccccggacaagcagttttccccgcccggttctgcacgcctcgcggatgcccttcctgccgaaaataaccccgcctgtgggaaagtccgggccttgcacataacgcatcagatcgtcaatgcttatttccggattgtcgatatgggcgcagatcgcgtcgcatatttcaacaaggttatggggggccatattggtggccatgcccacggcgattccgcttga

SEQ ID NO: 61366 - protein, 206 aa, Unknown
  Obtained from environmental sample
  misc_feature (1)..(206): Xaa is any amino acid
MGAFLGLAEIVAGAAGDNLDAVFDKIMDKFFQVEALGPAVYQGQVDYTERRLQLRXGEKLVKHNLDDGAFFKLYNNADALTVRFVIGVHDAVDQLVAHKLADFIQQFGRVHVIGNLGKDYFFFSGLGCFNIEFAPDKQFSPPGSARLADALPAENNPACGKVRALHITHQIVNAYFRIVDMGADRVAYFNKVMGGHIGGHAHGDSA

SEQ ID NO: 61367 - DNA, 864 bp, Unknown
  Obtained from environmental sample
  misc_feature (1)..(864): n is a, c, g, or t
ttgtgcggattaccgccgccggcctcagggaaagccacgcgcatgatattacaatcacccaggaagccccgaattattcgcgctcctgagaacgcgcgggttcaaaaaacgcttgatagccgctataacgaattcaacggttctgaatcttctgtcagggattttatcgaacatgatcccgttcaattcccccttcattacgccaaacagcggcctaaaaatcaggcagatattgaaattgccgcgttcctcgccgcgataatagcctgggggcggcgcgatttgattatacgttcggcgcggaggatgttcgccatgatggagccggggccgcaaacctatgtcttaaagaggtgtcaaaaacgcgccgcgccgtataagcgcgcgtccgcccgcggctcctgccttcaccgcactttttttgaaaatgatcttgaatatttttgcaatggtttcaggcattgttacgcgaaatacggcactcttgaaaaactgttcgcgtcccaatcagacatctggcagggtataagcctattcagggaagagatggcggcgggaaacaacggcctttacacgacgcatatcgccaatcctgacgcgaattccgcctgcaagcgcattaacatggccctgcgctggctggtaaggaaaggcccggtagacatgggcctgtggaaaagcataaagccttcgtccctgtacatccctctggacgttcatgttgcgcgtaacgccaggaacatcggcctgctggaaagaaagtcaaacgataaaaaagccgtcatggagattaccgaaaaactccgccaattctgcccggaagacccggtaaaatacgactttgttttattttcaatcggctaa

SEQ ID NO: 61368 - protein, 287 aa, Unknown
  Obtained from environmental sample
  misc_feature (1)..(287): Xaa is any amino acid
MCGLPPPASGKATRMILQSPRKPRIIRAPENARVQKTLDSRYNEFNGSESSVRDFIEHDPVQFPLHYAKQRPKNQADIEIAAFLAAIIAWGRRDLIIRSARRMFAMMEPGPQTYVLKRCQKRAAPYKRASARGSCLHRTFFENDLEYFCNGFRHCYAKYGTLEKLFASQSDIWQGISLFREEMAAGNNGLYTTHIANPDANSACKRINMALRWLVRKGPVDMGLWKSIKPSSLYIPLDVHVARNARNIGLLERKSNDKKAVMEITEKLRQFCPEDPVKYDFVLFSIG

SEQ ID NO: 61369 - DNA, 684 bp, Unknown
  Obtained from environmental sample
  misc_feature (1)..(684): n is a, c, g, or t
atggacgcgatccgcgggataaaaaaagattttaacatccccgtaatcggcggaaatgtcgcgtccaaagaagggacgcgccgcctgatcgaggcgggggcggacgcggtaaaagtgggtataggcccgggttcaatatgtactactcgaataattgcgggcataggaatgccgcagtttacagcggtgctggactgcgccgaagaagcgtctaaatcgaatattcccgttatcgccgacggaggcataaaattttccggggatattaccaaggccataggcgccggcgcaggcgttgtaatgataggcaacctctttgcgggacttaaggaagcgccgggcagggagataatttttgacggcagaatcttcaaggagtaccgcggcatgggcagcatgggggcgattgccgacggcgcgggtgaccgttaccagatgggcaaggacgaggaaccggttcccgaaggcattgaaggccgcgttccatacaagggcgaacttagcagttatataagccagcttgtcgcggggcttagaaaaggaatgggctattgcggatgccataatatagaagaattaagaaaataccgcaagtttgtgcggattaccgccgccggcctcagggaaagccacgcgcatgatattacaatcacccaggaagccccgaattattcgcgctcctga

SEQ ID NO: 61370 - protein, 227 aa, Unknown
  Obtained from environmental sample
  DOMAIN (1)...(213): IMP dehydrogenase / GMP reductase domain
  misc_feature (1)..(227): Xaa is any amino acid
MDAIRGIKKDFNIPVIGGNVASKEGTRRLIEAGADAVKVGIGPGSICTTRIIAGIGMPQFTAVLDCAEEASKSNIPVIADGGIKFSGDITKAIGAGAGVVMIGNLFAGLKEAPGREIIFDGRIFKEYRGMGSMGAIADGAGDRYQMGKDEEPVPEGIEGRVPYKGELSSYISQLVAGLRKGMGYCGCHNIEELRKYRKFVRITAAGLRESHAHDITITQEAPNYSRS

SEQ ID NO: 61371 - DNA, 420 bp, Unknown
  Obtained from environmental sample
  misc_feature (1)..(420): n is a, c, g, or t
atgtcaaaatacctgaagcaattggaggacaccaagaagtcgatgatcaacgggctggagcacatcttgctgcgtttctgcgtggagctgacgaagaagatcgtcgcgtccgagctggagacgaacaaggagatgatctcggcgactataaagcgggcgctgtctatgatagcggatagggaaaacatcctgatccgcgtgtcgccgggcgatatggaggcggccagcgggaccaaagattttttaagctcggtgacggaacggttagagaatgtgcggatagaggaggacgccagaatcgctaagggcggctgtatcatagagtcaaactccggcttggtggacgcgaggctcggggtacagctggaagaggtggctgagcttgttgagaaagcttgggaatcatcggacatgggctag

SEQ ID NO: 61372 - protein, 139 aa, Unknown
  Obtained from environmental sample
  misc_feature (1)..(139): Xaa is any amino acid
MSKYLKQLEDTKKSMINGLEHILLRFCVELTKKIVASELETNKEMISATIKRALSMIADRENILIRVSPGDMEAASGTKDFLSSVTERLENVRIEEDARIAKGGCIIESNSGLVDARLGVQLEEVAELVEKAWESSDMG

SEQ ID NO: 61373 - DNA, 630 bp, Unknown
  Obtained from environmental sample
  misc_feature (1)..(630): n is a, c, g, or t
atgcgtatcagcgccggctggtcgctggtcgccaccacgagtaccgaccgccgcagaccctcctcgccgaggtcgcgctctatgaactccaacacctcgcgcccgcgctcgcctatgagcgctatcacgttcacgtcggagcgacagttccgagcgagcatccccatcagcacgctcttcccgacgccgctgcccgcgaaaatccccagccgctgccccttgcccaccgtcaccaaaccgtctatcgccctgacgcccgtctcaaaaacctgttttatacgctgccgcgtcatgggattgggtatggacgagaaaacagaccgcatcgccgtagcccgtatcggccccttgccgtccataggatttccaagcccgtccaagacacgccccaaaagagcgtccccgatctgtaccgaaagcggacgccccgtaccggcgaccgccattcccggatgtatgccctctataggcccaagcggcatcaaaagcgtacgatccttgcggaacccgacgacctccgcccgacagattaaccgcccgcctttctctatacggcaaacgtctcccaccgaggcggaaggcccgctgctctctatgagaatgcctatgacctccgtcaccttgccgtag

SEQ ID NO: 61374 - protein, 209 aa, Unknown
  Obtained from environmental sample
  misc_feature (1)..(209): Xaa is any amino acid
MRISAGWSLVATTSTDRRRPSSPRSRSMNSNTSRPRSPMSAITFTSERQFRASIPISTLFPTPLPAKIPSRCPLPTVTKPSIALTPVSKTCFIRCRVMGLGMDEKTDRIAVARIGPLPSIGFPSPSKTRPKRASPICTESGRPVPATAIPGCMPSIGPSGIKSVRSLRNPTTSARQINRPPFSIRQTSPTEAEGPLLSMRMPMTSVTLP

SEQ ID NO: 61375 - DNA, 681 bp, Unknown
  Obtained from environmental sample
  misc_feature (1)..(681): n is a, c, g, or t
ttggaggctatggctcgcaagcgcgcgatggagctggtctcaaacaaaaaatttttgccgcagatttctgtaaaacagctctccacctatctaggagtcccggattttgcgggacctcgcttaattgacgaaaaacgcgctggcgtcaccaccgggcttgcttggactccggttggcggagatgttctgcatatagaatgcgtacttttgcccggcaaaggaaaattgcagctaaccgggcacttgggcgatgttatgaaggaatccgctcagatagctctttctctggtgagggagagagccaagaagcataaaattttagaagagaagttccgcagaagcgatattcacctgcatttcccagaaggcgcaactcctaaagacggcccttccgcaggcatagccattaccttagccatgctatctgttttcactggcaagctgatatcgcctttcatagcgtttacgggagaagtcagtttggttggccgcttaattgcaatcggaggcttaaaggaaaaatccctcgcggctttgaactccggcgtaaaaaaactgattttgccaaaggataatcaaaaaaatgtggaagacctgcctgatgtagtaaagaaaggcttggaaatcaaaatgttttcccacatagacgaagtgataaaagagctgataaccgttgattaa

SEQ ID NO: 61376 - protein, 226 aa, Unknown
  Obtained from environmental sample
  DOMAIN (21)...(225): Lon protease (S16) C-terminal proteolytic domain
  misc_feature (1)..(226): Xaa is any amino acid
MEAMARKRAMELVSNKKFLPQISVKQLSTYLGVPDFAGPRLIDEKRAGVTTGLAWTPVGGDVLHIECVLLPGKGKLQLTGHLGDVMKESAQIALSLVRERAKKHKILEEKFRRSDIHLHFPEGATPKDGPSAGIAITLAMLSVFTGKLISPFIAFTGEVSLVGRLIAIGGLKEKSLAALNSGVKKLILPKDNQKNVEDLPDVVKKGLEIKMFSHIDEVIKELITVD

SEQ ID NO: 61377 - DNA, 1227 bp, Unknown
  Obtained from environmental sample
  misc_feature (1)..(1227): n is a, c, g, or t
atgtctgcacgcaacaatatgaacaacgcgcttgcaagcgcaattcgcgaggtattctcatatatttcgagattcaaagggcaactgttcatattgaaaatagaggatacgcttttagataacccagcattccctgtgctgataagggatattgcgcagctccacagcgttggcataaaaattttgatagtgccaggcacaaggaacagcatagaccgccagctcaaggcttatgggctggaagctgtttttaaaaatgggataagattaacctctaaagaagccctgccgctcgcagagcaggcctcgcttggggtggcacagcacatactctcgcacctcacggcaaacgggataaacggtattcagggcaactgggtgcaggcacggagccttggcgttgtggacggcaccgattatatgtacaccggcaaaattgagcgcattgaaaagagccttatagaaaaacttttgcaagaggattttatccccattctcccaccaataggctggaacaagctgggccacgcttacaacatctccagcacagagcttgcaaccgagctttgccattacttcacggttgggaaattattttttataggggaagaaggaggcataaaaaccgaagggcttatacgtggcaaactcacaaaaaaactcgaactcgccgaccacggcttaatatctgcgcttgacattgagcaggctacggaaattttgggactgaaccgccagcttccattcgcgcagcgcgattatctggaaaatgccataaaagcctgccggacggggataaaaagagttcacttgctctctggcattacgcaggggaacatactgcaagaggtgttctccagccgaggcaatggaaccatggtctatgcaaatgagtattggaatttacgctcggcaaccatagacgatattcccgatatgctccgcattatgcagagctacgtggaacaggggtatttgatttccagaagccaagaggatattgaggccaaacttggcgattacgttgtttacgccgtggacaacgccattcacggctgcggcgcattgcacgcttatgaaaaccacagctttgagatagcggcaatagcggttggcgcaaattacaaggatgccggggttggcgaagcggtagtcacnttttttgatggaaaaagcaaaaaaaatgaaggcaaaaaaagtctttctcttaacaacccaaacctctga

SEQ ID NO: 61378 - protein, 408 aa, Unknown
  Obtained from environmental sample
  DOMAIN (28)...(251): Amino acid kinase family
  misc_feature (1)..(408): Xaa is any amino acid
MSARNNMNNALASAIREVFSYISRFKGQLFILKIEDTLLDNPAFPVLIRDIAQLHSVGIKILIVPGTRNSIDRQLKAYGLEAVFKNGIRLTSKEALPLAEQASLGVAQHILSHLTANGINGIQGNWVQARSLGVVDGTDYMYTGKIERIEKSLIEKLLQEDFIPILPPIGWNKLGHAYNISSTELATELCHYFTVGKLFFIGEEGGIKTEGLIRGKLTKKLELADHGLISALDIEQATEILGLNRQLPFAQRDYLENAIKACRTGIKRVHLLSGITQGNILQEVFSSRGNGTMVYANEYWNLRSATIDDIPDMLRIMQSYVEQGYLISRSQEDIEAKLGDYVVYAVDNAIHGCGALHAYENHSFEIAAIAVGANYKDAGVGEAVVTFFDGKSKKNEGKKSLSLNNPNL

SEQ ID NO: 61379 - DNA, 891 bp, Unknown
  Obtained from environmental sample
  misc_feature (1)..(891): n is a, c, g, or t
atgaaaaacaaactatgggttgttgccattcttacggcatttacactctcaacgacatattgctttgctcaaagtagcggtggtggaactattacaagtcctacagggattgtaatgatttcgatacccgccggaacatttacaatgggcagtcccacaactgaagcgtacaggtataacgatgaaacacaacattcagtaacgcttagcggttttaaaatgggcaagtatcaagtaacacaagagcagtatcaagcggtgatgggaagtaatcccagctattttagctctaacccgcaagcaggcgaaacacaaggcaaacgaccggtggaacaagtaagctggtatgacgcattggtattctgcaacagattgagcataaaggaaggattaagcccggcatacagcattggaggtaaaaccgatcctacagcatggggaaaagtgccagcgcgcgaagacgtaacatgggacgctgtgaaaattttagaaagtaccaacggttatcgtttaccgaccgaggcgcagtgggagtatgtgtgccgggcaaagacaacaacagcgtataacacaggaaatacgataagcgacaatacagggtggcttgagagtaacagtaatgatatgacgcatgaggtgggaaagaaacccgcaaatgcttggggactgtatgacatgcatgggaatgtgtgggaatggtgctgggatcggtatggtaattattcgagcaatgcgcaaaccgacccaatgggcgcgtcctcggggcctctccgcgtgctacgcggcgggagttggtacgattcagctgaggacctgcgttccgcgttccggggcagcagcggcccgggcagaggggacgacggtcttggcttccggctcgtccgcccctag

SEQ ID NO: 61380 - protein, 296 aa, Unknown
  Obtained from environmental sample
  SIGNAL (1)...(23)
  DOMAIN (35)...(295): Domain of unknown function (DUF323)
  misc_feature (1)..(296): Xaa is any amino acid
MKNKLWVVAILTAFTLSTTYCFAQSSGGGTITSPTGIVMISIPAGTFTMGSPTTEAYRYNDETQHSVTLSGFKMGKYQVTQEQYQAVMGSNPSYFSSNPQAGETQGKRPVEQVSWYDALVFCNRLSIKEGLSPAYSIGGKTDPTAWGKVPAREDVTWDAVKILESTNGYRLPTEAQWEYVCRAKTTTAYNTGNTISDNTGWLESNSNDMTHEVGKKPANAWGLYDMHGNVWEWCWDRYGNYSSNAQTDPMGASSGPLRVLRGGSWYDSAEDLRSAFRGSSGPGRGDDGLGFRLVRP

SEQ ID NO: 61381 - DNA, 642 bp, Unknown
  Obtained from environmental sample
  misc_feature (1)..(642): n is a, c, g, or t
atggaaaacctgtcttcggcgccatataaatcctgcgagctctgtcccagaaactgccgcatagacaggcttgccggcgatgcgggcttttgcggggaaactgccgctttacgcgtaggggcggctttattgcactttggagaagaacctccgcttgtgggaaagggaggatcgggaacaatttttgtcagcggctgcaatttgggctgcgccttttgccaaaattatcagatttcccaaggagaaaacaaagagggcgtgcgccttcccgcgctggggaaaaaagtcagcgccgaagactttgcttctatctgcgaagccctgcgcgctaagggcgcggaaaatatcaatatagttacgggaagccacgcgattccggcgataattgatggaataacggcggcaagaagagcaggggtgagccttcccgtgctttggaattcttccgcctacgaaagcccgcaggcgcttgaattgttaagggagcatgtcgatatttaccttcctgatttaaaaacactggacaaaaaaatagcggcaaagttttttaatgcgccggattatccgcaggcggcggcggcggctattttgaaaatggcggatatggcgaaggggcgcgaaaaagtattgtcccgccattga

SEQ ID NO: 61382 - protein, 213 aa, Unknown
  Obtained from environmental sample
  misc_feature (1)..(213): Xaa is any amino acid
MENLSSAPYKSCELCPRNCRIDRLAGDAGFCGETAALRVGAALLHFGEEPPLVGKGGSGTIFVSGCNLGCAFCQNYQISQGENKEGVRLPALGKKVSAEDFASICEALRAKGAENINIVTGSHAIPAIIDGITAARRAGVSLPVLWNSSAYESPQALELLREHVDIYLPDLKTLDKKIAAKFFNAPDYPQAAAAAILKMADMAKGREKVLSRH

SEQ ID NO: 61383 - DNA, 1026 bp, Unknown
  Obtained from environmental sample
  misc_feature (1)..(1026): n is a, c, g, or t
atgctcactcaccgtaacatcctgaacaatggccttgggatcggagacaaccagcggctcaccaacaaagacatcgtctgccttccggtgccgctgttccactgcttcggcctcgtgcttgggatgatggcgattcttacccacggctccactgccgccatggtggaatggttcgattctcttatagtgctggcgacagttcaaaaggaaaaatgcaccgccctgtacggagtacctaccatgttcatcgctgtgcttaaccacccgatgttcaagatgtttgacctttcaagcctgcgtaccggaataatggcaggctcgccctgccccatcgaggccatgcgtaaggtcatcgaccttatgcacatgagcgaagtaaccatctgctacggtcttactgagtcctccccggtgatgacccagacccactttgacgacacgattgaagtgaaagtagaaaccgtaggccgcgcccttgacggcgttgaggtaacaatccgcgacgcggaaaccggcgatgaatgtcaggatggtacacacggcgaattctgctgccggggctacagcaccatgaagggctactacaagatgcccgaggaaacagcaaagtgcatcgacgagacaggctggctccattccggagacctgggcgttaaaaccggtaacggcaacttcaaggttacaggccgcatcaaggacatgatcatccgcggcggggaaaatatttcccccaaggaaatcgaagactacctctacacaatgccgggaatcaaagacgtatcggtggtcggcatcgccagcgaaaaatacggcgaggaagtcggcgcttttgtgattcttcatcccgacgtaaaaatgaacgtggaagacgtgcgcgactattgcagggataaaataggccggtacaaaatccccaaatatgtgttttttgtggacagtttccccctgacatccagcggaaagatacaaaagtaccttttacgcgagatggggagtaaacttgccgccgaagccgggctgtcttga

SEQ ID NO: 61384 - protein, 341 aa, Unknown
  Obtained from environmental sample
  DOMAIN (1)...(262): AMP-binding enzyme
  misc_feature (1)..(341): Xaa is any amino acid
MLTHRNILNNGLGIGDNQRLTNKDIVCLPVPLFHCFGLVLGMMAILTHGSTAAMVEWFDSLIVLATVQKEKCTALYGVPTMFIAVLNHPMFKMFDLSSLRTGIMAGSPCPIEAMRKVIDLMHMSEVTICYGLTESSPVMTQTHFDDTIEVKVETVGRALDGVEVTIRDAETGDECQDGTHGEFCCRGYSTMKGYYKMPEETAKCIDETGWLHSGDLGVKTGNGNFKVTGRIKDMIIRGGENISPKEIEDYLYTMPGIKDVSVVGIASEKYGEEVGAFVILHPDVKMNVEDVRDYCRDKIGRYKIPKYVFFVDSFPLTSSGKIQKYLLREMGSKLAAEAGLS

SEQ ID NO: 61385 - DNA, 561 bp, Unknown
  Obtained from environmental sample
  misc_feature (1)..(561): n is a, c, g, or t
atgtctgatagcgatgatctggatcttgacggcggtgatgcgcctgaaggcggcggcggagcggcaaagaaaagaagcggcggactgggaaacttacttccgactatccttaaattcgcggccattggcattggcgcgttaatttttattgttactgtctcggtaattacatatagcataatgaacaagggcggaaaatctcagactgttatttcggacccttattcgccgtatgtgggcaagcgccctgaatatgacatgtatgataaaatcggttctgtaacaaccaggacaaaagactcggcctccgttaccgtggatatgataatcggttacgataagggcgatcagaacgcttcgatagaactcttcgcccgccagtatgaactgcaggattttatccgccgttattttacgagtaaaagctcgacagagctggttcccgaaagagaagacgaactgaaaaatgaaatccgcgaacagttaaatcaaaggtttttggacaccgcaagagccagaattattttgtttaagaaattggatgttatggagatgttttaa

SEQ ID NO: 61386 - protein, 186 aa, Unknown
  Obtained from environmental sample
  DOMAIN (33)...(183): Flagellar basal body-associated protein FliL
  misc_feature (1)..(186): Xaa is any amino acid
MSDSDDLDLDGGDAPEGGGGAAKKRSGGLGNLLPTILKFAAIGIGALIFIVTVSVITYSIMNKGGKSQTVISDPYSPYVGKRPEYDMYDKIGSVTTRTKDSASVTVDMIIGYDKGDQNASIELFARQYELQDFIRRYFTSKSSTELVPEREDELKNEIREQLNQRFLDTARARIILFKKLDVMEMF

SEQ ID NO: 61387 - DNA, 1029 bp, Unknown
  Obtained from environmental sample
  misc_feature (1)..(1029): n is a, c, g, or t
atgacagaagttctgtcccaggatgaaatagatcaattattaaccgcgataaacgccggagaatccgagcctgaagatttcaggccggccgcggacagccggaaaatcaagatctatgactttaaacgccccgacaaattttcaaaagagcaaatccgtacggtctcgattatgcacgagacttttgcccgtttaaccacaaccagcctttccgcccagcttcggagcatggttcacgtccatgtcgcttctgtagatcagcttacctatgaagaatttatccgttccattcccaccccgacaactttggctattatcaatatggaccccctcaagggaaacgctattttagaaatagaccccgcgattactttttcaataatcgaccgtctttttggcggtacgggcgaaggcaccaaatcccagcatgaattgactgatattgagcagtcggtaatggaagggattatcgtccgtattttagggaatatgcgcgaagcgtggactacggttatcgacttacgcccacgccttggacagattgacaccaatccgcagtttgcgcaaatcgtaccgcctacggaaatggtcgttcttgtaacgcttgaaacaaaggtaggcgacgtggaaggcatgatgaacttttgtattccctaccttacaatagagccgataatcggcaaattgtccgcgcaattctggtattcttcggtacgccgtaacgccacaacggaaaacctcaatgttctaaaggataaactcgcaacggtcgatattaatgtaacagccgaaattggaaagataaacgtgcctgtcagagacgttctttccttacagattggggatgtaatcaggctttataatacacgtattggcgatccctattccctaaatattggcacaaggaaaaagtttctgtgccgtcccggaattatcgggaagaaaatcgctgttcagataacgcagaagatagacgagcttgtgcatgaggaatttgaagagctcgcgtctgaaggagaggaattatga

SEQ ID NO: 61388 - protein, 342 aa, Unknown
  Obtained from environmental sample
  DOMAIN (250)...(327): Surface presentation of antigens (SPOA) protein
  misc_feature (1)..(342): Xaa is any amino acid
MTEVLSQDEIDQLLTAINAGESEPEDFRPAADSRKIKIYDFKRPDKFSKEQIRTVSIMHETFARLTTTSLSAQLRSMVHVHVASVDQLTYEEFIRSIPTPTTLAIINMDPLKGNAILEIDPAITFSIIDRLFGGTGEGTKSQHELTDIEQSVMEGIIVRILGNMREAWTTVIDLRPRLGQIDTNPQFAQIVPPTEMVVLVTLETKVGDVEGMMNFCIPYLTIEPIIGKLSAQFWYSSVRRNATTENLNVLKDKLATVDINVTAEIGKINVPVRDVLSLQIGDVIRLYNTRIGDPYSLNIGTRKKFLCRPGIIGKKIAVQITQKIDELVHEEFEELASEGEEL

SEQ ID NO: 61389 - DNA, 786 bp, Unknown
  Obtained from environmental sample
  misc_feature (1)..(786): n is a, c, g, or t
atgagcgatggcgcactttcgcaggatgagatagacgcattattggccggtgtggattcatcgtccggtggcggtcatggcggtcacggcgcgcacgccgcgacaatggcgcctccagccgcctcagccgcggcttttgacgttgactcgcttgaaaagtttttttcttcaactacgggcgctctttcatccaatcttgcggctcttaccggcactacggtaacccttgtcggtcctgaagtccaagccacaacgcgtgacagtatgttaaccctgcttcccggtatggttaccgttgtaaatactaattttacttcgggtttccccggcgagcattgtttcattttttctgaggaatcagccaaggctatcgcaagccttatgactaaagagagcgacattcaacttgatgaaatggcgatgtccgttatcggagaagttgtttctcaaatcgcggggactcaaattaccgctcttaccgataaaaccggaaataaatcaatagcttccgcttctccgaccgcggcaaatgttccaaaagcagcggcggcgcttcctgccggcaatttcgccgttatgacttacggtctggatatgggtgacgggctttcccaccaaatatgggaagttttaggcccgtctccggccgccgatatttcaagtggtttaagcggcaaggctcaatctgcggcgccggcggcggggatgggtggaatgatgaatatgggggggcatgggaatgcaaggaatgggtatggggggaatgggacaaggtatgtcgcctaa

SEQ ID NO: 61390 - protein, 261 aa, Unknown
  Obtained from environmental sample
  misc_feature (1)..(261): Xaa is any amino acid
MSDGALSQDEIDALLAGVDSSSGGGHGGHGAHAATMAPPAASAAAFDVDSLEKFFSSTTGALSSNLAALTGTTVTLVGPEVQATTRDSMLTLLPGMVTVVNTNFTSGFPGEHCFIFSEESAKAIASLMTKESDIQLDEMAMSVIGEVVSQIAGTQITALTDKTGNKSIASASPTAANVPKAAAALPAGNFAVMTYGLDMGDGLSHQIWEVLGPSPAADISSGLSGKAQSAAPAAGMGGMMNMGGHGNARNGYGGNGTRYVA

SEQ ID NO: 61391 - DNA, 954 bp, Unknown
  Obtained from environmental sample
  misc_feature (1)..(954): n is a, c, g, or t
atgtggcttgtctgcgcttgcgcgtttctttgcgttattcaatcggctttcaacgacggcggaaagtcgctgattgtcgctcttacggcgtttttttccgcgttgataattgaattgttatttactcacaaaaaatacggagccgctaaaataaaagacggaagcgccgccgctacggcgatgattctttccatacttttaccgaatcaaatacatcctgttcttgtttttttaggcgtcgccttcgctattgttgttgtaaaatacagttttggcggacttggctcaaactggcttaatcccgcccttggcggctggttgtttattaggttctcatggtcgtcggcttttaacgcgtctaatggttcaacgccttcggtttcagaaatgataataacatccgacataagcgcgtttgatagtccggttacggaatttcttaataattcgatattttccgtagccggcgtacagcttccgtcgggatatatcaatcttctttttaataacaatgcctggttaattacagacagaggtttattttttcttttaataggcactgtaattattaccgcagtagggattaaccgcggctgggttccgttggtttttcttgcggtttacggttttcttgtccgttttgccggcgatttatcgggaatgtattggaacggagatatgttatacggcatattttcggggggcgcgattgcggcggcttttattctcgcggcggaaccggcaagcggcgctaaattaaagcccggaataatatttacgattattttaagcgcgtttctttcatggtttttcaggtacaagtgcatggaatattacggatgctttatcgcccttgctatgacaaattgcataacgcccattgtcaggcttttagaggataaaattattttgttccgtattaatcgcgacagcgtccgggagaattccttatga

SEQ ID NO: 61392 - protein, 317 aa, Unknown
  Obtained from environmental sample
  SIGNAL (1)...(18)
  DOMAIN (1)...(311): NQR2, RnfD, RnfE family
  misc_feature (1)..(317): Xaa is any amino acid
MWLVCACAFLCVIQSAFNDGGKSLIVALTAFFSALIIELLFTHKKYGAAKIKDGSAAATAMILSILLPNQIHPVLVFLGVAFAIVVVKYSFGGLGSNWLNPALGGWLFIRFSWSSAFNASNGSTPSVSEMIITSDISAFDSPVTEFLNNSIFSVAGVQLPSGYINLLFNNNAWLITDRGLFFLLIGTVIITAVGINRGWVPLVFLAVYGFLVRFAGDLSGMYWNGDMLYGIFSGGAIAAAFILAAEPASGAKLKPGIIFTIILSAFLSWFFRYKCMEYYGCFIALAMTNCITPIVRLLEDKIILFRINRDSVRENSL

SEQ ID NO: 61393 - DNA, 1467 bp, Unknown
  Obtained from environmental sample
  misc_feature (1)..(1467): n is a, c, g, or t
atgcgcctcttcatagacgagcacgggctgtcgtgggacgaggcgtgggagatagtgcagaagaccttcgcctacacgaaccacacgctcatgccagaagcgcttgagaagtggtcggttgggcttatgcagcacctccttccgcgccacatggagattatctacgagatcaacgcgggcttcctgcgccaggtctcatacaagttccccggcgacatcgacaggcttcgccgcatgtcgctcattgaggagggcgacgacaagcaggttcgtatggcctatctcgccatcgtcgcgagccactccataaacggcgtcagcgctctgcattcgcaacttttgagcagcgggcttgtccatgacttctacgagatgtggccggagcgcttcaacaacaagaccaacggcgtcacccagcgccgctggctgtacaaagccaacccctccctgcgcaaactcatctcgggaaaaatcggcgacggctgggtgaccgacctctacgatcttaaaaagctggagaagctcgcctccgacaaggcgttccgcaaggattgggctgaggcgaagttcgccgcgaagaaggcctttgtggataagatccacaagtgggaggggataacgatagacccgaacacgatgttcgacgtgcaggtcaagaggatgcacgagtacaagcgccagcttttgaacgtgctccactgcatcgccctctacaataagataaagagcggcgacacgaagaacttcacgccgcgcaccgtgatgttcgcgggcaaggcggcgcccggctactacatggccaagctcatcatcaagttcatcaacaacgtggccggtatcgtcaacaacgacccgtcgaccaagggtctgctgtcggtgcacttcctgcccaactacagggtctcgctggccgagtacgttatccccgccgccgacctatcggagcagatctccactgccggcacggaggctagcggcaccggcaacatgaagttcgccctaaacggagcgctcacgataggcacgatggacggcgccaacgtagagatgcacgaggagatcggcaacgacaacatcttcatcttcggcctgcgtacaaacgaagtggaagccctgcgccgcaacggttacaacccgtgggacttctacaacaacagcccggcgctcaagcaggtcatagacctgatatccagcggttatttcagtccggaggataccgccatgttcaacccgatatacgacactctcatgaagaacggcgacaactacttggtcatggccgatttcgacgcctacgtaaagtgccaagaggacgtggcgaactgctatcgcaaccacgacgagtggacgcggaagtcgatcctgaacgtcgcgagcatgggcaagttctcgtcggatagggcgattgcggaatacgccaaggacatctggggaataaaagcggcggatgttaagttggatatataa

SEQ ID NO: 61394 - protein, 488 aa, Unknown
  Obtained from environmental sample
  DOMAIN (1)...(481): Carbohydrate phosphorylase
  misc_feature (1)..(488): Xaa is any amino acid
MRLFIDEHGLSWDEAWEIVQKTFAYTNHTLMPEALEKWSVGLMQHLLPRHMEIIYEINAGFLRQVSYKFPGDIDRLRRMSLIEEGDDKQVRMAYLAIVASHSINGVSALHSQLLSSGLVHDFYEMWPERFNNKTNGVTQRRWLYKANPSLRKLISGKIGDGWVTDLYDLKKLEKLASDKAFRKDWAEAKFAAKKAFVDKIHKWEGITIDPNTMFDVQVKRMHEYKRQLLNVLHCIALYNKIKSGDTKNFTPRTVMFAGKAAPGYYMAKLIIKFINNVAGIVNNDPSTKGLLSVHFLPNYRVSLAEYVIPAADLSEQISTAGTEASGTGNMKFALNGALTIGTMDGANVEMHEEIGNDNIFIFGLRTNEVEALRRNGYNPWDFYNNSPALKQVIDLISSGYFSPEDTAMFNPIYDTLMKNGDNYLVMADFDAYVKCQEDVANCYRNHDEWTRKSILNVASMGKFSSDRAIAEYAKDIWGIKAADVKLDI

SEQ ID NO: 61395 - DNA, 687 bp, Unknown
  Obtained from environmental sample
  misc_feature (1)..(687): n is a, c, g, or t
gtgcaccgacagcagacccttggtcgacgggtcgttgttgacgataccggccacgttgttgatgaacttgatgatgagcttggccatgtagtagccgggcgccgccttgcccgcgaacatcacggtgcgcggcgtgaagttcttcgtgtcgccgctctttatcttattgtagagggcgatgcagtggagcacgttcaaaagctggcgcttgtactcgtgcatcctcttgacctgcacgtcgaacatcgtgttcgggtctatcgttatcccctcccacttgtggatcttatccacaaaggccttcttcgcggcgaacttcgcctcagcccaatccttgcggaacgccttgtcggaggcgagcttctccagctttttaagatcgtagaggtcggtcacccagccgtcgccgatttttcccgagatgagtttgcgcagggaggggttggctttgtacagccagcggcgctgggtgacgccgttggtcttgttgttgaagcgctccggccacatctcgtagaagtcatggacaagcccgctgctcaaaagttgcgaatgcagagcgctgacgccgtttatggagtggctcgcgacgatggcgagataggccatacgaacctgcttgtcgtcgccctcctcaatgagcgacatgcggcgaagcctgtcgatgtcgccggggaacttgtatga

SEQ ID NO: 61396 - protein, 228 aa, Unknown
  Obtained from environmental sample
  misc_feature (1)..(228): Xaa is any amino acid
MHRQQTLGRRVVVDDTGHVVDELDDELGHVVAGRRLAREHHGARREVLRVAALYLIVEGDAVEHVQKLALVLVHPLDLHVEHRVRVYRYPLPLVDLIHKGLLRGELRLSPILAERLVGGELLQLFKIVEVGHPAVADFSRDEFAQGGVGFVQPAALGDAVGLVVEALRPHLVEVMDKPAAQKLRMQSADAVYGVARDDGEIGHTNLLVVALLNERHAAKPVDVAGELV

SEQ ID NO: 61397 - DNA, 2037 bp, Unknown
  Obtained from environmental sample
  misc_feature (1)..(2037): n is a, c, g, or t
ttgtcgggtgccgatacggttggtaggagtgcggatataaggcgggttttcgactccatacgggtaaacgccgacgggaggccgtgcggtatacagtttggcggcggcgccgccgcggttttggatataggcgaggccggcatatactttgattccaacggttggggcagagtgtccatatccggaaaagtggttggcgggacgttgggtcttgaccaaggcgtgtcgatagagaacagcgcggatatcagcaccagcggcgacatgtatatctattcgggggcggattttacccataagagcgggtacataaaagcgcgcataaccaatgccggtacgctaacgatctccggcggaacggttggggacacgcttagccgccgctacgctattaataacagttcttcgggtgagctcgttattaacggaaccgcgaatatcatatcaagtgactctagcgcaaccggcggaacgatcaaaaacagggggacactggtaatatccggcggaaaggtatctaatgttagttctatcaaccaaagcgtcgccgtcttaaacggcgtagagaaaaccgacactacggccaagaccgtcatatccggcgtggcggaggtctcgagccgagtcaagagccagtatggggtgattcacaaccaaaacgggtctatggagatttccggcggcaaagtctacagcgtgggggacaccgcccaaacggttatcagaaacagcgcccccgccagaatgttgatcaccggagccgccgatatcaaatccgaagcccgcgttatggaatacggggcggtcaccaactactctgttttgagcggcatggattccgcgacggcgtccttggagatatccggcggtaaaatcagcgctaacagcggatatgccgtttacagcgaagacggcgccaagtcgtctatatccggatccgccaatattacctccgcgtacaaaaacggcgccgtctatgtgggcaggtacggatcgcgcttgtatcttttggacggcacggtgtcgtccacgtacgcagtcaaagacagcgcggtaaccgccgtagtcgtattctccggcagtcagggcggttctgcgggcaggcttttcattggcggttcccccacgcttacggggagtatacgctatcaagggagctatgcgggcaacccgataaccgttcaggcgtcaggcgcggcggtgttctctccgggtaccaaaaaatacaacttggctataaaagcttacggggatagcgtcatattgaaaaacggcgcccgctttatccaaagctttgtcttagacaccgccggcaacgccggcatcacgctggccgcgaaaggcaacgacgtcgtggccgttccggccagcgggcaggtatacaccgtgtcgtttagcttgaacggagcgaccggcaccgccgccgccccctcgccgcttttggtggtaagcggcgccaagctcggagaatatgccatgccgtctaccgcgccgtattcaaaaaacggcttcaagaacgacggcgaatggcatatccgcaccggtacgtcaaacggcacggaaatagtaggggaggtatttaagttcagcctcggcgccgacggcacgccgataacaaacgccattacgttaacgctggaatggacgacgataccgatatcggtgctgaactccaaccgcgagatccccgcaacgtcaacccaaaacgctgtcgctatagccccggcggtaatatccgccggcgaacttaccgccggcccgaacccgtcggcgttacagtcaggcaaagtcaatttcttcagaaccggcgcgccgctaaagtccgggaagttaataatctatgacgccgccggcaaaacggtaggtaagataacggtaaacgataacgccgccgccggaaaacgccaagtagcctcttggaacctgaaagacaccaaaggccgccttgtatctgacggtacatacgtggtaaaaggtgtaataaacaccaaggccggtaagtcggagaaagtatcgataatactaggtatacggtaa

SEQ ID NO: 61398 - protein, 678 aa, Unknown
  Obtained from environmental sample
  misc_feature (1)..(678): Xaa is any amino acid
MSGADTVGRSADIRRVFDSIRVNADGRPCGIQFGGGAAAVLDIGEAGIYFDSNGWGRVSISGKVVGGTLGLDQGVSIENSADISTSGDMYIYSGADFTHKSGYIKARITNAGTLTISGGTVGDTLSRRYAINNSSSGELVINGTANIISSDSSATGGTIKNRGTLVISGGKVSNVSSINQSVAVLNGVEKTDTTAKTVISGVAEVSSRVKSQYGVIHNQNGSMEISGGKVYSVGDTAQTVIRNSAPARMLITGAADIKSEARVMEYGAVTNYSVLSGMDSATASLEISGGKISANSGYAVYSEDGAKSSISGSANITSAYKNGAVYVGRYGSRLYLLDGTVSSTYAVKDSAVTAVVVFSGSQGGSAGRLFIGGSPTLTGSIRYQGSYAGNPITVQASGAAVFSPGTKKYNLAIKAYGDSVILKNGARFIQSFVLDTAGNAGITLAAKGNDVVAVPASGQVYTVSFSLNGATGTAAAPSPLLVVSGAKLGEYAMPSTAPYSKNGFKNDGEWHIRTGTSNGTEIVGEVFKFSLGADGTPITNAITLTLEWTTIPISVLNSNREIPATSTQNAVAIAPAVISAGELTAGPNPSALQSGKVNFFRTGAPLKSGKLIIYDAAGKTVGKITVNDNAAAGKRQVASWNLKDTKGRLVSDGTYVVKGVINTKAGKSEKVSIILGIR

SEQ ID NO: 61399 - DNA, 792 bp, Unknown
  Obtained from environmental sample
  misc_feature (1)..(792): n is a, c, g, or t
atgagcctgagaatcaaattaaccgctattatcctggcgatgatcctggcatccgtcgcggttttatccatattcaaccttacacggtcttcagcattgcagttggacacaacccacatttacgcccagacattggcagaactcaacgcaaaggaagtccagcggcaaatggaagtctttacggattacggaaacgtgctcgttcagattttcaacggctatgaagatacggaaatgagcgggcggcggcaaatgtacgacgatgttatgcgcagccttatatcaacagtcgactctattcttggtatctggacagcgtggcttcccgacaccatagatacttatgacgcccggttggggcagtatcaaacatatttccatagaaggaacggccctgtggtaaaagaacccgccggctttgcgggctggcaggatcaactgaagagaataaccccgcaaggacttacttccacaacgggaagagagcctgctttccaggaacttgcggatgttttttgggtagatgtagccggcaggggaagcgtccccgtcgttgccgttatttatacttttacaaacagtaaaggccaaatcataggtctggttggaatcaactttataagcaccgctcaggaaatagttgatggagtggtaaaagaattgtacaacggcgcgggaacagccacaatattcagcgataacgctacaattatagcccattgggacaaggaaagagtcatggataatttaaaaacaaacgacaaggaaaaagcggttttggaaacgatatga

SEQ ID NO: 61400 - protein, 263 aa, Unknown
  Obtained from environmental sample
  SIGNAL (1)...(22)
  misc_feature (1)..(263): Xaa is any amino acid
MSLRIKLTAIILAMILASVAVLSIFNLTRSSALQLDTTHIYAQTLAELNAKEVQRQMEVFTDYGNVLVQIFNGYEDTEMSGRRQMYDDVMRSLISTVDSILGIWTAWLPDTIDTYDARLGQYQTYFHRRNGPVVKEPAGFAGWQDQLKRITPQGLTSTTGREPAFQELADVFWVDVAGRGSVPVVAVIYTFTNSKGQIIGLVGINFISTAQEIVDGVVKELYNGAGTATIFSDNATIIAHWDKERVMDNLKTNDKEKAVLETI

SEQ ID NO: 61401 - DNA, 1638 bp, Unknown
  Obtained from environmental sample
  misc_feature (1)..(1638): n is a, c, g, or t
atgaccggtgaccgaaaaaaaataatcgcggtagacgataacccggaaaaccttctgctgatcaaaaacaccctgaaagaaagctatacggtatttccaaacccatccgcggagggtatgtttgagttattggagcatgtccgtcctgacttaatcatgctggatgtggaaatgccgggaatgaacggttatgaggccataaaacagcttaaaaacgacgacaaaaaccgggaaatccccgttatcttcctgacgagcatgagcgacgcgaaaagcgaaatggaaggcttaaaactcggcgccgtcgattatatcagcaagccctttgtaaccccgttgctgctaaggcgtataaagacccatatatccgtgacggaacataaaagggtaattgaagatctgctgggtttaaaaacacaggaagtcaaactccgcgaaatcgcggaacaggcggcgcaaaacgcgtcccacgccaagagcaacttcctttcccgcatgagccatgaaataagatccccgttaaacgccgttataggcatgataaacatagcgaacgaggaaaaggacgtcgcgcagttaaaagcgtatctcgccaaagcgaacgccgctgcaaaacaggtattgaccgttatcaacaatattcttgatatttccaaaatcgaggcgaataaatttgagctttccgacgctgaatttgattttggaaaaatgatggctaacgttattgactcggcaagcggcggagcccgggataaacggcagaatatcgtccttaacgtctccccgaatattccggcattcataatctgcgatgaattacgcctaacgcaggttattaacaatattatgactaacgcggtaaatttcacacctgaaaacggcaggattcaactgagcgcggaaaaactggaagaaaaagacgtccgcccgcctgcggcggcgccacaggcgggtgagattaccataaaaatggaaattgaggactcaggcataggaatttcgccggaacaacagaaacatctttttaccgcgtacaatcaggcggacggcgcagccgcgaaaaatttcggcagtaccgggcttggcctgttcatcgccaaacggattgtggaactgatgcgcgggacgatacaggttgagtcggaaccgggcaaaggcgcgaaatttatttttaccataaaagcgaaaaagggaacccggaccgcggataaagcagcatcggcgggagcggacataaaagccgccgatttgcatttacagggttataccatattggtcgcggaagacatggatttcaaccgtgaagtcctttccaagtatctggaaaagaccggcgtaaccattgattttgccttcgacggcaaaatagccattgacatgttcaaagagaatccggataaatacaaattgattttcatggacattaacatgccggaaatgaacggggacgaggcggcaaaaataataagggcgcttgacatgaagaaggcaaaggagatccccattatcgccatgacggcggatgtttttaaggaagacatcgataaatgcctggcggccggcatgaacgatcatatccccaaaccggttgcccctaaaactatactaagaaagctcaagcaatacataacaaaataa

SEQ ID NO: 61402 - protein, 545 aa, Unknown
  Obtained from environmental sample
  DOMAIN (158)...(223): His Kinase A (phosphoacceptor) domain
  misc_feature (1)..(545): Xaa is any amino acid
MTGDRKKIIAVDDNPENLLLIKNTLKESYTVFPNPSAEGMFELLEHVRPDLIMLDVEMPGMNGYEAIKQLKNDDKNREIPVIFLTSMSDAKSEMEGLKLGAVDYISKPFVTPLLLRRIKTHISVTEHKRVIEDLLGLKTQEVKLREIAEQAAQNASHAKSNFLSRMSHEIRSPLNAVIGMINIANEEKDVAQLKAYLAKANAAAKQVLTVINNILDISKIEANKFELSDAEFDFGKMMANVIDSASGGARDKRQNIVLNVSPNIPAFIICDELRLTQVINNIMTNAVNFTPENGRIQLSAEKLEEKDVRPPAAAPQAGEITIKMEIEDSGIGISPEQQKHLFTAYNQADGAAAKNFGSTGLGLFIAKRIVELMRGTIQVESEPGKGAKFIFTIKAKKGTRTADKAASAGADIKAADLHLQGYTILVAEDMDFNREVLSKYLEKTGVTIDFAFDGKIAIDMFKENPDKYKLIFMDINMPEMNGDEAAKIIRALDMKKAKEIPIIAMTADVFKEDIDKCLAAGMNDHIPKPVAPKTILRKLKQYITK

SEQ ID NO: 61403 - DNA, 1212 bp, Unknown
  Obtained from environmental sample
  misc_feature (1)..(1212): n is a, c, g, or t
atgatgggagggacaatttccgcggaaagcgagtatggtaaaggcacgacattccgtttacgctttcggcaaggttttgtcaacgagaagcctatcggagcggatgtctcgagaagactccgtgaattctgctataccgataacaaacgcattgtcaacaaaagactggtacggtccaatttgagctacgccagggtgctggtggtagacgatatgcagactaacttggatgtggcggtgggttttttacgctattacaagatggagattgactgcttagacaacggacaggcagcggttgaccggatacgcgatgggataccggtgtacagcgccatattcatggaccacatgatgcccgggatggacggcattgaggcggcggaggcaatccgcgaaataggcacagattacgcgcggaagataccgataatcgccctgacggccaatgccatccatggaacagaagagatgttttatgagcatggctttcaggcatttatatccaaaccaatcgacataatggagatggattcggttatcaggaaatgggtacgtgatgattcccatggaaatttggctattcgtgatacgccggaatccggcggatcttccgtgactgatgttccttctgatagtacggtgatagatataccgggagtaaatacgaaaaaagggctttctcagtgcgcgggtatgatgaatctttatctgccgcttctacgttcctatactgtcaacacgccgggaattctggacaaattgcggactgtttcggtggagaccttgtctaactatgtgattaccgtacatggacttaaaggcaccagcgcgggtataggggcggaagggatacgcgaagcggctctggaactggaaaacaagtccagggccggcgacctgcagggcgttttggctaaaaacaacaaactcattgccgatgcggaagtgatcgtgtcgaatataaaagcgtggctggagcaaaacgacgttcacgaggcaaaaccgcgtcttaaagcccccgacagggaacttcttttgaaactcagggaatgctgtgaaaattacgatattgatggcattgaggaaattatgtcggcgctggaaagctccgactacgaggaagacggcggtttggtaaaatggatacgtgaaaaaattgatatatccaaaatgaacgaagtggcaaaacggctggaagaggtagcgtaa

SEQ ID NO: 61404 - protein, 403 aa, Unknown
  Obtained from environmental sample
  DOMAIN (239)...(314): Hpt domain
  misc_feature (1)..(403): Xaa is any amino acid
MMGGTISAESEYGKGTTFRLRFRQGFVNEKPIGADVSRRLREFCYTDNKRIVNKRLVRSNLSYARVLVVDDMQTNLDVAVGFLRYYKMEIDCLDNGQAAVDRIRDGIPVYSAIFMDHMMPGMDGIEAAEAIREIGTDYARKIPIIALTANAIHGTEEMFYEHGFQAFISKPIDIMEMDSVIRKWVRDDSHGNLAIRDTPESGGSSVTDVPSDSTVIDIPGVNTKKGLSQCAGMMNLYLPLLRSYTVNTPGILDKLRTVSVETLSNYVITVHGLKGTSAGIGAEGIREAALELENKSRAGDLQGVLAKNNKLIADAEVIVSNIKAWLEQNDVHEAKPRLKAPDRELLLKLRECCENYDIDGIEEIMSALESSDYEEDGGLVKWIREKIDISKMNEVAKRLEEVA

SEQ ID NO: 61405 - DNA, 747 bp, Unknown
  Obtained from environmental sample
  misc_feature (1)..(747): n is a, c, g, or t
atgaccgtcagacggcttgaacacaaactgggcatccacggctccccgacttgcgagctgcaattcaacaacgcgcccgcagagcttctgggcgagcgacagagaggcctcaccaagtacaccctgtggctcatgaacaacgcccgtctcggcgtggctgcccaggcggtgggtatcgcggaagcggcctaccgtgaagccgacctttacgccgcaaagcgcatccagttcggcgcgcctgtgcgcgatctcccggcggtttttgaaatgctcacggaaatgaagatcgccgtcgaagcggggcgcagcctcctctacgaaaccgcccgtttcgttgacctgaaggaagcgctggaggattattccgaaaagcacccggaagacaaaagcgagataatggaagataaaaagaaatacgcgaaatacgccgggttcttcactccgctggttaaaggttacgccactgaaatggctaacaaggttgccaatgacgctattcaaatccatggcggcacaggctacatgaaagagttcaacgccgaacgccattacagggacgccaggatcaccaacatttatgagggaaccacccagcttcaggttgttgctgccatcgggcctgtaacttcaggcatagcccaggccgttctggacgaatacgacagggcaaactacaaccacagccctgctttgcttgagaaagtccgcgaagcccgcaagtttttgaagaagcctcggccgatctga

SEQ ID NO: 61406 - protein, 248 aa, Unknown
  Obtained from environmental sample
  DOMAIN (50)...(198): Acyl-CoA dehydrogenase, C-terminal domain
  misc_feature (1)..(248): Xaa is any amino acid
MTVRRLEHKLGIHGSPTCELQFNNAPAELLGERQRGLTKYTLWLMNNARLGVAAQAVGIAEAAYREADLYAAKRIQFGAPVRDLPAVFEMLTEMKIAVEAGRSLLYETARFVDLKEALEDYSEKHPEDKSEIMEDKKKYAKYAGFFTPLVKGYATEMANKVANDAIQIHGGTGYMKEFNAERHYRDARITNIYEGTTQLQVVAAIGPVTSGIAQAVLDEYDRANYNHSPALLEKVREARKFLKKPRPI

SEQ ID NO: 61407 - DNA, 570 bp, Unknown
  Obtained from environmental sample
  misc_feature (1)..(570): n is a, c, g, or t
atggaaaattttttaaccgataacgaagatattctgttccagctggaacatcttgatctggatcgcatcattcatctgaaagaagaaaacttcagccaggcgaagctgtacccccacgcccccaaggacgccgaggacgcgaaagattcgtaccgcatggtgctgaacatcatcggcgggatcgcgggcgagtttatagcgcctaacgcgcctgctgttgacgaaatcggccccaccctggcgaacaaccaggtaacccttcacccagcgacccgaaaggcgctggatatgctggcaaaagccgacatgatgggtttcgtcattccccggaagtacggcggccttaatatgcctaacacgatcctcagcatcgcggcggagatagtcgccagggcggacgcttcgtttctcaatttcggcctgcagcaggacaacgcgggaacgatcaacaaattcgcctcggaggatcagaaagaaagatacttaccgaaactctgttcgggcgaatgggattccgcgatggttctcaccgaaccggatgcggggagcgatcttcagtcggtgaactga

SEQ ID NO: 61408 - protein, 189 aa, Unknown
  Obtained from environmental sample
  DOMAIN (48)...(169): Acyl-CoA dehydrogenase, N-terminal domain
  misc_feature (1)..(189): Xaa is any amino acid
MENFLTDNEDILFQLEHLDLDRIIHLKEENFSQAKLYPHAPKDAEDAKDSYRMVLNIIGGIAGEFIAPNAPAVDEIGPTLANNQVTLHPATRKALDMLAKADMMGFVIPRKYGGLNMPNTILSIAAEIVARADASFLNFGLQQDNAGTINKFASEDQKERYLPKLCSGEWDSAMVLTEPDAGSDLQSVN

SEQ ID NO: 61409 - DNA, 453 bp, Unknown
  Obtained from environmental sample
  misc_feature (1)..(453): n is a, c, g, or t
gtgaatatctccgtgaagcttgggacggaagatttccccagcgaaataattgatcgggtaatggaagaaaaaaccgtcaacctcaagggcgcacagatcattgtatcaggcggcataggcgtggggagcaaggacaatttcgcgcttataagggagcttgcggaaaccctcggcgcggaagttggcgcttcccgtgcggcggtggacgcgggcttcatcggcaaggagcaccaggtcgggcagacgggaaccaccgtcaggccgaagctctacgtagcctgcggtatttcaggcgcgattcagcaccgcgcgggcatggacaattccgcccgtatcatcgcgatcaacagcgatccggaagcgccgattttcagcattgcccattacggtatcgtgggagacctgaacgaggttatcccccggatgataaaagcgtacaaggccagagtgtag

SEQ ID NO: 61410 - protein, 150 aa, Unknown
  Obtained from environmental sample
  DOMAIN (25)...(110): Electron transfer flavoprotein FAD-binding domain
  misc_feature (1)..(150): Xaa is any amino acid
MNISVKLGTEDFPSEIIDRVMEEKTVNLKGAQIIVSGGIGVGSKDNFALIRELAETLGAEVGASRAAVDAGFIGKEHQVGQTGTTVRPKLYVACGISGAIQHRAGMDNSARIIAINSDPEAPIFSIAHYGIVGDLNEVIPRMIKAYKARV

SEQ ID NO: 61411 - DNA, 345 bp, Unknown
  Obtained from environmental sample
  misc_feature (1)..(345): n is a, c, g, or t
gtggaaagcgctcaggatatgcgcataatagaagaagcgcatgaattccccggtgtttatcatgttcttgggggattaatcgcccctctggacggaatagggcctgcaaatctttctattaataaacttatggatcgccttcacagcgatcatgtcaaagaacttatccttgccctgaatcctaccgttgaaggcgatacaacggcgttatatctgcaaaaacagcttaaaaatttgcccataacggttacgcgccttgcgtcaggaatgcccgtcggcggaaatattgaatatattgacaagcttacgttattacgcagtttacgcgggcgtgtaaaaatataa

SEQ ID NO: 61412 - protein, 114 aa, Unknown
  Obtained from environmental sample
  DOMAIN (1)...(89): Toprim domain
  misc_feature (1)..(114): Xaa is any amino acid
MESAQDMRIIEEAHEFPGVYHVLGGLIAPLDGIGPANLSINKLMDRLHSDHVKELILALNPTVEGDTTALYLQKQLKNLPITVTRLASGMPVGGNIEYIDKLTLLRSLRGRVKI

SEQ ID NO: 61413 - DNA, 984 bp, Unknown
  Obtained from environmental sample
  misc_feature (1)..(984): n is a, c, g, or t
atgttttccgccatagtaaatatatggctgtcgccgacattaaggagagccgctttaatccgccgtattctgccggaagcgaatatcgtaataatttatcagccctcggcggcggatatcgaagaaattgtatctggagggtataccgtttccgtaagtaatttggattttgcgaagacattgaatgaagaagcggaaaaacatcaaaaaaagataaaaattcatattgaagttgataccggagcgggaagattgggattaaacgtaagcgaatgctgtgggtttgcccaatcaataaaagcattaaacaacatagttacggaaggcgtttttatgcattatgcctgcgcggacagttttgacaaaagcgatctggaatttacaaaaaaacagacggatttgttcaaaaaggctgtaaacgatattgaaggtgttttaggcgtcattccgtacaagcacgcctgcgccggagccgcgatttttaaccaaaacgccgctcattataacatggtgcgtcccggatacatgatctacggctattacccaagcgaggcgcttcgaagcaaaatccttttaaaacccgtgttaaaatttgtttccgtaattcttcaaattaaagagtacgaaaaaggaacgcctattagttataacagaagatttgttacaaagcggaaaagcaggatagctgttgtttcagccggctattcggacggcattagccgtaaattgtttaatcctaaaaataaaaaaaacggctgttttgccgtaaacggacaacgcgcccccattgtaggaacagtctgcatggaccttacaatgatagatattaccgatattaaaggcgacgtaaacgtaggtgatgaagccgctatttttgacaatgtaaatgtaactatcgaagaaatggcctctatctgcggcacaataggctatgagattatctcgcagatagaggataaagcagacagggtggagagtttttaa

SEQ ID NO: 61414 - protein, 327 aa, Unknown
  Obtained from environmental sample
  DOMAIN (3)...(183): Alanine racemase, N-terminal domain
  misc_feature (1)..(327): Xaa is any amino acid
MFSAIVNIWLSPTLRRAALIRRILPEANIVIIYQPSAADIEEIVSGGYTVSVSNLDFAKTLNEEAEKHQKKIKIHIEVDTGAGRLGLNVSECCGFAQSIKALNNIVTEGVFMHYACADSFDKSDLEFTKKQTDLFKKAVNDIEGVLGVIPYKHACAGAAIFNQNAAHYNMVRPGYMIYGYYPSEALRSKILLKPVLKFVSVILQIKEYEKGTPISYNRRFVTKRKSRIAVVSAGYSDGISRKLFNPKNKKNGCFAVNGQRAPIVGTVCMDLTMIDITDIKGDVNVGDEAAIFDNVNVTIEEMASICGTIGYEIISQIEDKADRVESF

SEQ ID NO: 61415 - DNA, 954 bp, Unknown
  Obtained from environmental sample
  misc_feature (1)..(954): n is a, c, g, or t
gtgaatattcaggcggatgataatccttcgtcttttgatgttatttataaagaacagtcttattcgtgctcgctgccgtcaatcgggaggcacaatgtaaataacgctctttttgcgcttttttgcggcataaaacttggcatagacataaaggaagcgatagatgaaattaagcggtttactgtttcttcgatgcgtacggaagtcgcctatgttaaaggcattacgataataaaagattattataacgccagccccgattccgtatgcgccgcgctggaagttctttcaaattatccatcatcaggaaagaaaatcgccgttttgggtgaaatgtttgagttaggcgatttcagcgtaacggagcatgtaaatctggctaaaacgtgcaatgattttaaaattgattatatgttttttatcggcgaggattatgaatgtgttaaaaaagaattaataaacggggaatgtttcagcgaccgcgaaagagacgctttttcaaaatcaataaaaaattatatagcgggcggtaacttaaataaaggcgatattatccttataaaaggctcaagaggaatgaagatggaggagttctatgagccgcttaaaagttatatcaacgctgcaatgagcgacgccactcatctgcctcccagcgcgacaaaattgtatgttgatataaacgctgttaaattcaattattcccagataaaaaaagaagtcggcagtcaggtagaaataatgcctatggtaaaagcaaacgcttacggctgcggaacggatattatcgcaaatgttttccgccatagtaaatatatggctgtcgccgacattaaggagagccgctttaatccgccgtattctgccggaagcgaatatcgtaataatttatcagccctcggcggcggatatcgaagaaattgtatctggagggtataccgtttccgtaagtaa

SEQ ID NO: 61416 - protein, 317 aa, Unknown
  Obtained from environmental sample
  DOMAIN (63)...(151): Mur ligase family, glutamate ligase domain
  misc_feature (1)..(317): Xaa is any amino acid
MNIQADDNPSSFDVIYKEQSYSCSLPSIGRHNVNNALFALFCGIKLGIDIKEAIDEIKRFTVSSMRTEVAYVKGITIIKDYYNASPDSVCAALEVLSNYPSSGKKIAVLGEMFELGDFSVTEHVNLAKTCNDFKIDYMFFIGEDYECVKKELINGECFSDRERDAFSKSIKNYIAGGNLNKGDIILIKGSRGMKMEEFYEPLKSYINAAMSDATHLPPSATKLYVDINAVKFNYSQIKKEVGSQVEIMPMVKANAYGCGTDIIANVFRHSKYMAVADIKESRFNPPYSAGSEYRNNLSALGGGYRRNCIWRVYRFRK

SEQ ID NO: 61417 - DNA, 876 bp, Unknown
  Obtained from environmental sample
  misc_feature (1)..(876): n is a, c, g, or t
ttgtacattgtcccattatcgtattataatttttttaagaaaaagtcaatataccgcgctgaggttgaatttttggagaaaaaagcgtttttctttcaggggtcatcgttattacttactgaagaccagcctgcctgcgggatggactgggaaatacccctgcaccatgccgataatttcctgccgtcgaaatctgaggtcgagcaagcgactttcacagacggcggattttacagcgtatcaatcaaaccgggaatcccgctaccgccccactggcaggcgatccccgtacgccaggccatctccctgctttcaggaagcgcggcaaacggctccatccaaagcagccgaatgttacgggcctttcatataacccaatggcggcaggaatcccgtttctgcggaagctgcggggcaaggaacacctgggcctccgacgaactggcccgtctctgccctgtctgcggacggctggaatacccccgtatagccccggcggtcatcactctcattatcaatgacgaagacaaggcgttgcttgcccacaacagcaaattcacctccagagtatacagccttattgcgggatttgtcgaagccggagaaaaccttgaaggggccgtggccagggaaatccgcgaagaggtggatattgaagtgcgcgacatacggtacattgtttcacagccctggcccttccccaattccctgatggctggcttctcggcccgttatgcgtcggggacaatcagacccgacggcgttgaaattgaagacgcgcagtggttcagccgcgacaatctgcccatgctgcccgccccgggctccgtgtcgcgctgccttattgagcaatggcgggaaaaaattaggaattag

SEQ ID NO: 61418 - protein, 291 aa, Unknown
  Obtained from environmental sample
  DOMAIN (163)...(284): NUDIX domain
  misc_feature (1)..(291): Xaa is any amino acid
MYIVPLSYYNFFKKKSIYRAEVEFLEKKAFFFQGSSLLLTEDQPACGMDWEIPLHHADNFLPSKSEVEQATFTDGGFYSVSIKPGIPLPPHWQAIPVRQAISLLSGSAANGSIQSSRMLRAFHITQWRQESRFCGSCGARNTWASDELARLCPVCGRLEYPRIAPAVITLIINDEDKALLAHNSKFTSRVYSLIAGFVEAGENLEGAVAREIREEVDIEVRDIRYIVSQPWPFPNSLMAGFSARYASGTIRPDGVEIEDAQWFSRDNLPMLPAPGSVSRCLIEQWREKIRN

SEQ ID NO: 61419 - DNA, 1449 bp, Unknown
  Obtained from environmental sample
  misc_feature (1)..(1449): n is a, c, g, or t
atgaacgatattgtcgaacgtatttcaaaggtaaaggatactgtcaaaaaattaaatctgaataatcagcaagccctgacggaaattcccgatattataaaagaatgtaaacttattgaagaactgaatatttcacacacaaaaatcactaaaattcccgattttatctttgctctgcccgccctgcgcgtactctcctgctgctgcaaggaagttcccaaaccgcctgagggtcttgccaaagcggtaaaactggaaaaattgcacatcaggattaatgaaagttgggggtttcccaaggaaatgtcgtcattaagcgaacttaaaattcttttaattgatatatattccccgtcggcttttttaaaagatttaaagaatttaaataagcttgaaacgctgtcattgtcaattaaatacgataaaggcgccgcgttaagcctgcccgactctttcttaaatcatcctacgttaaaaagtttcaatatggttgataacgtttacaagaactataaacttttagatttcgaccatacggcgcgtatactttcttcatgcaaagcgcttgaatcccttacgctttcctgttttacaattaaaaaacataatgagcttgcaaaaattacacagcttaaaaaattggaactgcggcatttgcttgtagagggaaatatttttgattcgataccgtctttgaaaaatcttgaaagactcggcatcatgggcagcgaattcaaaatagccgaattgccggacatattcggcaacttgaaaggattgagctttttttcatttgccggcaattttattcggaaacttccgccgtctctgtttaccttaaacaatcttgcaacgctggaaataggcgcgaccggaatcacctcaatagatgataaaataggggatctgaaaaatttgaccacccttcatatttacgacaatatgctggaaaagcttcccaacagtatttttaccctgcctaagcttgccgttcttaatatcgaagaaaacttttttaaacagcaggatataaacgccataaaacaaaaactaagcgccatgtataagagcggtcaaaaaatagaatttatatgcagcgggcagggacataggcttcccgtaaaaaaattacgcactcttaatttttttgaatcgattaacagcgaagtttattttaaatactgcatggcggcggtgtccgaaaaaccaaacgctcttaaatatatcaaagacagtttcttaaaagataacgagtacatacaggtttgccttgaagccgctcttcgcaactcatacgctgattttcttatcaacataaaccacaaacgcctgaaacgcgaagactacgagcgcatctgctgggcgtctattttgcaccttcccgcgactatttccaagatgtttgagcctacgaaggaattgcaggcgcttgcggggaaacatccttag

SEQ ID NO: 61420 - protein, 482 aa, Unknown
  Obtained from environmental sample
  misc_feature (1)..(482): Xaa is any amino acid
MNDIVERISKVKDTVKKLNLNNQQALTEIPDIIKECKLIEELNISHTKITKIPDFIFALPALRVLSCCCKEVPKPPEGLAKAVKLEKLHIRINESWGFPKEMSSLSELKILLIDIYSPSAFLKDLKNLNKLETLSLSIKYDKGAALSLPDSFLNHPTLKSFNMVDNVYKNYKLLDFDHTARILSSCKALESLTLSCFTIKKHNELAKITQLKKLELRHLLVEGNIFDSIPSLKNLERLGIMGSEFKIAELPDIFGNLKGLSFFSFAGNFIRKLPPSLFTLNNLATLEIGATGITSIDDKIGDLKNLTTLHIYDNMLEKLPNSIFTLPKLAVLNIEENFFKQQDINAIKQKLSAMYKSGQKIEFICSGQGHRLPVKKLRTLNFFESINSEVYFKYCMAAVSEKPNALKYIKDSFLKDNEYIQVCLEAALRNSYADFLININHKRLKREDYERICWASILHLPATISKMFEPTKELQALAGKHP

SEQ ID NO: 61421 - DNA, 1185 bp, Unknown
  Obtained from environmental sample
  misc_feature (1)..(1185): n is a, c, g, or t
ttgcgacttgtcccaaatccaacacaacaatggcgtactttgaccgctcttaaagaagtggaacgcgaagacgcggaagttccaaaccacttgcgcgacgcaagccgcgacaaagaaagtttcggccacggagagggctatgtctatcctcacgcctaccgggaccactgggcggcccaacagtaccttcccggcgcgcttaagggcagaactttttacattccgtcccaagtcggctacgagggaaaaatttgtcaggatgttttacaaaagcgcgaactgcaggcggccattgtctttggagacaatcaggaactggcgggggaactgctttcatggtcgcaggcggcaaaggggcgtgaaggctggtacaagcgccttgaatcaggaaggagcgccctgcttctgcgcaacagggacacaatttttacaacagcgtccccgaaccgccaggggcgcgtcttaattcctaacgccaacgacggccttctgctgtgggagagtctccgccgctgtcccgaaggactgacagccgcacttgtaaacacccccgccgccggagacgctctattgcgttatgcgcaaacactggacgaagccgaaaagccgctgattgccgtaacggaagatttactgccttccgtgaaacagtgcgaggaatggttttcctgctccgtgtttgaccatattcttataaaatgttcccgcttttcttcggagccgtctcaagccgcggttaacgcaaagccgctattggcaaaaaacggcaatctggtcctgtttttctctccgccgcgttacggcgagcgcatttcccgcatcctcgcggacgaatgtaaggagagcgaattagccgtcaaacttgagcaggcggaaaaagcgttcttcggcggcagcgaggttacgggcttttgggatgaggaagctttatccgccgcctttgaaaaagagggtttttccgtcaatattcaaacacttgaccaaagcgaggagcgccttatcaccgaaaaagacctgtccgcgtggtttaacacagaacaatcccgctggggctcatttatgtcaaaaacactggaaaaacacgattttgaagccattaaagaggcgttaaggttaagaataacccaggggccgataatgtggctttggaaaagtgtttgttttaaagctgactcgcgcggctag

SEQ ID NO: 61422 - protein, 394 aa, Unknown
  Obtained from environmental sample
  misc_feature (1)..(394): Xaa is any amino acid
MRLVPNPTQQWRTLTALKEVEREDAEVPNHLRDASRDKESFGHGEGYVYPHAYRDHWAAQQYLPGALKGRTFYIPSQVGYEGKICQDVLQKRELQAAIVFGDNQELAGELLSWSQAAKGREGWYKRLESGRSALLLRNRDTIFTTASPNRQGRVLIPNANDGLLLWESLRRCPEGLTAALVNTPAAGDALLRYAQTLDEAEKPLIAVTEDLLPSVKQCEEWFSCSVFDHILIKCSRFSSEPSQAAVNAKPLLAKNGNLVLFFSPPRYGERISRILADECKESELAVKLEQAEKAFFGGSEVTGFWDEEALSAAFEKEGFSVNIQTLDQSEERLITEKDLSAWFNTEQSRWGSFMSKTLEKHDFEAIKEALRLRITQGPIMWLWKSVCFKADSRG

SEQ ID NO: 61423 - DNA, 1131 bp, Unknown
  Obtained from environmental sample
  misc_feature (1)..(1131): n is a, c, g, or t
gtgattgacgtgtttttccccctgtccaaaggcggcacggcggcgatacccggcggcttcggcacgggcaagaccatgacccagcacgccatcgccaaatggtgcgacgcggatgtgattatttacatcggctgcggcgagcgcgggaacgagatgacggacgtcctcaccgaatttccggaactgcaggatcctcgcacgggacgcagccttatggaacggactttgctgatagccaacacttccaatatgccggtggccgcgagggaagtttcaatttataccggcgtaacgctcgccgaattctaccgcgatatgggctaccatgtcgccatcatggcggactcaaccagccgctgggcggaggccctgcgcgagctttccggccgcatggaggaaatgcccgcggaggaaggcttccccgcgtacctacccacccgccttgccgaattctacgaacgcgcgggccgcgtctccaccctttcaggcgctgaaggctcagtctcgattatcggagcggtctctccgccgggcggcgatttttccgagccggtaacccagcacaccaaacgctttatccgctgcttttgggctttggaccgcgatcttgccaatgcccgccattacccggcgataagctggacggacagctattccgagtacgccgaggaagtacggccctggtgggaacgggtgaacgcaatctgggcgacagtgcgcaaccagtgccttgaactgctcaagagcgatcaaaaacttacggagattgtccgcctcatcggccctgacgccctgcccgacgagcaaaaacttgtccttgtcacctcggacattatcaaagacggctatttacagcagaattcatttgacgaagttgatatgtactgcgtcccggcgaaacagatccggctcctggaactgataatggaattccacgagcgcgcgagaacctgcatcaaactgggagcgcccctcaccaaaatttccgtattgggattaaaggaaggcctgtccaggcttaaaagcaccgtaaagaatgacaatctcggcgaatttgacacattcgcggcaaaaatgcgtacccagcttgaagagctggaacgcagctaccgcacgcgggaagtgctgtaa

SEQ ID NO: 61424 - protein, 376 aa, Unknown
  Obtained from environmental sample
  DOMAIN (237)...(368): ATP synthase alpha/beta chain, C terminal domain
  misc_feature (1)..(376): Xaa is any amino acid
MIDVFFPLSKGGTAAIPGGFGTGKTMTQHAIAKWCDADVIIYIGCGERGNEMTDVLTEFPELQDPRTGRSLMERTLLIANTSNMPVAAREVSIYTGVTLAEFYRDMGYHVAIMADSTSRWAEALRELSGRMEEMPAEEGFPAYLPTRLAEFYERAGRVSTLSGAEGSVSIIGAVSPPGGDFSEPVTQHTKRFIRCFWALDRDLANARHYPAISWTDSYSEYAEEVRPWWERVNAIWATVRNQCLELLKSDQKLTEIVRLIGPDALPDEQKLVLVTSDIIKDGYLQQNSFDEVDMYCVPAKQIRLLELIMEFHERARTCIKLGAPLTKISVLGLKEGLSRLKSTVKNDNLGEFDTFAAKMRTQLEELERSYRTREVL

SEQ ID NO: 61425 - DNA, 579 bp, Unknown
  Obtained from environmental sample
  misc_feature (1)..(579): n is a, c, g, or t
gtgttagagggcaaggtaaagcggatttccggccccataatccgcgcgacagggctgggcggagccggcctgtttgacgtggttgaagtcggtgaaaaacgaatcatcggcgagattgtccggcttgagggcgaggaagcggtggtacaggtctacgaggataataccggcctgcaaaccggcgcccccgccatctccaccgggcggcctctttccgtgctgctcggccccggactgattggcagcatttatgacggcatacagcggcccctggaattactgtacaataaaagcggggccttcatgaccccgggcgaacgcggggatcccctggattcgaaaaaaaaatggcgctttgtcccggacgcgttgttaaaagaaagactcgcgaaaggcgagaaagtcccggcgacggcgggactggtgctcggatcgatacaggaaacgcaaagcgttatatgtaaaataatggtcccgcccggcgttaaggcggcgatatttcctccctcaatccggaaggcgattacacggttcttgacgacgcggcaaaaacaagcctcggcgaagccataccgatag

SEQ ID NO: 61426 - protein, 192 aa, Unknown
  Obtained from environmental sample
  DOMAIN (6)...(68): ATP synthase alpha/beta family, beta-barrel domain
  misc_feature (1)..(192): Xaa is any amino acid
MLEGKVKRISGPIIRATGLGGAGLFDVVEVGEKRIIGEIVRLEGEEAVVQVYEDNTGLQTGAPAISTGRPLSVLLGPGLIGSIYDGIQRPLELLYNKSGAFMTPGERGDPLDSKKKWRFVPDALLKERLAKGEKVPATAGLVLGSIQETQSVICKIMVPPGVKAAIFPPSIRKAITRFLTTRQKQASAKPYR

SEQ ID NO: 61427 - DNA, 1179 bp, Unknown
  Obtained from environmental sample
  misc_feature (1)..(1179): n is a, c, g, or t
gtgaaagaaaaaaaaatatttttaattcttggctctcacgcccatgttccttccggggcaagcgaaaaagaatttcaatatgtatatgaaaataaaatccgcccctttatttcaactttataccgttactcgaatatacaggctgtgcttcattattccggcgtcctgctttattgggtagagcgcaaccatcctgaattttttttattaattgaggatatggtaacgagaaaacaggccgatattttaagcggcggtttttatgagcctatgctgccgttaatcccgttacaggacagaatagggcagatagagcttatgacaacctatcttcgcaagcatttcggtaaacgtcctcttggctgctggatacccggcatgatatgggaacagcatttagcggccgcccttgccgccagcgacatgcagtacacttttctctctcaggatcaatttatacaggccggactttcgggaaaagacctttatttcccatgcatcagcgaagatcagggaaaactgattaccgtttttcctgtttcaatgtcggtgcaggaggtattggcgcaaaaaagcgcgtctcaggtttttattgaaatgaaaaacacgattactgaaaaaaccgcgttttcatcggacattataatgacggttttccccgagaaacctttttccgatccgcaggaagcgcaggaaaccgcgtggaaccgtttttttgaagaactttccctttccaaagattttgcagaaactatattgccgttaaaagtaataaaggcaaataaattttttaaaaaagccagctttcccaattcatcgtcattggaaaataatttttctccgcgccgctttcttattgaacattgcgaggcaaacggcatttattcaaaaatgatttttacaagcgttcttgttaaccagttaaagggagacaaatacagaaagcagaacgcgagggaagaactctggaaagcccaggactcctgcctgtttgttcccggaaacggattcttgcgccacgagcttcgcaaggcggcgtacagttctcttttgcgcgccgaaaggctgtccagagaaaagggaaggtttgtttcatcgcttgttcagcatgattttgatcttgacggcgttaaagaatatttatttcaggacgcaaggataaactgttacattcagtaa

SEQ ID NO: 61428 - protein, 392 aa, Unknown
  Obtained from environmental sample
  SIGNAL (1)...(14)
  DOMAIN (9)...(267): Glycosyl hydrolase family 57
  misc_feature (1)..(392): Xaa is any amino acid
MKEKKIFLILGSHAHVPSGASEKEFQYVYENKIRPFISTLYRYSNIQAVLHYSGVLLYWVERNHPEFFLLIEDMVTRKQADILSGGFYEPMLPLIPLQDRIGQIELMTTYLRKHFGKRPLGCWIPGMIWEQHLAAALAASDMQYTFLSQDQFIQAGLSGKDLYFPCISEDQGKLITVFPVSMSVQEVLAQKSASQVFIEMKNTITEKTAFSSDIIMTVFPEKPFSDPQEAQETAWNRFFEELSLSKDFAETILPLKVIKANKFFKKASFPNSSSLENNFSPRRFLIEHCEANGIYSKMIFTSVLVNQLKGDKYRKQNAREELWKAQDSCLFVPGNGFLRHELRKAAYSSLLRAERLSREKGRFVSSLVQHDFDLDGVKEYLFQDARINCYIQ

SEQ ID NO: 61429 - DNA, 423 bp, Unknown
  Obtained from environmental sample
  misc_feature (1)..(423): n is a, c, g, or t
ttggaacgtatctatcaggaagggattctcgcggtaatcgcgggacggcccaattccggtaagtccagccttttcaatatgttgctgaaagaagaacgttccattgtcacagaggttcccggtacgacccgcgactggattgaggcatgggtttccattgaaggcataccggtgcgccttaccgacacggccggcctcagggactcttccgatcaggttgagaaaatcggcgtggaacgcagccgcgatttactggaagccgccgatcttgttctgtacctcattgacggcgaagcgggcattacagacgaggataccgcgttaactgaaaagctgacaataccccgccttgtcgtttggaacaagaccgacataacccccgcgccggaagggcttctcgccgtaagcgcgaaaaaccggtga

SEQ ID NO: 61430 - protein, 140 aa, Unknown
  Obtained from environmental sample
  DOMAIN (9)...(124): GTPase of unknown function
  misc_feature (1)..(140): Xaa is any amino acid
MERIYQEGILAVIAGRPNSGKSSLFNMLLKEERSIVTEVPGTTRDWIEAWVSIEGIPVRLTDTAGLRDSSDQVEKIGVERSRDLLEAADLVLYLIDGEAGITDEDTALTEKLTIPRLVVWNKTDITPAPEGLLAVSAKNR

SEQ ID NO: 61431 - DNA, 558 bp, Unknown
  Obtained from environmental sample
  misc_feature (1)..(558): n is a, c, g, or t
atgcaaatagagacaaagagcggcgttaaaaaactttatctttccacacggaacgaaacggtatcatccgtcaaggttgatatgggacgcgccaaattgcgcccccaggatatacccgtaaaattaaccggggaaagcgtaattaaaagtaaagcgactatagggggcgcggagtacgagcttacctgtgtttccatgggcaaccctcacgccgtggtattttgtaataaccttgacggtcttcagttagatgaaataggccccctgtttgaaaacgatccgctttttcccgaccgggttaacgctgaatttgtcaatgttgtggacagaaaccatctggaaatacgcgtatgggaacgcggaagcggtgaaacgcaggccagcggaaccagcgcctgcgcctccgctgtggccgccgtcttaaacggacactgcgacaaggatacagatataagggtacggttacccggcggagagcttattgtcaattacactgacgatgtggtatggcttacaggcgattgcgtaaaggtgtttgacggaaccgtggaaatataa

SEQ ID NO: 61432 - protein, 185 aa, Unknown
  Obtained from environmental sample
  DOMAIN (62)...(178): Diaminopimelate epimerase
  misc_feature (1)..(185): Xaa is any amino acid
MQIETKSGVKKLYLSTRNETVSSVKVDMGRAKLRPQDIPVKLTGESVIKSKATIGGAEYELTCVSMGNPHAVVFCNNLDGLQLDEIGPLFENDPLFPDRVNAEFVNVVDRNHLEIRVWERGSGETQASGTSACASAVAAVLNGHCDKDTDIRVRLPGGELIVNYTDDVVWLTGDCVKVFDGTVEI

SEQ ID NO: 61433 - DNA, 2097 bp, Unknown
  Obtained from environmental sample
  misc_feature (1)..(2097): n is a, c, g, or t
ttgtttattctgtacgaggcgctcaagcgcggcgttagcgtggatgagttatataacatcacaaaagtagaccgatggtttttgcatgggctggttaatattttgaataacaacgaacaattaaaaccttttgtttataaaatggtagatacctgcggcggcgaatttgaggcaaaaacgccgtatttctactctattcagaatgggacggaaaacgaagccctgccttttatccaaaaaagcagcaaacagcggattgttgtgcttggatcgggaccaattcgtattgggcagggcatcgaattcgactacgcctgcgttcactgtgtatggacgcttaaaagcatggggtacgaggtcatcgtaattaacaataaccccgaaaccgtatccaccgactttgacaccgccgacagactctattttgagccgctgtgcattgacgatgtaatgagcataatcgacattgaaaagccgttaggagttatcgtggcgttcggcggcggcacggcaattaaacttacaaaaaaactccacgagcgcggcataaatataatcggcacctcggctgacagcatagacatctgcgaggacaggcagagatttgacgccctgctggaaaatctgcggataaaacgccccaaaggttacggcgttatgaccgaatcggaagcgctggacgccgccgaaaaacttgggtttccggtgcttatgcgcccgtcctatgtattgggcggacagaacatgataatcgcgttttcgccggacgatatccgcgagtatatggaaataattctgcgctcaaaacaggaaaacccggtgctgattgacaagtacctggaaggaatggaaatagaggttgacgcgttatgcgatgaaaaaaatgtatttattcctggcattatggaacacattgagcgcaccggcatccattccggcgacagcatcgccgtatacccggcccttaatatcgacgacgcgttagctgataaaattcttgacgttacgcataaactgtgcatggcgttgaatgttaagggactggttaatattcaatatgttctatatgaaaacgatatctatgttattgaggtaaacccccgcgcgtcccgcaccgttccctatctcagcaaggttactggaattcccatgtgcgagcttgccactaaattaagcgtgggacatacgctttccggtttggggtacgcgccgggtataggaagaataccgccgtatatcgccgttaaagttcctgttttctcatttgaaaaacttaccggtgtggatacgcatttgggacccgaaatgaaatccacgggggaagttcttggcctggggaagaaccttgaggaagccctgtacaaggggcttgtcgccgccgggtacaggatgaaaatgaaaggcggcgtgctgattaccgtgcggggcagcgacaaggcggagattatccgtgtggcgaaaaaattggtacaggccggattttccctgtacgcgacgaagggtaccgcccggttccttgcggaaaggggtttcgaggttcaaagcgttgaaaaaatcaaggataacgcggtcaacaacgcggcgacgcttcttgaaagcggcaagatcagttatattatctccacgtcaaagaaaggcagggatcccgctctcgacgacgtgaaactgcgcagaaaagcctgctcactcggcgttccgtgtcttacctcggtcgatacggctaacgcgctggcggacggtctgctttccggctatagcgagaccaataccgagttaatcgacattaataacctgaggaccgatcgcgcgaaacttgcttttacaaaaatgcagagctgcggcaatgattacatttatttcaattgttttgacacggaaattgattcgcctgaatcgctgtccgtatatttgtccgacaggcatttcggcgtgggcggcgacggcgttgtgctgatactgcgatccgatatcgccgacgcgaaaatgcggatgttcaatctggacggcagcgagggcagcatgagcgggaacgccatccgctgtgtggcaaaatatctttatgacaacggcatgtcaaaaaacgcgatatgcaaatag

SEQ ID NO: 61434 - protein, 698 aa, Unknown
  Obtained from environmental sample
  DOMAIN (196)...(370): ATP-grasp domain
  misc_feature (1)..(698): Xaa is any amino acid
MFILYEALKRGVSVDELYNITKVDRWFLHGLVNILNNNEQLKPFVYKMVDTCGGEFEAKTPYFYSIQNGTENEALPFIQKSSKQRIVVLGSGPIRIGQGIEFDYACVHCVWTLKSMGYEVIVINNNPETVSTDFDTADRLYFEPLCIDDVMSIIDIEKPLGVIVAFGGGTAIKLTKKLHERGINIIGTSADSIDICEDRQRFDALLENLRIKRPKGYGVMTESEALDAAEKLGFPVLMRPSYVLGGQNMIIAFSPDDIREYMEIILRSKQENPVLIDKYLEGMEIEVDALCDEKNVFIPGIMEHIERTGIHSGDSIAVYPALNIDDALADKILDVTHKLCMALNVKGLVNIQYVLYENDIYVIEVNPRASRTVPYLSKVTGIPMCELATKLSVGHTLSGLGYAPGIGRIPPYIAVKVPVFSFEKLTGVDTHLGPEMKSTGEVLGLGKNLEEALYKGLVAAGYRMKMKGGVLITVRGSDKAEIIRVAKKLVQAGFSLYATKGTARFLAERGFEVQSVEKIKDNAVNNAATLLESGKISYIISTSKKGRDPALDDVKLRRKACSLGVPCLTSVDTANALADGLLSGYSETNTELIDINNLRTDRAKLAFTKMQSCGNDYIYFNCFDTEIDSPESLSVYLSDRHFGVGGDGVVLILRSDIADAKMRMFNLDGSEGSMSGNAIRCVAKYLYDNGMSKNAICK

SEQ ID NO: 61435 - DNA, 573 bp, Unknown
  Obtained from environmental sample
  misc_feature (1)..(573): n is a, c, g, or t
atggaaaactttgatcctgtgggcatacacacaggcgacagcatagttatcgctccctgcgttacgttagctgacaaagagtaccaaatgctccgctccgccgcgttgaatatcatctgcgcgctcggcgttgagggcggctgtaacgtccaattcgcccttcacccagacaactttgattacgctgttatcgaagtaaatccgcgcgtttcgcgttcttcggctctcgcaagcaaggcgacaggctaccccatcgcaaaagtcgcgacaaaaatcgccatcggctacactctggacgaaattgtaaacgccgttacgggcaacaccttcgccgcctttgaacccacccttgactacgtggcggtaaaattccccaaatggccctttgacaaatttgtatacgcgcaaaaggagcttggcactcagatgaaagccacaggcgaggtaatggcgattgccgacacttttgaggaagctcttgtaaaagcggtacgaggcgcggaaatagggcttaacagtcttaacctgcccccgctgtccgcaaatcagacgaagaaaatcgcgcccttttaa

SEQ ID NO: 61436 - protein, 190 aa, Unknown
  Obtained from environmental sample
  DOMAIN (1)...(129): Carbamoyl-phosphate synthase L chain, ATP binding domain
  misc_feature (1)..(190): Xaa is any amino acid
MENFDPVGIHTGDSIVIAPCVTLADKEYQMLRSAALNIICALGVEGGCNVQFALHPDNFDYAVIEVNPRVSRSSALASKATGYPIAKVATKIAIGYTLDEIVNAVTGNTFAAFEPTLDYVAVKFPKWPFDKFVYAQKELGTQMKATGEVMAIADTFEEALVKAVRGAEIGLNSLNLPPLSANQTKKIAPF

SEQ ID NO: 61437 - DNA, 459 bp, Unknown
  Obtained from environmental sample
  misc_feature (1)..(459): n is a, c, g, or t
ttgaccgcggagagaaacggaacgcggtttatcgccgtcatccttggcgctccctccgaatggggaggcgacagaaagcgggacgaagacggtgaaaagcttctggagtgggcttttgggcgttttaaaacaatcccaatccggatgagcataggcgcgttcccgcctgtccgtatctggaaaggcaaagacaactacttgagctttgttccggaagagccgcttgattttacagctccggtggaaagaggcagccagctttcctgggaaacagaacttgatgaacctcttatcgcccccttctacacggggcagaaggtgggaagcctcgtgctttacgacagcctcggagaattaagacgcattacgctggtcgcagcgcaaaacgccgaaaaaggcggtttttttaagcgcttgtttgattcaatcagattgttttttgacaaaatttttcgataa

SEQ ID NO: 61438 - protein, 152 aa, Unknown
  Obtained from environmental sample
  DOMAIN (42)...(132): Penicillin-binding protein 5, C-terminal domain
  misc_feature (1)..(152): Xaa is any amino acid
MTAERNGTRFIAVILGAPSEWGGDRKRDEDGEKLLEWAFGRFKTIPIRMSIGAFPPVRIWKGKDNYLSFVPEEPLDFTAPVERGSQLSWETELDEPLIAPFYTGQKVGSLVLYDSLGELRRITLVAAQNAEKGGFFKRLFDSIRLFFDKIFR

SEQ ID NO: 61439 - DNA, 837 bp, Unknown
  Obtained from environmental sample
  misc_feature (1)..(837): n is a, c, g, or t
ttggaacaaatgtttacaaagaatttaccacgaacctcactaaccgcgtaccttcggtacgacactaactcttaccacacatcttgtcgatgttcgtgctggttcgtgttggttagtggtaaaattttaagagcgttgtttttattattcctcgcttttcccgcttttgcccaatcaccgcaaagcgccggaaactcaggctttctggagctttactctcaatccgccgtggtgatggacgcctctacaggaaccatagttttctataaaaacccggacgatgaaattcctcccgcttctcttacaaaattaatgaccatgcatcttgtcctgaaggaaattgcttcaggcagagcttctttggatgaactaattactccgacaagggagagctgggctgtgaaccagcttcccggctcctctttgatgtaccttgcgcagggccagactttaagtcttagggaactaatgctgggtatggcggttgtttcaggcaacgacgccgcgacggcggcagccttgcgctttgccccgacagtggatgattttataaggatgatgaacatggaagcggcggcaatggggctaagtaaaaccaggtttgtggacgcctcaggctattcggaagagaacatgaccacagccagggaattagccgagttatgccggatctatctattggagcacccggaaagcctgggggattttcattcggtaagggaattctcgtacccaagggctgagaacgttccacctgaaaggcggggaaatcccggaaccaggctgcgcagaaacaacaacaacctgcttggcaaggtagtaggggttgatggttaa

SEQ ID NO: 61440 - protein, 278 aa, Unknown
  Obtained from environmental sample
  DOMAIN (54)...(278): D-alanyl-D-alanine carboxypeptidase
  misc_feature (1)..(278): Xaa is any amino acid
MEQMFTKNLPRTSLTAYLRYDTNSYHTSCRCSCWFVLVSGKILRALFLLFLAFPAFAQSPQSAGNSGFLELYSQSAVVMDASTGTIVFYKNPDDEIPPASLTKLMTMHLVLKEIASGRASLDELITPTRESWAVNQLPGSSLMYLAQGQTLSLRELMLGMAVVSGNDAATAAALRFAPTVDDFIRMMNMEAAAMGLSKTRFVDASGYSEENMTTARELAELCRIYLLEHPESLGDFHSVREFSYPRAENVPPERRGNPGTRLRRNNNNLLGKVVGVDG

SEQ ID NO: 61441 - DNA, 1392 bp, Unknown
  Obtained from environmental sample
  misc_feature (1)..(1392): n is a, c, g, or t
atgtttcctttaatcaaagagcttattaattccaggcctgacggacgggagatttccgtacgtggctgggtcagaaccaaacgtgaaatgaagaacctcgtctttgtggaagtaaacgacggttcctgctttaaaggcatccagtgtactttcgatacatccaccggattggatgccgggacaaaggccgccctcgccgagcttggcaccggggcggcggtggaaatctccggcaaacttgttccctctccggcggaagggcaggcggtggaagcggctgccacttcgcttttgattgtgggcgcggccccggcggaaacttacccgcttcaaaaaaagcggcactcgctggagtttctccgtgaaatagcgcatttaagggcaaggacgaacactttcggcgcggttgccagggtgagaagccggctggctatcgcgactcacgagttttttcaaagccgtcatttcctgtacgttcacaccccaataatcacaggcagcgacgccgagggggccggcgcgttgtttcaggtgacgacacttgacctcgcggctctggcaaaatccggcaaagccccggattactcaaaagatttttttggtaaatggacaggactcgcggttacaggccagcttgaagccgaatcttacgccgaagccctttccagggtctacactttcggccccacctttcgggctgaaaattccaacaccacccgccatcttgcggagttctggatgattgagccggaagccgccttcttccgccttgaagacaacatggcgctggcagaggattttctcaaataccttttctcagtggttttaaaggactgcgccgaagaccttgaattttttgattcccatatcgaaaagggaattatagaaacccttcaatccgtggcctcttcaaagttttctcacataacctacaccgatgccatcgcggaactggaaaagggcgggccttttgaattcaagccttattggggctgcgacatccagaccgagcacgaaaggtttctctcggaaaaagttacgggcgggccggtaatcgttacggattatccaaaagagatcaaagcgttttacatgaagcaaaacgatgacggcaaaactgtccgggcaatggatgttctggttccccgtctgggtgaaattattggcggctccgagcgcgaagaaaattacgacaggctggaaaagcgcatggaagagctaaagtttaacattggcgattaccggtggtatctggatctccgccgctacggcagcgttccccattcaggtttcggcctgggcttcgagcggcttattcaatacgttaccggtatggtaaatatccgcgacgttattcccttcccccgcgctccgggccaggcggaattctag

SEQ ID NO: 61442 - protein, 463 aa, Unknown
  Obtained from environmental sample
  DOMAIN (18)...(100): OB-fold nucleic acid binding domain
  misc_feature (1)..(463): Xaa is any amino acid
MFPLIKELINSRPDGREISVRGWVRTKREMKNLVFVEVNDGSCFKGIQCTFDTSTGLDAGTKAALAELGTGAAVEISGKLVPSPAEGQAVEAAATSLLIVGAAPAETYPLQKKRHSLEFLREIAHLRARTNTFGAVARVRSRLAIATHEFFQSRHFLYVHTPIITGSDAEGAGALFQVTTLDLAALAKSGKAPDYSKDFFGKWTGLAVTGQLEAESYAEALSRVYTFGPTFRAENSNTTRHLAEFWMIEPEAAFFRLEDNMALAEDFLKYLFSVVLKDCAEDLEFFDSHIEKGIIETLQSVASSKFSHITYTDAIAELEKGGPFEFKPYWGCDIQTEHERFLSEKVTGGPVIVTDYPKEIKAFYMKQNDDGKTVRAMDVLVPRLGEIIGGSEREENYDRLEKRMEELKFNIGDYRWYLDLRRYGSVPHSGFGLGFERLIQYVTGMVNIRDVIPFPRAPGQAEF

SEQ ID NO: 61443 - DNA, 891 bp, Unknown
  Obtained from environmental sample
  misc_feature (1)..(891): n is a, c, g, or t
atgccgtcggagaaaaagagggtagggctggttctcgcctcaattcacaccgggatttccttgaatgtttggaatagttttgtccgcacagccatgtctgaaaatatcagcctgtttatttttccgggtggcaggcttgatgcccgtcagaattttgaaaatctgcgtaattcggtttattcgctcgtaaacgatgaaaatctggacggctgtatcagtcatagttcaacaatactttacaaccagtccaaagaagaatttgaacattttcataaaaactttgatccccttcccttggtaacgcttggttttaaactgccgggacattcctgcgtggaatttgacgcatataatggaatgaaagcgctggtcaatcactgcatccgcgttcatggagcccggaaaatcgccttcctgcatggcccggaatttcaccaatccgcccatgcccgctttgaaggctattgtgacgcgttgattgaaggggggcttgtctcaggtctgccggggaaaaaaggagttattcaatcccccttggtaagcggtccttttaactgggatgcgggcgcggcggcggcggcgcagctttataaggatcgttccctgattccgggcagggactttgacaccctggtaggttccagtgattttatggtattgggggcgatcaattatttcgccaaacatgggtatcatgttcccggcgattaccgggccgtgggattcaacaattcagaggaaagccggattacaaaaagccccctttccacggttcaagtcccatataatgaaatgagcgctgaatcatttaaaatcctacgtaaaataattagtggtacccccccccccccccaggatgtcttgttactttccgacttgattatcccgtga

SEQ ID NO: 61444 - protein, 296 aa, Unknown
  Obtained from environmental sample
  misc_feature (1)..(296): Xaa is any amino acid
MPSEKKRVGLVLASIHTGISLNVWNSFVRTAMSENISLFIFPGGRLDARQNFENLRNSVYSLVNDENLDGCISHSSTILYNQSKEEFEHFHKNFDPLPLVTLGFKLPGHSCVEFDAYNGMKALVNHCIRVHGARKIAFLHGPEFHQSAHARFEGYCDALIEGGLVSGLPGKKGVIQSPLVSGPFNWDAGAAAAAQLYKDRSLIPGRDFDTLVGSSDFMVLGAINYFAKHGYHVPGDYRAVGFNNSEESRITKSPLSTVQVPYNEMSAESFKILRKIISGTPPPPQDVLLLSDLIIP

SEQ ID NO: 61445 - DNA, 927 bp, Unknown
  Obtained from environmental sample
  misc_feature (1)..(927): n is a, c, g, or t
ttgaatccaacctacgaaacgcagccgtcgggaggtgggggcagaaaaacgcagtttttacgaccccctctggttcagtttcttaattgttcaaaagtaaggctagaaggcgtaacgcttcaaaattccccgttctggacattacatccgctgtattgccgcgacgttgttatttccggccttaccattaaaaatccctttgacgctcccaacacggatggcatggacattgattcctgcgaagacgtgttaattgaaaactgcatggtctcggtgggggatgacggcattgtactcaagtcaggggctggtgaggacggcatacgcgtgggtaagccgtgcagaaggataactgtgcgaaactgtacgattgaggacggccacggggggatcgttataggcagtgaaactgcggcgggcgtttgtgatgtgctgactgaggaatgtctgttcaggggaaccgaccgggggatcaggataaaaactcgaagaggccggggaggtaaaattcacgaccttgaattccgtaatctcaccatggaaaacaacctttgcccttttgccattaatatgttttaccgccccggcgcggctttaacggacggctatttcaaccagagcgcccttcccgttaacgccgcgactccctcaattaaaaacatccgcatttctgatgttaaggcttcaggctgccgcgcgtctgccggttttatagccggtttgccagaatcgcccgtggaaaacattaccatcaaccgttgtgaattttccactgatgagcgttccggcgtaagccccgatgaatctgatatgtttttaggaattcctgccattaaagaaaaaagtatacgcctgctaaatgttaaaaatattcaattcaatgaggtaaatgtaaaaggacccctcgaggcttttatttatcgttag

SEQ ID NO: 61446 - protein, 308 aa, Unknown
  Obtained from environmental sample
  DOMAIN (1)...(273): Glycosyl hydrolases family 28
  misc_feature (1)..(308): Xaa is any amino acid
MNPTYETQPSGGGGRKTQFLRPPLVQFLNCSKVRLEGVTLQNSPFWTLHPLYCRDVVISGLTIKNPFDAPNTDGMDIDSCEDVLIENCMVSVGDDGIVLKSGAGEDGIRVGKPCRRITVRNCTIEDGHGGIVIGSETAAGVCDVLTEECLFRGTDRGIRIKTRRGRGGKIHDLEFRNLTMENNLCPFAINMFYRPGAALTDGYFNQSALPVNAATPSIKNIRISDVKASGCRASAGFIAGLPESPVENITINRCEFSTDERSGVSPDESDMFLGIPAIKEKSIRLLNVKNIQFNEVNVKGPLEAFIYR

SEQ ID NO: 61447 - DNA, 432 bp, Unknown
  Obtained from environmental sample
  misc_feature (1)..(432): n is a, c, g, or t
atgcgtgaaattgatttagcgtctttcggcggaatagcggacggcgttacagataattcaacttcaattgccgccgcgatgcaggagatcaaagaagcgggcggcggcggacttagaatagggaaaggtttgtggcgctgcggccctatagaaatattctcaaatattacgattgtgttagacgaagaagctgcccttgtctttattcccaagcctgaacgctacaagccggtaaagacgcggtgggaagggcttgaatgtttcgcgatgcatccgtgtattttcgcttccggacaggagaatatcaccattacaggaaaaggcgttattgacggcggcggcagttactggtgggatatgttacgtgaaaaaagaggccnnggggccagcaggagccccaaactccgcaggaacttgcgtnggcggcgttga

SEQ ID NO: 61448 - protein, 143 aa, Unknown
  Obtained from environmental sample
  misc_feature (1)..(143): Xaa is any amino acid
MREIDLASFGGIADGVTDNSTSIAAAMQEIKEAGGGGLRIGKGLWRCGPIEIFSNITIVLDEEAALVFIPKPERYKPVKTRWEGLECFAMHPCIFASGQENITITGKGVIDGGGSYWWDMLREKRGXGASRSPKLRRNLRXRR

SEQ ID NO: 61449 - DNA, 912 bp, Unknown
  Obtained from environmental sample
  misc_feature (1)..(912): n is a, c, g, or t
atgcgcaggggcacgggcgacatcgtaggcgctaaacgggaacgcgagcagctgctccgctccgtgccggccaagaacgtaagggtgctcgccgtcgacgactcggcggagtcccgcgagtacatatcccacgtactgacgacgctcggttttgattgcgagcacgcttgcgacggtatggaagccgttgacaaatcggaaaaggctaaggcggaggggcgtccgtacgacatcatattcatggactacatgatgcccaagctggacggcatagaggcggcgcggaagatcaaggagacgaccggggagaacgtctccatcgttatggtctcaatgtacgattggaaggagtttgagcataaggcgcgcgaagccggcatcgtcaagtgcgtcactaagcctatatcgccctccgcggtactggactctataagcgagatcatgccgacctgcgtgataaagaacaccggcaacaataccttggccccgcccactgtaagtttcagcggcaacacgatactcctcgtggaggacatagacatcaaccgcgaaatcatcgccgcgtttcttgaggagacccacgtcagcatagacgtggcggtgaacggcgtggaggcggtcggcaagttcggtcagaatccggacaagtacgacatcgtcctgatggacatacagatgccggagatggacggctttgaggcgacgaggcgcataagggccataggcaccacgaaggcgaagtcgatccccatagtcgctatgacggcgaacgcgcttagcgaggacgttcagcggtgcaaggaggcggggatgaacgaccacatagcgaagccggtggaccaagaggcgctgatgttcaagctgaacgacttcttctttatgaaagggtttcttgggaaggaaatccactaa

SEQ ID NO: 61450 - protein, 303 aa, Unknown
  Obtained from environmental sample
  DOMAIN (27)...(145): Response regulator receiver domain
  misc_feature (1)..(303): Xaa is any amino acid
MRRGTGDIVGAKREREQLLRSVPAKNVRVLAVDDSAESREYISHVLTTLGFDCEHACDGMEAVDKSEKAKAEGRPYDIIFMDYMMPKLDGIEAARKIKETTGENVSIVMVSMYDWKEFEHKAREAGIVKCVTKPISPSAVLDSISEIMPTCVIKNTGNNTLAPPTVSFSGNTILLVEDIDINREIIAAFLEETHVSIDVAVNGVEAVGKFGQNPDKYDIVLMDIQMPEMDGFEATRRIRAIGTTKAKSIPIVAMTANALSEDVQRCKEAGMNDHIAKPVDQEALMFKLNDFFFMKGFLGKEIH

SEQ ID NO: 61451 - DNA, 378 bp, Unknown
  Obtained from environmental sample
  misc_feature (1)..(378): n is a, c, g, or t
atgggaacgaaaaggttgcttattgttgacgataaacgtgaaatccgccaactcgtgcgggctaccctcgagtttgacgggtgggaggtctttgaggcggagaccggggacggcgccgttgaggccgcggcgcaacataaaccggacttggtcgtaatggatatgatgatgccaggcactatcgacggcatggaggccacgcggcgcataaaatcggcgccggagacagccgaatgcaaagtcataatgctaagcggttcggatatagagttgcgcgaaacggcgctaaaggccggggtcgcggagttcattcagaaacctttcagcccgctcgacctcatggagaagatcgaggaacttttcgggcataatgcctaa

SEQ ID NO: 61452 - protein, 125 aa, Unknown
  Obtained from environmental sample
  DOMAIN (4)...(118): Response regulator receiver domain
  misc_feature (1)..(125): Xaa is any amino acid
MGTKRLLIVDDKREIRQLVRATLEFDGWEVFEAETGDGAVEAAAQHKPDLVVMDMMMPGTIDGMEATRRIKSAPETAECKVIMLSGSDIELRETALKAGVAEFIQKPFSPLDLMEKIEELFGHNA

SEQ ID NO: 61453 - DNA, 663 bp, Unknown
  Obtained from environmental sample
  misc_feature (1)..(663): n is a, c, g, or t
gtgacatccaaactcgacaataacggcgaatccgacttaacgctacggcgcgaagacattgactactacgaggtctaccttcgcgaactggacaaaaacagactccacgagcaagaactcgcgtttctgcgtgtggagcttgaaaagttcaagaacgaggccgccaaagcctacctcctctccaaggagcggcacaaggactcggcgctaatgtcggcgcaagccgtgaagaccataaacgatctgcacaaaaagatcaaggagctcgacggcgcgaagaaaaccctccgcgaggcctacaaggacacaatcaaccgcctagccgtagccagcgagtacaaggacaacgaaacaggcaaccatatcctgcgtatgagccgctacagcgtctacctcgccaatctatacggacagacgccggatcaagtagaggagatggagttcacctcccccatgcacgacgtcggcaaaatcgggataaaggacaacatcctcttcaaaaacggcaaactgaccgagtccgagttcaacgagatgaagaagcacaccaccataggcgccgccatactcaacaaccccaaatcccccatcatagagtgcgccaggcaaatcgccctcttcaccacgaaaagtggaacggacacngctacccccacgggataa

SEQ ID NO: 61454 - protein, 220 aa, Unknown
  Obtained from environmental sample
  DOMAIN (118)...(213): HD domain
  misc_feature (1)..(220): Xaa is any amino acid
MTSKLDNNGESDLTLRREDIDYYEVYLRELDKNRLHEQELAFLRVELEKFKNEAAKAYLLSKERHKDSALMSAQAVKTINDLHKKIKELDGAKKTLREAYKDTINRLAVASEYKDNETGNHILRMSRYSVYLANLYGQTPDQVEEMEFTSPMHDVGKIGIKDNILFKNGKLTESEFNEMKKHTTIGAAILNNPKSPIIECARQIALFTTKSGTDTATPTG

SEQ ID NO: 61455 - DNA, 846 bp, Unknown
  Obtained from environmental sample
  misc_feature (1)..(846): n is a, c, g, or t
atgtaccttaacggcctttccagctcgctcccggaagatgtgcaggcggattttatccacagcataatggggcttgaaaaagcgatcatcgtaaggcccgcttacgcagtggagtacgactacattgacccgctggatctttaccccagtttggaatccaagcgcctttccggttttttctgcgctgggcagaccaacggcagctctggctatgaagaagccgctgcccagggcttaatcgctggcattaacgcggcacagaaaatgcgaaacgaagcgccgctgattttaagccgcgccgaagcctatatcggcgttttggttgatgaccttacgacccttggaaccaaagaaccctaccgaatgttcaccagccgcgccgaacaccggcttgtgctaaggcacgacaccgcagacacacggctcactccaaaagccagggatctggggttaatcgacgacgaacgctgggaaaggttccaaaagaaaattgaagggttgaatcagataaaggagctgttaagagcgaagaaagcttccagccaggttaatcccggcacatctcccgaattttctccctggcccgctgaatgggttgagcgggtatacctcgatataaaatactctggctacatcgaaaaagaaaaacgcgccattgaaaaatttgcaaaaatggagggcgttaaaatacctggggatttggattattcttgcgttacagggctttcagcggaggcaaaggaanagctaatcgcggtaaaaccactgacgttgggacaggcggcgcgcatcccaggcatacgccagggcgatattgcgcttttaatgataatattgaagaaatag

SEQ ID NO: 61456 - protein, 281 aa, Unknown
  Obtained from environmental sample
  DOMAIN (1)...(93): Glucose inhibited division protein A
  misc_feature (1)..(281): Xaa is any amino acid
MYLNGLSSSLPEDVQADFIHSIMGLEKAIIVRPAYAVEYDYIDPLDLYPSLESKRLSGFFCAGQTNGSSGYEEAAAQGLIAGINAAQKMRNEAPLILSRAEAYIGVLVDDLTTLGTKEPYRMFTSRAEHRLVLRHDTADTRLTPKARDLGLIDDERWERFQKKIEGLNQIKELLRAKKASSQVNPGTSPEFSPWPAEWVERVYLDIKYSGYIEKEKRAIEKFAKMEGVKIPGDLDYSCVTGLSAEAKEXLIAVKPLTLGQAARIPGIRQGDIALLMIILKK

SEQ ID NO: 61457 - DNA, 993 bp, Unknown
  Obtained from environmental sample
  misc_feature (1)..(993): n is a, c, g, or t
atggactatgattgtattgtgattggcggcggccacgccggaatcgaagcttctttggcagtcagccgccttggattttcctgcctgcttgttacgcagaacccggactccataggcgtcatgtcttgcaatcccgcggtaggcggcctttcaaaaggcaacctcgtcagagaagttgacgctcttggaggcgagatggctcacctcaccgacaagaccatgatccagtacagggtgcttaaccgttcaagggggccggcggttcagtcgcccagggcccaggcggataaaaaagcgtaccaggccgccgcccgcaaggcggttgaagggcaaaagggactgacgatttttatggatacagtggtggatcttattacagccgaaacaggcggcgtcccaagcgtgcaggggatcattaccgccagaggacatcgtatttcgtcttccactgtgatcctcgcgtcaggcaccttcatggaagggaagatatttatcggcgaatacgacgccccgcagggacggctgggggaagaagcggccagcggcttggggcaaagcctacgtcgcttgggttttcccgtcgggcggctaaaaaccggaacgccagcccgcattgcccgcggctctattgatttcagcgtaatggaaaaacaggacggcgaagagcccgttccattttcttatgatatgacagacgagaatttttccggtacccgcctgccccagcttccctgctggattacctacacttgccaggcgacccatgaagttatcagaaagaacattcaccgctcgccgctttacggcggaaagataaaaggcacaggggcgcgttactgcccttccatcgaagacaaggtaatgcgcttccccgagcgcgaaaggcaccacgtattgtcgagccggaagggctttacacaagcgaaatgtaccttaacggcctttccagctcgctcccggaagatgtgcaggcggattttatccacagcataa

SEQ ID NO: 61458 - protein, 330 aa, Unknown
  Obtained from environmental sample
  DOMAIN (4)...(330): Glucose inhibited division protein A
  misc_feature (1)..(330): Xaa is any amino acid
MDYDCIVIGGGHAGIEASLAVSRLGFSCLLVTQNPDSIGVMSCNPAVGGLSKGNLVREVDALGGEMAHLTDKTMIQYRVLNRSRGPAVQSPRAQADKKAYQAAARKAVEGQKGLTIFMDTVVDLITAETGGVPSVQGIITARGHRISSSTVILASGTFMEGKIFIGEYDAPQGRLGEEAASGLGQSLRRLGFPVGRLKTGTPARIARGSIDFSVMEKQDGEEPVPFSYDMTDENFSGTRLPQLPCWITYTCQATHEVIRKNIHRSPLYGGKIKGTGARYCPSIEDKVMRFPERERHHVLSSRKGFTQAKCTLTAFPARSRKMCRRILSTA

SEQ ID NO: 61459 - DNA, 351 bp, Unknown
  Obtained from environmental sample
  misc_feature (1)..(351): n is a, c, g, or t
gtggtctttcttaatttctgggcaacctggtgcggcccttgccgggtagaaatgccgtctatggaagcgctatacaacaagttcagtgacaaaggtttagagatactcgctgtaaactgccgtgaagaccaggcgacggtcagttcttttctaaagaatgaaggattcacttttcctgttcttctggatttgaacggaagagtaagtacgaattacggaatacaagcaattcccacgacctttcttattgaccgtgatgggatgatcattttaaggcttgtgggaagcaccgactgggataccccgaaaatcaacgccgcgttggagagtctgttaagcaatggactatga

SEQ ID NO: 61460 - protein, 116 aa, Unknown
  Obtained from environmental sample
  DOMAIN (1)...(112): Redoxin
  misc_feature (1)..(116): Xaa is any amino acid
MVFLNFWATWCGPCRVEMPSMEALYNKFSDKGLEILAVNCREDQATVSSFLKNEGFTFPVLLDLNGRVSTNYGIQAIPTTFLIDRDGMIILRLVGSTDWDTPKINAALESLLSNGL

SEQ ID NO: 61461 - DNA, 786 bp, Unknown
  Obtained from environmental sample
  misc_feature (1)..(786): n is a, c, g, or t
atgacagaagggttttcgttaatagtagtttttgctgcgggcttgctttcttttctttcgccctgcgtgctgcccctgattccttcgtacttaagcatacttggcggcctgggcatcgaaaaagaaactgataagaaccgccttattttttccgctgcgggttttgtcctgggcttcagcgctttgtttattgctcttggcattctggtttcaaaaaccttttttctcatgggcggtatttccgtatatatcaaccgggctgcgggaatcatcgttattgtccttggcctaaatgtgatcttcgattttattaaattcgtcaattacgagaaacgtccctttttgcaaaaatggatgaagaagggcatccgtggaataatcgccgcctttctcgcgggggcggctttcggcgcgggctggacgccctgcgtcggccccatccttacaagcgtccttttaatggcggctcaggacgggaaaaccatgatagcggttttttatctggcggtgtattccgccgggcttgccgtgccttttcttttggcagctctgtttctggattactttatagaacggggctcagctctccgtaagcatctgctgcttatcaggcgcgtcagcggcatcctattaattattatcgggcttatgatccttgccgggaaatactcggcgcttaacatactgattcaaaaagcaactttaagttatatttattgggcggaggacaaagccctaccgttcaggattttagccaacgacttaaactggcttcaaaatttctaa

SEQ ID NO: 61462 - protein, 261 aa, Unknown
  Obtained from environmental sample
  DOMAIN (10)...(220): Cytochrome C biogenesis protein transmembrane region
  misc_feature (1)..(261): Xaa is any amino acid
MTEGFSLIVVFAAGLLSFLSPCVLPLIPSYLSILGGLGIEKETDKNRLIFSAAGFVLGFSALFIALGILVSKTFFLMGGISVYINRAAGIIVIVLGLNVIFDFIKFVNYEKRPFLQKWMKKGIRGIIAAFLAGAAFGAGWTPCVGPILTSVLLMAAQDGKTMIAVFYLAVYSAGLAVPFLLAALFLDYFIERGSALRKHLLLIRRVSGILLIIIGLMILAGKYSALNILIQKATLSYIYWAEDKALPFRILANDLNWLQNF

SEQ ID NO: 61463 - DNA, 1017 bp, Unknown
  Obtained from environmental sample
  misc_feature (1)..(1017): n is a, c, g, or t
atgagggggcgcgaatttataatgaaggacgcctattcctggcacgcggacgaaaaaagccttgatgaaacatatcaggctatgggacgcgcttaccgtaaaattttcaaacgctgcgggctttcggtaattcccgtaaaagccgattcgggcgcgatgggcggctccggctcggaagaatttatggtggaaagcgaaatcggcgacaacacgctgatcctctgcaaaaaatgcggttacgccgccaatgtggaaaaagcctcctgcaagcctgattttacggttcaagcctctgtcgaggacgcaaaagccgcttccgctaatattccacccatcgaaaaaatagacactcccaacgtaaaaaccatagacgaactttgcgccttcctgaaaacatcgccgcaaatttttattaagacgcttgtttaccgcgccctaaatgttgagttagacctctcctccgctcccggctgcgccaatcttgagcgaaagaagccgtcgcctgacgcgcccgccgtgtatccgcaggcgttcttcgccgtggcaatccgcggcgaccttgacgtgaatgaggtaaaactcgcgtccgttcttaaagcaagcgaagtaggacttgccgcggataccgatgttacgcgccttaccaacgcgcctgtcggttttgccggccctgtcggattaaaaagtattcctgtcattatcgatcatacggttacaggaatgaatgacgcggtaacaggcgcgcttgagaaagacctgcactacaaacacgcctcttacgggcgcgattttgaagggtggatgatcgacgggcaaatatccgttgatgtgcgtaccgtaaaagccggcgacctctgttctcaatgcggcggagagttgtatacaaaaatgggcaacgagcttgggcacattttcaagctgggttacaagtacacccgcagcatgaacgtacattacctggacgagaacggcaaaagccaaacgcccgaccatgggcagctacggcatcggcgttga

SEQ ID NO: 61464 - protein, 338 aa, Unknown
  Obtained from environmental sample
  DOMAIN (106)...(264): YbaK / prolyl-tRNA synthetases associated domain
  misc_feature (1)..(338): Xaa is any amino acid
MRGREFIMKDAYSWHADEKSLDETYQAMGRAYRKIFKRCGLSVIPVKADSGAMGGSGSEEFMVESEIGDNTLILCKKCGYAANVEKASCKPDFTVQASVEDAKAASANIPPIEKIDTPNVKTIDELCAFLKTSPQIFIKTLVYRALNVELDLSSAPGCANLERKKPSPDAPAVYPQAFFAVAIRGDLDVNEVKLASVLKASEVGLAADTDVTRLTNAPVGFAGPVGLKSIPVIIDHTVTGMNDAVTGALEKDLHYKHASYGRDFEGWMIDGQISVDVRTVKAGDLCSQCGGELYTKMGNELGHIFKLGYKYTRSMNVHYLDENGKSQTPDHGQLRHRR

SEQ ID NO: 61465 - DNA, 417 bp, Unknown
  Obtained from environmental sample
  misc_feature (1)..(417): n is a, c, g, or t
atgggcagctacggcatcggcgttgaccgcgccctcgcctcggtcatagaagaacaccacgacgaagccggcattatctggcctgtctccgtcgcgccgtaccatgtcataatcgttcctattaaatatgacggagaggtaaagaccgccgccgacctgtttgccgccgagcttgaaaaagcgggcgttgaagtccttctggacgaccgcaacgagcgccccggagtcaaattcaacgacgccgaccttaccggcattccctggcgcgtggtaatcggcgacaaggggctttccaaatcgcccgcgcaggtggaaattaaaaagcgaagcgagaaagacagccgaatgacggatttaaacgacgcggcggcggaactttcggagaaaataagcaaagagcttgtaagttacctgtaa

SEQ ID NO: 61466 - protein, 138 aa, Unknown
  Obtained from environmental sample
  DOMAIN (35)...(129): Anticodon binding domain
  misc_feature (1)..(138): Xaa is any amino acid
MGSYGIGVDRALASVIEEHHDEAGIIWPVSVAPYHVIIVPIKYDGEVKTAADLFAAELEKAGVEVLLDDRNERPGVKFNDADLTGIPWRVVIGDKGLSKSPAQVEIKKRSEKDSRMTDLNDAAAELSEKISKELVSYL

SEQ ID NO: 61467 - DNA, 654 bp, Unknown
  Obtained from environmental sample
  misc_feature (1)..(654): n is a, c, g, or t
atggcgagaatcgctcctttcgcttttgattttgtatctcttgtcatacagcctatttccgatttgttgctgaaacctctggaaaacgcgtacccgccattgtcgtccgaatttaaaaaagactggccgcaggctgttgtaatcttgggcggcggaataatacaaggctcgccggaagcgggagcggggaaggatgcccttacatcggacgcgatgaaaagagtagtatacgcgttctcgcttcgcgatacatttaaagtcccgtttgttttttccggcggaaagacttttgaatacggacaggagcctgaagcgtttacggcgagcaggttgttagtttctttggggtttccttttgatcggcttattctggaatcaagaagccgtaacacttgggagaacgctaaagagatagcaatattcggatttgaaaaaattgtattaattacgtcggcttatcatgtaaaacgaagcgtatattgttttaaccggcaaggcatatctgtaattgccgctccaaccgattataaatgcgaccgcgggcgaaaatatgattttttcagttttatgccgacaatatcaggtttaaataattcatatctggccctgcatgagtatgtcgggttgttgatatataaagttatttacaggtaa

SEQ ID NO: 61468 - protein, 217 aa, Unknown
  Obtained from environmental sample
  DOMAIN (42)...(209): DUF218 domain
  misc_feature (1)..(217): Xaa is any amino acid
MARIAPFAFDFVSLVIQPISDLLLKPLENAYPPLSSEFKKDWPQAVVILGGGIIQGSPEAGAGKDALTSDAMKRVVYAFSLRDTFKVPFVFSGGKTFEYGQEPEAFTASRLLVSLGFPFDRLILESRSRNTWENAKEIAIFGFEKIVLITSAYHVKRSVYCFNRQGISVIAAPTDYKCDRGRKYDFFSFMPTISGLNNSYLALHEYVGLLIYKVIYR

SEQ ID NO: 61469 - DNA, 597 bp, Unknown
  Obtained from environmental sample
  misc_feature (1)..(597): n is a, c, g, or t
atggcaaaagttaagctcacaaaaaatgagctgaaaaaacaaaaagactctcttaaaatgtacaggcgttatctgcctacccttatgcttaaaaaacagcagttacagggcgaaattagattaaccgacgcgcggttaaaagaattaaaaatagccgaagagcagttggatgaatctttcaagtcatggattggcgtctttggcgagacgggagtttttacaaaagatttattaaaaattacaaatgtgcggacaagtcacggaaatatcgccggcgtttcaatacctgtgtttgaaggcgcggactttgaaatcgccgattatgatttactgaaaacgccgctttggcttgatttggcgattgattgcatgaagcaggctttggcgttacaaatggaaatggacattgtcgaagaacagcgcagaagactcgataaagaactgcgcacgacaacccagcgcgttaatctttttgaaaaaataaaaatccccgaatcaagaaacaatatcaaaaagattcaagtttatctgggcgaccagcagacagccgccgttgtacggggcaaaatcgctaagagcggattggcgggtaagtga

SEQ ID NO: 61470 - protein, 198 aa, Unknown
  Obtained from environmental sample
  DOMAIN (2)...(196): ATP synthase subunit D
  misc_feature (1)..(198): Xaa is any amino acid
MAKVKLTKNELKKQKDSLKMYRRYLPTLMLKKQQLQGEIRLTDARLKELKIAEEQLDESFKSWIGVFGETGVFTKDLLKITNVRTSHGNIAGVSIPVFEGADFEIADYDLLKTPLWLDLAIDCMKQALALQMEMDIVEEQRRRLDKELRTTTQRVNLFEKIKIPESRNNIKKIQVYLGDQQTAAVVRGKIAKSGLAGK

SEQ ID NO: 61471 - DNA, 1299 bp, Unknown
  Obtained from environmental sample
  misc_feature (1)..(1299): n is a, c, g, or t
atgaaaaaggtttatagcaaaattgaatccataaccggaagcgttattaccgtccgggccgaagggatccgttacggcgaccttgccgaggttgacaccgtattcggcacctcgcttgccgaggtaaacaggctgcaggatgacctggtctccctgcaggtatttgccggaggcaggggtatatccaccggcgacactgtgcgctttttggggcggcccatgcaggtgccgttctccgataacctcatgggcagggtgttttccggttcgggagcgccccgtgacaagggcccggccctgcgtgaaaactacatacccattggcggcccctcggtcaacccctccgagcgcattatcccccgcaagatgatccgcaccggcatccccatgatcgacctgttcaacaccctggtcgtctcgcagaaactgccgattttctcggtttcgggcgagccctacaacgagcttctggcgcgtatcgcgatgcaggccgaagttgacgtaatcgtgcttggcggcatgggccttaaatatgatgactaccttaccttcaagaatacccttgaaaacgccggagccctcgcgcgcacggtcatgttcatgcacaccgccagcgacccgacggtcgagtgccttatgatccccgatatgtcccttgccgtcgccgagcagttcgctctgcaaggcaaagacgtacttgttcttttgaccgacatgacaaacttcgcggacgcgatgaaagaaatctcgatcattcaggaacaggttccctctaaccgcggttatcccggcgatctttacagccagcttgcaagccgctatgaaaaagcggtcgactttgaaacagcgggatcaattacagtcctcggcgttaccacaatgcccggcgacgacgttacacaccctgtgccggataataccggatacattacggaaggtcagtattatcttaagaacggacgcattgagccgtttggttctctttcgcgccttaaacagcaggttaacggcaagacacgcaaagatcaccgcgctctaatggacggtatgatcaaactttattccgccttccgcgacactttggaaaagaaggcgatgggctttatcatgacacactgggacgagaaacttttaaagtacggcgtccaatttgaaacaagaatgatggatctttccgtaaatattccgcttgaaaaagcgctggacttaggctgggaaatccttgctgattgttttaacaaggaagaaacaggattacgcacagaattgattaatgaattctggccgaaaaaagaatag

SEQ ID NO: 61472 - protein, 432 aa, Unknown
  Obtained from environmental sample
  DOMAIN (8)...(71): ATP synthase alpha/beta family, beta-barrel domain
  misc_feature (1)..(432): Xaa is any amino acid
MKKVYSKIESITGSVITVRAEGIRYGDLAEVDTVFGTSLAEVNRLQDDLVSLQVFAGGRGISTGDTVRFLGRPMQVPFSDNLMGRVFSGSGAPRDKGPALRENYIPIGGPSVNPSERIIPRKMIRTGIPMIDLFNTLVVSQKLPIFSVSGEPYNELLARIAMQAEVDVIVLGGMGLKYDDYLTFKNTLENAGALARTVMFMHTASDPTVECLMIPDMSLAVAEQFALQGKDVLVLLTDMTNFADAMKEISIIQEQVPSNRGYPGDLYSQLASRYEKAVDFETAGSITVLGVTTMPGDDVTHPVPDNTGYITEGQYYLKNGRIEPFGSLSRLKQQVNGKTRKDHRALMDGMIKLYSAFRDTLEKKAMGFIMTHWDEKLLKYGVQFETRMMDLSVNIPLEKALDLGWEILADCFNKEETGLRTELINEFWPKKE

SEQ ID NO: 61473 - DNA, 1458 bp, Unknown
  Obtained from environmental sample
  misc_feature (1)..(1458): n is a, c, g, or t
atgatgagagacgtagatgttgtctacggtaaatatatggatgaagccgttaaggctgttcaaaacggcgagaattatcgttgtacaagtttttctccggctttgaatacaaacctggcaattaatatacagtctttcccaatgggcagttcgggcagatcatggagcgtaatgctcgcggcgacggaatcgtacgttttaaaagaagttaaattcttaaccaagattacaatcattattgccgcagtagccattgtaatagcggcggtaattgtattccttacgcttagcgctactaccgcccctatcgtcgaagtagcgaacacacttaaagacatatccgaaggcgaaggcgacttaacgaaatcaatccccgtcaaatccgatgacgaggtaggcgacctttccagatacttcaacaaaacaattcagaaaatcagaggccttgtgcttctcattaaacagcaggcgggtgtgttgtcggatataggcaacgacctgtccagcaatatgaccgaaaccgcggcggcaatcaaccaaattaccgcgaatatacagagcataaagagccgtgtccttaaccagagcgccagcgttacggaaacaaacgcgacaatggagcaggttatcgttaacatcaacaaactcaacaaccatgttgaaaaccagagccgcaacgtttcccaggtatcatccgccattgaggagatggtagccaatatcagttcggtaactcaaacgttggttaataacgccacaaatgtaaaaacattaattgattcttccgaagtgggaaagaccggattgcaggaagtcgcgacggatattcaggaaatcgcccgcgagtccgaaggtttgttggaaattaacgcggttatggaaaacatcgcgagccagaccaacctgctttctatgaacgcggcgattgaagcggcgcacgccggtgaagccggcaagggctttgccgttgtcgccgatgaaatccgcaaacttgcggaaagttccagcgagcagtccaagaccatcggtgttgtgcttaaaaagattgcggaatcaatcacaaagattaccaaatcaaccgaagtcgtgcttaccagattcgaggcgattgactcaagcgtaaagactgtatcgcagcaggaagaaaatatccgcaacgcgatggaagagcagggcgaaggaagcaagcaaatcctcggcggcataggcaatttgaacgatattaccacgcaggtaaccagcagttccgaagaaatgcttaacggcagccaggaagttgttaaagaaagccacaaccttgaaagggtaacgcaggaaatcacgggcggcatgaacgagatggcgtcaggagcggatcagataaacgtagcggtacacaatgtcaacgagatgaccgttaagaaccgcgaagctatcgacgacctgttaatggaagtgtcgcgcttcaagatagattaa

SEQ ID NO: 61474 - protein, 485 aa, Unknown
  Obtained from environmental sample
  DOMAIN (221)...(478): Methyl-accepting chemotaxis protein (MCP) signaling domain
  misc_feature (1)..(485): Xaa is any amino acid
MMRDVDVVYGKYMDEAVKAVQNGENYRCTSFSPALNTNLAINIQSFPMGSSGRSWSVMLAATESYVLKEVKFLTKITIIIAAVAIVIAAVIVFLTLSATTAPIVEVANTLKDISEGEGDLTKSIPVKSDDEVGDLSRYFNKTIQKIRGLVLLIKQQAGVLSDIGNDLSSNMTETAAAINQITANIQSIKSRVLNQSASVTETNATMEQVIVNINKLNNHVENQSRNVSQVSSAIEEMVANISSVTQTLVNNATNVKTLIDSSEVGKTGLQEVATDIQEIARESEGLLEINAVMENIASQTNLLSMNAAIEAAHAGEAGKGFAVVADEIRKLAESSSEQSKTIGVVLKKIAESITKITKSTEVVLTRFEAIDSSVKTVSQQEENIRNAMEEQGEGSKQILGGIGNLNDITTQVTSSSEEMLNGSQEVVKESHNLERVTQEITGGMNEMASGADQINVAVHNVNEMTVKNREAIDDLLMEVSRFKID

SEQ ID NO: 61475 - DNA, 504 bp, Unknown
  Obtained from environmental sample
  misc_feature (1)..(504): n is a, c, g, or t
atgccgcccgtgatttcctgcgttaccctttcaaggttgtggctttctttaacaacttcctggctgccgttaagcatttcttcggaactgctggttacctgcgtggtaatatcgttcaaattgcctatgccgccgaggatttgcttgcttccttcgccctgctcttccatcgcgttgcggatattttcttcctgctgcgatacagtctttacgcttgagtcaatcgcctcgaatctggtaagcacgacttcggttgatttggtaatctttgtgattgattccgcaatctttttaagcacaacaccgatggtcttggactgctcgctggaactttccgcaagtttgcggatttcatcggcgacaacggcaaagcccttgccggcttcaccggcgtgcgccgcttcaatcgccgcgttcatagaaagcaggttggtctggctcgcgatgttttccataaccgcgttaatttccaacaaaccttcggactcgcgggcgatttcctga

SEQ ID NO: 61476 - protein, 167 aa, Unknown
  Obtained from environmental sample
  misc_feature (1)..(167): Xaa is any amino acid
MPPVISCVTLSRLWLSLTTSWLPLSISSELLVTCVVISFKLPMPPRICLLPSPCSSIALRIFSSCCDTVFTLESIASNLVSTTSVDLVIFVIDSAIFLSTTPMVLDCSLELSASLRISSATTAKPLPASPACAASIAAFIESRLVWLAMFSITALISNKPSDSRAIS

SEQ ID NO: 61477 - DNA, 609 bp, Unknown
  Obtained from environmental sample
  misc_feature (1)..(609): n is a, c, g, or t
atgggctatgtgaaaataggagtaggcggtccggtaggttccggaaaaaccgcgcttatcgagcggctgacaaggaaaatggcggataaatacagcatctgcgttgtgaccaacgatatttacacgcgcgaggacgcggagtttcttgtaaagaattctgtcctgccgtatgagcgtatcgtcggcgtggaaacaggcggctgtccgcacaccgctatccgcgaggactgctccatgaatttggaagctgttgaggaaatggcgcgaaggtttcccgatgtgcagataatttttatcgaaagcgggggggataacctttccgcgaccttttcacccgaacttgcggacgccactatctatgtaatcgacgtggcgcagggcgacaaaataccccgcaagggcggtcccggcgttacgcggtcagatctgcttgttatcaacaagattgaccttgccccgatggtgggggcaaacctgaatgtaatggccgtcgattcggcaaaaagccgcggcgggcgtccctttttgtttaccaatttggtttctctggaaggcgttgacgaggtaattaaatggattcgcaaaaacgtcctgcttgaagaagtgtaa

SEQ ID NO: 61478 - protein, 202 aa, Unknown
  Obtained from environmental sample
  DOMAIN (4)...(150): GTPase of unknown function
  misc_feature (1)..(202): Xaa is any amino acid
MGYVKIGVGGPVGSGKTALIERLTRKMADKYSICVVTNDIYTREDAEFLVKNSVLPYERIVGVETGGCPHTAIREDCSMNLEAVEEMARRFPDVQIIFIESGGDNLSATFSPELADATIYVIDVAQGDKIPRKGGPGVTRSDLLVINKIDLAPMVGANLNVMAVDSAKSRGGRPFLFTNLVSLEGVDEVIKWIRKNVLLEEV

SEQ ID NO: 61479 - DNA, 450 bp, Unknown
  Obtained from environmental sample
  misc_feature (1)..(450): n is a, c, g, or t
atggacagcctgtgcgccgcgatgaaacaaccctntgagatacgaaccggcagtgaaaaactctgcgcgcgttttctaaaagcacaggaatcgttatgcgattatccatcgcttgccgcgtacagacaggcgataaagcaaacaaaatgccaagggcattaccctgtcgcggtcggcctttttatacgcgacttaaacgcaaacctgaacgaggcgctggaactgtactgctacagccttttgtcgcaggcggtaaaccacgccgtaaagctgattcctttggggcaatccgatggtcaggcggctctttttgaggcaatgcggctaatccccggcgcggtacaaaaggcattgacggcatcggttgacgaactgggagtttcaggctgcggatttgatttacgcagtatgcagcacgagacgctgcgcggaagactgtatatcaattaa

SEQ ID NO: 61480 - protein, 149 aa, Unknown
  Obtained from environmental sample
  DOMAIN (2)...(109): UreF
  misc_feature (1)..(149): Xaa is any amino acid
MDSLCAAMKQPXEIRTGSEKLCARFLKAQESLCDYPSLAAYRQAIKQTKCQGHYPVAVGLFIRDLNANLNEALELYCYSLLSQAVNHAVKLIPLGQSDGQAALFEAMRLIPGAVQKALTASVDELGVSGCGFDLRSMQHETLRGRLYIN

SEQ ID NO: 61481 - DNA, 1659 bp, Unknown
  Obtained from environmental sample
  misc_feature (1)..(1659): n is a, c, g, or t
atgcctcttgtcagaaacgggaaaaccctcctttcgggggtagatcctgtccgacgggccgagcgcacggcggacgcggtttctgtcagggataacactctttacttttgcccttccgttctgtatggttacggccttgcccggctgttggcccgccttgagcaggaagcgcccaattcggcagtcctgtgcgtcgagacggacggcgaactttacgaattaacggaaaaaaacattgaaagttctcttgcggcgaaccgcagattgcgcataacgaatatttgcgatgaggccggtctttgcgcctttgtgcgcgaagcgtggggggcaaggacgttccgctatctggagattgtccgttttacgggcggctggcagttattcccggaactgtacgattctctttgcggcgcgcttcgccgcgaaattgccacagactggagcaacgccctaacccttgccaaacttggacgcttgtacatccgcaacgctttgcgcaatctttcgcttactccgcgctttccatcttttgcaaacctttcttttggcgcggcttctgttcttgtccttggagctggtccatcgctggatgaaacattagacgctcttgtaaaacattatccgcaaaatttggaacgtcctttcaggattgtttgcgtggatacctgtcttggttcgctgaaagacagggggattaatcccgatcttgttgttattttggaaagccagcactggaacctgcgcgactttaccggctgttacggcttgcaagcttcgtttgcgatagacctttccgctttgccgcagtcggcttttatgcttgccggggacggttttttgtttatgacgccctggacgcctctgcgtatttttgaaaggctaaaagaagcgcagatgcttccggctgtctttccgccgcttggttctgtcgggcttacggcagttgaattagccagacggcttacaacaggcattataatctgcgcgggtcttgatttttctttttcccccgacaagtaccatgcccgtggtacgccggggcatcgcgccctgttaaattcgcagaaccgtcttcacggaatatttaacaccgccgcgtacagccggcattcaacagccgccgtttcaaagagcgggttttctgtttataccaaccccgcaatgaaaaattaccgcaatctttttgaacaggagttcggcggcgattcgcggatatttgacattgagggaacaggtctgccgttgggggttaaaacgctttctatggaagaagctatggtattgttgggtaacctgaccactaaaaatactattaaccaaaaacattctgaaaattccattggtatttttagtggtcaggcacaatctatcacgcgggggcgcgggggcgcgggggcgcagagggaagaaaaagaaaataaattgaattcattttacaaaactgagaaagaacgattacaagaattgcgcgggctattaacaggcgaagcggcggctgataatgagcggcttagtgttcttattgacgaatgtgattatctttgggcgcatttccccgattacgccacagaccgccgtcctgagttaagcgatatctcgttcctaaaacgcctgcgcacggagattgacccgatgcttaaattgctggataagaaatag

SEQ ID NO: 61482 - protein, 552 aa, Unknown
  Obtained from environmental sample
  misc_feature (1)..(552): Xaa is any amino acid
MPLVRNGKTLLSGVDPVRRAERTADAVSVRDNTLYFCPSVLYGYGLARLLARLEQEAPNSAVLCVETDGELYELTEKNIESSLAANRRLRITNICDEAGLCAFVREAWGARTFRYLEIVRFTGGWQLFPELYDSLCGALRREIATDWSNALTLAKLGRLYIRNALRNLSLTPRFPSFANLSFGAASVLVLGAGPSLDETLDALVKHYPQNLERPFRIVCVDTCLGSLKDRGINPDLVVILESQHWNLRDFTGCYGLQASFAIDLSALPQSAFMLAGDGFLFMTPWTPLRIFERLKEAQMLPAVFPPLGSVGLTAVELARRLTTGIIICAGLDFSFSPDKYHARGTPGHRALLNSQNRLHGIFNTAAYSRHSTAAVSKSGFSVYTNPAMKNYRNLFEQEFGGDSRIFDIEGTGLPLGVKTLSMEEAMVLLGNLTTKNTINQKHSENSIGIFSGQAQSITRGRGGAGAQREEKENKLNSFYKTEKERLQELRGLLTGEAAADNERLSVLIDECDYLWAHFPDYATDRRPELSDISFLKRLRTEIDPMLKLLDKK

SEQ ID NO: 61483 - DNA, 933 bp, Unknown
  Obtained from environmental sample
  misc_feature (1)..(933): n is a, c, g, or t
atgagtgaattaaagaaattaaaattatttataataatattgatattttccgccaattgtttgttttctgcggggaacagggacgcagggctggcgataactcctgaagaacttgattttacgttgataacagacgccgaacttgtaatgaaagctttatacgaaacttttaatgacaaaatagataatgtggaatatcgaaaaaacgattgggcttttctgatgaacggcgtttggtattacttttcaaaaggaagattgctgccggaaaaagaattaaaaaaagcggcaaaatacagaccgtatcaattttataaataccctgcggaattaccgccgcagactgaggctacacccgaagaaatagagttgtatcttggctggatagaccagacaagcgcaaaagtacttagccgttccgtttcttttcccggcgcgctttggaaagcgtctacacgcaaagaaatggaaaaacaaatagtaaatataacttttcttgggaaagacacaagagttcataaaggaattcagcctatacttgcgattatcgaagaacaaattcaagaagccgcaaaaaccgataatacgattaaaacatggatagaaaatctcgctcccccggaagggtattattggcggcttatcgcaaaaactaaatcgcgatcatatcactcttacggtcttgccattgatttgcttcctgaaaagttagaaggaaagcaaacatattggttgtgggcttcccagaaaatagacgactggtggaatgttccatacagcgagcgataccatccgcccgagaaagtaataaaaatatttgagtcctatggttttgtctggggcggcaagtgggtccagtttgatactatgcattttgaataccgccccgaagtttttattctgaacggactgccgttggcggacacaccctag

SEQ ID NO: 61484 - protein, 310 aa, Unknown
  Obtained from environmental sample
  SIGNAL (1)...(23)
  misc_feature (1)..(310): Xaa is any amino acid
MSELKKLKLFIIILIFSANCLFSAGNRDAGLAITPEELDFTLITDAELVMKALYETFNDKIDNVEYRKNDWAFLMNGVWYYFSKGRLLPEKELKKAAKYRPYQFYKYPAELPPQTEATPEEIELYLGWIDQTSAKVLSRSVSFPGALWKASTRKEMEKQIVNITFLGKDTRVHKGIQPILAIIEEQIQEAAKTDNTIKTWIENLAPPEGYYWRLIAKTKSRSYHSYGLAIDLLPEKLEGKQTYWLWASQKIDDWWNVPYSERYHPPEKVIKIFESYGFVWGGKWVQFDTMHFEYRPEVFILNGLPLADTP

SEQ ID NO: 61485 - DNA, 789 bp, Unknown
  Obtained from environmental sample
  misc_feature (1)..(789): n is a, c, g, or t
atggaaaagctaaaacttaatgacgcttcccttgtctatgaaaaagactcttccgccgccttaggatttggtttccgctgcggctttttagggcttttgcaccttgaagttattcaagaacgccttgagcgcgaatttgaccaatcggtaattttcacagccccgtccgtcaaatacaaggtgcatcttcgcggtggtgaggaaatcatgattgacaacccaatagagtaccccgatgaaggcaaggttgacggcgcagaagagccctatatccgcgcttccgtaattactcccaccgattatcttggaaacataatgaccctgtgccttgaaaaacggggcgtacaaaccaacatgacctaccttgacgaaaagcgcgtggagttaatctacgatatgccgctctccgaagtgttattcgatttttacgaccgcctaaaaagcatttcaagaggttacgcgtcatttgattacgatatttcaggctacaaaccgacagaactggcaaaacttgacattctcctaaacggcaaggctgttgacgccctttcacagcttgtattcaagggcaacgcatacgaccgcgctagaaaagtttgcgaaaggctaagcggtgaaatcccccgccagcagtttaagatacccattcaaggcgcgattggcagtcacattatagcgcgtgaaaccgtcaacgccctgcgcaaggacgtacttgccaaatgttacggcggggacattacgcgcaaacgcaaactttggaaaagcaaaaagaaggcaaaaaacgcatga

SEQ ID NO: 61486 - protein, 262 aa, Unknown
  Obtained from environmental sample
  DOMAIN (85)...(174): Elongation factor G C-terminus
  misc_feature (1)..(262): Xaa is any amino acid
MEKLKLNDASLVYEKDSSAALGFGFRCGFLGLLHLEVIQERLEREFDQSVIFTAPSVKYKVHLRGGEEIMIDNPIEYPDEGKVDGAEEPYIRASVITPTDYLGNIMTLCLEKRGVQTNMTYLDEKRVELIYDMPLSEVLFDFYDRLKSISRGYASFDYDISGYKPTELAKLDILLNGKAVDALSQLVFKGNAYDRARKVCERLSGEIPRQQFKIPIQGAIGSHIIARETVNALRKDVLAKCYGGDITRKRKLWKSKKKAKNA

SEQ ID NO: 61487 - DNA, 1629 bp, Unknown
  Obtained from environmental sample
  misc_feature (1)..(1629): n is a, c, g, or t
gtgcatggctttggacgtgaagggactgtcaatattcaatatgtcctatatgagaatgacatntacgttatcgaagtcaatcccagagcgtcccgtaccgttccgtacctcagcaaagttaccagtattccaatgtgcgaacttgccacaaaaatgagcgttggcaaaactttttccgcattgggaatttcacccggcataggaaaaataccgccgtatgtcgcggtcaaggttcccgttttctcctttgaaaaacttgccggcgttgatacgcatttaggacctgaaatgaaatccacaggcgaagttttaggcattggcaaaaaccttcaagaagcgctttacaaggggctaatagcggccggatacaaaataaaaaaacgcggcggcatactgataacggtacgtgacagcgacaaggcggagatacgggacgttgcggaaaaatttgtacgcgccggattttcactttacgcgacgcgggggacaacgcgctatctaaaggaaaaaggctttgaagttcagccgatagataaaatatgcgataatcaggaagtcaatacggaaacctttttggcaagcggacaaataagttatgtcatttgcacttccaagaaaggcagggacccggcgttagacgacgtaaaactccgtagaaaagcctgctcgctgggcgttccatgcctcacgtcagtcgatacggcaaacgcgcttgccgacggcctgctttccgggtacagcgaaattaataccgaattggttgacattaaccacctcaggacggatcgtacccggcttgccttcacaaaaatgcagagctgcggcaatgattatatttactttaactgctntgatacggaaatcgattcgcctgaatcgctgtccgtgtttttgtccgacaggcatttcggcgtgggcggcgacggcgttgtgctgatactgcgatccaatatcgccgacgcgaaaatgcggatgttcaatcttgacggcagcgagggaagcatgagcgggaacgccatccgctgtgtggcaaaatatctgtatgacaacggtcttgtaaaaaaacgcgatatgcagatagagacaaagagcggcgtaaaaagactgtatctttccacgcggaacaaggttgtttgctccgtcagggttgatatggggcgcgcgaaactgggcccgcaggatataccggttaatttaaccggcgaaagcgtgatcgcgcgaaaggttgcaatcgggggcgttgaatacgaaattacctgcgtttccatgggtaatccccacgccgtggtgttcagcaaccgtctggatgatcttgatttggaagaaataggccctctgtttgaaaacgatccgctgtttcccgacagggttaacgcggaatttgttaatgttattgccacaaaccatctggagatacgcgtatgggagcgcggaagcggcgagacgcaggcaagcggaaccagcgcctgcgcttccgccgtggcagccgtcttaaacggatactgcgacaagaacgcggatataagggtgcgcctgcccggcggggagcttattgtcaattacaccgacgaggtggtctggctgaccggcgactgcgtaaaagtatttgacggaacagttgagatatag

SEQ ID NO: 61488 - protein, 542 aa, Unknown
  Obtained from environmental sample
  DOMAIN (142)...(230): MGS-like domain
  misc_feature (1)..(542): Xaa is any amino acid
MHGFGREGTVNIQYVLYENDXYVIEVNPRASRTVPYLSKVTSIPMCELATKMSVGKTFSALGISPGIGKIPPYVAVKVPVFSFEKLAGVDTHLGPEMKSTGEVLGIGKNLQEALYKGLIAAGYKIKKRGGILITVRDSDKAEIRDVAEKFVRAGFSLYATRGTTRYLKEKGFEVQPIDKICDNQEVNTETFLASGQISYVICTSKKGRDPALDDVKLRRKACSLGVPCLTSVDTANALADGLLSGYSEINTELVDINHLRTDRTRLAFTKMQSCGNDYIYFNCXDTEIDSPESLSVFLSDRHFGVGGDGVVLILRSNIADAKMRMFNLDGSEGSMSGNAIRCVAKYLYDNGLVKKRDMQIETKSGVKRLYLSTRNKVVCSVRVDMGRAKLGPQDIPVNLTGESVIARKVAIGGVEYEITCVSMGNPHAVVFSNRLDDLDLEEIGPLFENDPLFPDRVNAEFVNVIATNHLEIRVWERGSGETQASGTSACASAVAAVLNGYCDKNADIRVRLPGGELIVNYTDEVVWLTGDCVKVFDGTVEI

SEQ ID NO: 61489 - DNA, 723 bp, Unknown
  Obtained from environmental sample
  misc_feature (1)..(723): n is a, c, g, or t
ttgacaataagctccccgccgggcaggcgcacccttatatccgcgttcttgtcgcagtatccgtttaagacggctgccacggcggaagcgcaggcgctggttccgcttgcctgcgtctcgccgcttccgcgctcccatacgcgtatctccagatggtttgtggcaataacattaacaaattccgcgttaaccctgtcgggaaacagcggatcgttttcaaacagagggcctatttcttccaaatcaagatcatccagacggttgctgaacaccacggcgtggggattacccatggaaacgcaggtaatttcgtattcaacgcccccgattgcaacctttcgcgcgatcacgctttcgccggttaaattaaccggtatatcctgcgggcccagtttcgcgcgccccatatcaaccctgacggagcaaacaaccttgttccgcgtggaaagatacagtctttttacgccgctctttgtctctatctgcatatcgcgtttttttacaagaccgttgtcatacagatattttgccacacagcggatggcgttcccgctcatgcttccctcgctgccgtcaagattgaacatccgcattttcgcgtcggcgatattggatcgcagtatcagcacaacgccgtcgccgcccacgccgaaatgcctgtcggacaaaaacacggacagcgattcaggcgaatcgatttccgtatcanagcagttaaagtaa

SEQ ID NO: 61490 - protein, 240 aa, Unknown
  Obtained from environmental sample
  misc_feature (1)..(240): Xaa is any amino acid
MTISSPPGRRTLISAFLSQYPFKTAATAEAQALVPLACVSPLPRSHTRISRWFVAITLTNSALTLSGNSGSFSNRGPISSKSRSSRRLLNTTAWGLPMETQVISYSTPPIATFRAITLSPVKLTGISCGPSFARPISTLTEQTTLFRVERYSLFTPLFVSICISRFFTRPLSYRYFATQRMAFPLMLPSLPSRLNIRIFASAILDRSISTTPSPPTPKCLSDKNTDSDSGESISVSXQLK

SEQ ID NO: 61491 - DNA, 2229 bp, Unknown
  Obtained from environmental sample
  misc_feature (1)..(2229): n is a, c, g, or t
ttgggcggccagaccggcctgacgctctgcatgcagctcgcccgcgccgggttcctcaaaaaaatggacgtgcgcctgctcggatcgtcgcccgaaaccatcgacaaagccgaagaccggaagctcttcaaggagaccatgcagggtataggccagcctgtgatcccgtctgtggtggccaacgacgtggggacggcggtcaagttcgccaatgaaatcgggtacccgctcatcgtgcgtccggcgttcacgctaggcggcagcggcggcggcatagcgacggacgaagcctccctgagggagattgccgcaaacggtatcgccctctccccaattcgccagattttggttgagcagtcggtcgccggatggaaggagatcgagttcgaggtgatgcgcgaccgcgccggcaacgtgattaccgtctgctccatggagaacttcgaccccgtaggcgtccacaccggcgacagcatcgtaatcgccccagccgttacgctcgccgataaagagtaccagatgctccggacggcgtcgctcaacatcataaaggcgctcggcgtggagggcggttgcaacgtgcagttggcattgcatccggacagtttcgactacgcggtgatagaggtcaacccacgcgtctcccgctcgtcggcgctggccagtaaggctaccggctaccccatagccaaggtgtcgacgaagatcgctctaggctacacgctcgacgagataacgaacgccgtcaccggcacgaccttcgccgctttcgaaccggcgctcgactacgtcgcggtgaagttccccaagtggccgtttgacaagttcgtctacgctcataaggaactgggcacccaaatgaaggcgaccggcgaggtcatggccatagccgacacgtttgaggaggccttgcttaaagcggtgcgcggcgcggaaataggcctgtcgaacttgaacctgccgcgcctcgccgcgaaatcggacagcgaaataagcgatatgctcaagacggtgacagacgagcggttgttcatactgtatgaggcgataaaacgcggcgtaagcgttgatgaattgtatcaaataacaaaggttgaccgctggtttttacacgggcttgtcaatatacataaaggattgtttgatgataatcctcaatcaatacccaaccgcgacggcagtaaactaatctacaaaatggtcgatacatgcggcggcgaatttgaagctaaaacgccgtacttctactccattcagaacggaacggagaacgaagccctgccatttattcaaaagagcggtaaacagcgagtcgtcgttctgggctcgggaccaatccgcataggacagggaattgagtttgactatgcctgcgttcattgcgtttggacgctaaaaagtttgggttacgaagtcatcgtaattaacaacaaccccgaaactgtctccaccgactttgacacggcggacagactgtattttgaaccgttgtgcattgacgacgtgatgagcattatagaaattgaaaaaccaatcggcgttatcgtagcctttggcggcggcaccgctataaagttgacaaagaaattacacgagcgcggcgtgaacattatcggcacttcagctgacagcatagacatctgcgaggacaggcaacgctttgacgttctgcttgaaaaattgcaaatcaaacgtccaaaagggtacggagtcttaacggaagaggaagcgttgaccgccgccgaaaaattaggcttcccggtactgatgcgcccgtcctatgtgcttggcggacagaatatgatcatcgcgttctcacaagaagatatccgcgaatacatggaaattattttacgctcaaaacaggaaaaccctgtattgatagacaaataccttgaaggccctgagatagaagttgacgctctttgcgatagtaaggacgtattaattcccggcataatggaacacattgaacgcacaggcattcattcgggggacagcatcgcggtataccccgccattaacattgacgacgcgttagccgaaagaatttttgatgttactaaaagactgtgcatggctttggacgtgaagggactgtcaatattcaatatgtcctatatgagaatgacatntacgttatcgaagtcaatcccagagcgtcccgtaccgttccgtacctcagcaaagttaccagtattccaatgtgcgaacttgccacaaaaatga

SEQ ID NO: 61492 - protein, 742 aa, Unknown
  Obtained from environmental sample
  DOMAIN (39)...(219): ATP-grasp domain
  misc_feature (1)..(742): Xaa is any amino acid
MGGQTGLTLCMQLARAGFLKKMDVRLLGSSPETIDKAEDRKLFKETMQGIGQPVIPSVVANDVGTAVKFANEIGYPLIVRPAFTLGGSGGGIATDEASLREIAANGIALSPIRQILVEQSVAGWKEIEFEVMRDRAGNVITVCSMENFDPVGVHTGDSIVIAPAVTLADKEYQMLRTASLNIIKALGVEGGCNVQLALHPDSFDYAVIEVNPRVSRSSALASKATGYPIAKVSTKIALGYTLDEITNAVTGTTFAAFEPALDYVAVKFPKWPFDKFVYAHKELGTQMKATGEVMAIADTFEEALLKAVRGAEIGLSNLNLPRLAAKSDSEISDMLKTVTDERLFILYEAIKRGVSVDELYQITKVDRWFLHGLVNIHKGLFDDNPQSIPNRDGSKLIYKMVDTCGGEFEAKTPYFYSIQNGTENEALPFIQKSGKQRVVVLGSGPIRIGQGIEFDYACVHCVWTLKSLGYEVIVINNNPETVSTDFDTADRLYFEPLCIDDVMSIIEIEKPIGVIVAFGGGTAIKLTKKLHERGVNIIGTSADSIDICEDRQRFDVLLEKLQIKRPKGYGVLTEEEALTAAEKLGFPVLMRPSYVLGGQNMIIAFSQEDIREYMEIILRSKQENPVLIDKYLEGPEIEVDALCDSKDVLIPGIMEHIERTGIHSGDSIAVYPAINIDDALAERIFDVTKRLCMALDVKGLSIFNMSYMRMTXTLSKSIPERPVPFRTSAKLPVFQCANLPQK

SEQ ID NO: 61493 - DNA, 654 bp, Unknown
  Obtained from environmental sample
  misc_feature (1)..(654): n is a, c, g, or t
ttgcaaccgccctccacgccgagcgcctttatgatgttgagcgacgccgtccggagcatctggtactctttatcggcgagcgtaacggctggggcgattacgatgctgtcgccggtgtggacgcctacggggtcgaagttctccatggagcagacggtaatcacgttgccggcgcggtcgcgcatcacctcgaactcgatctccttccatccggcgaccgactgctcaaccaaaatctggcgaattggggagagggcgataccgtttgcggcaatctccctcagggaggcttcgtccgtcgctatgccgccgccgctgccgcctagcgtgaacgccggacgcacgatgagcgggtacccgatttcattggcgaacttgaccgccgtccccacgtcgttggccaccacagacgggatcacaggctggcctataccctgcatggtctccttgaagagcttccggtcttcggctttgtcgatggtttcgggcgacgatccgagcaggcgcacgtccatttttttgaggaacccggcgcgggcgagctgcatgcagagcgtcaggccggtctggccgcccaacccggacaggatgctgtcgggacgttccttctcgattatgcgcttgatcgtcgtgagcgtcagcggctctatgtaa

SEQ ID NO: 61494 - protein, 217 aa, Unknown
  Obtained from environmental sample
  misc_feature (1)..(217): Xaa is any amino acid
MQPPSTPSAFMMLSDAVRSIWYSLSASVTAGAITMLSPVWTPTGSKFSMEQTVITLPARSRITSNSISFHPATDCSTKIWRIGERAIPFAAISLREASSVAMPPPLPPSVNAGRTMSGYPISLANLTAVPTSLATTDGITGWPIPCMVSLKSFRSSALSMVSGDDPSRRTSIFLRNPARASCMQSVRPVWPPNPDRMLSGRSFSIMRLIVVSVSGSM

SEQ ID NO: 61495 - DNA, 687 bp, Unknown
  Obtained from environmental sample
  misc_feature (1)..(687): n is a, c, g, or t
atggaaggaaatattgtagaaattgataatattcaatattcgtataacagaaaaaatatagttttaacggatttttccctgaatatcaggcgtgagggcataaccgcaatactcgggcataatggggcggggaaaacaaccctgcttcggcttcttggaaaactaattgcgccaaatgaaggcattataaaatggaatttattgccaaatgaaaaaatcggatatatgccggaagggttagggctttatcccagattgtccggttacgagaatatgaaattacaatttttaagcgcaaataaaaatcctgataaagaaatgatattgtcaattctaaataaaattgatcttggggaacatactaaaaaattgacgggttattattcgacaggtatgaaacggcggctgtctttggcatgcacgctggtaacaacgcctgaattattgctaatggacgagccgtttttggggattgacccggtaagccaaaaaataatgatcgatttgatacgtgaatacaagggaaaaaattcaaccgctgttataacaactcacgaccttaatctggtacgcaatatttgcgacagttttgtaataatacaaaatgggaaagttgtttatatatccgctgaaaatgaagatataaacaatatcgaaacaatttactttcaatacgcggggaaataa

SEQ ID NO: 61496 - protein, 228 aa, Unknown
  Obtained from environmental sample
  DOMAIN (32)...(203): ABC transporter
  misc_feature (1)..(228): Xaa is any amino acid
MEGNIVEIDNIQYSYNRKNIVLTDFSLNIRREGITAILGHNGAGKTTLLRLLGKLIAPNEGIIKWNLLPNEKIGYMPEGLGLYPRLSGYENMKLQFLSANKNPDKEMILSILNKIDLGEHTKKLTGYYSTGMKRRLSLACTLVTTPELLLMDEPFLGIDPVSQKIMIDLIREYKGKNSTAVITTHDLNLVRNICDSFVIIQNGKVVYISAENEDINNIETIYFQYAGK

SEQ ID NO: 61497 - DNA, 1011 bp, Unknown
  Obtained from environmental sample
  misc_feature (1)..(1011): n is a, c, g, or t
ttgcgccagcacggctcgngcgnccacgccgcntcatctgtttcgcggggcggagagccggctattctcgttgctaccgatgtcgcggcgcgcggacttgatatagagaatctcagccatgtcatcaactgggatcttcccaatgacagggaaacatacgtccaccgcataggcaggacggccagggccggcaaacgcggcatagcgatcagtcttgccacgctttctgacaggagccggatacaccagatttcccgaatgatggaaaagacgctgggctgcggaattttgtggcttaaagtcccgtcggtaaaggcggttatgaaggcgcttcgcaggcggatcagttccacggtgattgccgcccttcccgaacaggaacccgtccaggccgctgaaaacggcgagccattggctgacgcaacggcgcccgccggaggggaggccgccgaagccaaagaatcgcccgtagcttcgcctttccttgccaaagtttgccgcaacctgatagaccggctgggcgcggaaagggctgtcgaagccctggtaaccttaagttatggcgagtatcttgatcccggccgttatgggcctatcaccgaatttcaggaagaagatttccatgagcccgtcaaagccgccggtaaaagcgcaggcggcaaatttgccggcaggagaagggatgatcgaagggatgatcggaggcacagaattccgggcagcgtaccgcatgcgcccgcaggcaagcgtggttcgggcagggaattccgggaagagacaggggattttacgcgggtgtatgtaggccagggacggcagcacggtctgggagccagagacatagccaatctgttaatgcgggcgggcggtattccagggcgtctcgtggatgaaatagaagtgaaagactactgttcgtttgcgactcttcccgcagatgccgcaaagagagcctgcgctttttcccgcaaggatcagcagttgccggtaatacgccccgccaaaccgtaa

SEQ ID NO: 61498 - protein, 336 aa, Unknown
  Obtained from environmental sample
  DOMAIN (253)...(335): DbpA RNA binding domain
  misc_feature (1)..(336): Xaa is any amino acid
MRQHGSXXHAASSVSRGGEPAILVATDVAARGLDIENLSHVINWDLPNDRETYVHRIGRTARAGKRGIAISLATLSDRSRIHQISRMMEKTLGCGILWLKVPSVKAVMKALRRRISSTVIAALPEQEPVQAAENGEPLADATAPAGGEAAEAKESPVASPFLAKVCRNLIDRLGAERAVEALVTLSYGEYLDPGRYGPITEFQEEDFHEPVKAAGKSAGGKFAGRRRDDRRDDRRHRIPGSVPHAPAGKRGSGREFREETGDFTRVYVGQGRQHGLGARDIANLLMRAGGIPGRLVDEIEVKDYCSFATLPADAAKRACAFSRKDQQLPVIRPAKP

SEQ ID NO: 61499 - DNA, 1026 bp, Unknown
  Obtained from environmental sample
  misc_feature (1)..(1026): n is a, c, g, or t
atggttatagacgaaaatcaccctttttcttcttttgggctttcagagctggtgttacaggctattgcccgtaaaggctggaccgcgcccagttcgatccaaagtatagctctgcccaggctgcttgccgatgaggggcattgtattgtaaaggcccgcacgggcacggggaaaacagccgcctttgggataccgcttattgaaagactcacccaggccggtcatgccccgcgcgcgctgatccttgccccgacccgtgagcttgcccttcaggtttccagagaaattgcatctttggttacagggcattatcccagggtaacggctgtttatggcggcgcttccatcagaaaccagatactcgatctgcggcgcggaacggaaattgtagtgggaacacccggccgtgttatggatctgatggaacgcaagaccctggatgtttcagcggtggactggtttatcctggacgaagccgatgaaatgctggatatgggcttttttgaggatgtggaaaaaatacttgctgcggtgaagggcgccgcagcccaggccgctgaagcgggacgcaaagatggcgatagagtctctttacatatagctcttttttccgcgaccatgcccgagcctatcttanaagtagtgcgtaaacacatcggcgatgccgaaattatcgtggattccgcgcccgaagatgaaaaacccctcgttgatcagtactgcattctcgtcaggcgtgaggaacagctggaagccctcaggcggatcattgacagttccgacgaattctacggtttgatcttttgcgctacaaaggtgaaactgacgaactggcgcggaggcttgtccaggcaggttatcccgccgaggccatacacgncgatcttcccagaaaatccgggagcgtacactgcggcgtttccgtttgcgccagcacggctcgngcgnccacgccgcntcatctgtttcgcggggcggagagccggctattctcgttgctaccgatgtcgcggcgcgcggacttga

SEQ ID NO: 61500 - protein, 341 aa, Unknown
  Obtained from environmental sample
  DOMAIN (31)...(214): DEAD/DEAH box helicase
  misc_feature (1)..(341): Xaa is any amino acid
MVIDENHPFSSFGLSELVLQAIARKGWTAPSSIQSIALPRLLADEGHCIVKARTGTGKTAAFGIPLIERLTQAGHAPRALILAPTRELALQVSREIASLVTGHYPRVTAVYGGASIRNQILDLRRGTEIVVGTPGRVMDLMERKTLDVSAVDWFILDEADEMLDMGFFEDVEKILAAVKGAAAQAAEAGRKDGDRVSLHIALFSATMPEPILXVVRKHIGDAEIIVDSAPEDEKPLVDQYCILVRREEQLEALRRIIDSSDEFYGLIFCATKVKLTNWRGGLSRQVIPPRPYTXIFPENPGAYTAAFPFAPARLXRPRRXICFAGRRAGYSRCYRCRGART

SEQ ID NO: 61501 - DNA, 2529 bp, Unknown
  Obtained from environmental sample
  misc_feature (1)..(2529): n is a, c, g, or t
atgaaaacgttattcggcaaattgttattatcattcggcatcataatctttatgatgatctcttcggtactggcaagtttctatctggtttattcaaaaagctatgaaaagcagataatatcggaaaattcagaggagacgatgaatatggtgcgatccctgcaagcattcatcaacgccgcttacaaagaaattgaagaccttgctttcgaaagcgacgttgtttcgatggatacacagcggcagacccatgtcttcgtggattccgcacgaagaaacgattattttgaactcctctacgctcagggcatggacggaatgcaaacaggacgatcatcgggtactctgggcaaccggaaagaacgctggtggtttgctcaaatggaacaaatcaaaaaaccatttgtctcggaatcatattattcggtaggcaccaacatgcccgtcacctcgattttttatccaataatggatgaagggcaaatgattggcatcatggcgggcgatataaagctttccgcccttcacgatatggtcattgaaatggcggatgaaggctcctattcctttatactggatggcaaaggcgtagtcgtagcccacccggacagcacctatcaggaggaaatgtacaattacgcgaaattcaccaagaccgtaaccgtaaaagacagggatgggaaacccgtgcaaaacgcccagggaaatgtaaccgaagaacagccatttgttatttcgcaagcctacaaggccgccatagcggacatgatgaagggaaataaaggcaccgtgaaattcgatgaggaaggaaaaaccatttacttgtcttaccagccggctccgatgaacggtgcgtcagatccctggtatgtgctttcagtcatggacatggaagtggccatgcggacaagaaatgaggtaattttggcgatattgacaagctgcgcggtcattattctgcttgccctggtgattgtctttttcattgccaggacaatcgtttcgcccataaaagagatacaactgtttctgggaaaagtaaaggacggagatttaaccgaaaaagtaaccgtaaaatcccgtgatgaaatcggaaatcttgcggattacttaaaccttacaatagaaaacataagaaaccttatagggacaatgaagcataaaatcaacgcgctgaccaacaccggacatgaactctcttcaaacatggcaaaaacttccgaatcgatagaccagatttcatttaattttgagggcatgaaagccaaaatgagcaagcaggaagagagcgccagcgaagcggacaaagcggttaacaagataaaagtcaatattgacaacatgaacaggctgatagatgatcagtccgccagtatcaatacctcgtcttccgcagttgagcaaatgaccgccaatattcattcggtaacgcacacccttatagaaaacagcaaaaatgtcagcgaattgaccgaagcgtccgagaacgggaaagtcggagttcaaacggtatcggaaaaaataaaggaaatagcgcggcaatccgaagggcttctggaaataaacgcggtaatggaaaacatagccgcccagaccaacctgctttccatgaacgccgctattgaggcggcgcacgccggggaagtggggaaggggtttgccgttgtcgccggtgaaatccgcaaacttgccgaatcgtcaagcgcgcagtcaaagtcaaccgcggacatgttaaaaaagataaaagcgtccatagacggaataacggcgtcttccaacgacgttctctcgcgtttcgggattattgacgagaaagtaaaaacggtttcaacacatgaggtaaatatccgtaacgcgatggaagaacaggaagtgggcggtaaacaaatacttgattccatagaacgcttaaaagaaatcagcgtaacggtcaaacagggcgcgggtgaaatgcatgaatcangcgataacctgaaccggcagacttccgaattcatagcaatcagcaatgagtccatgagcggcatgaacgacataatatacggcgcgatgaaggaaataaaatcggcggtaactgttgtagacgagatgagcgccgagaacaacaagaactttgaagatctaaagaaggaatcggtaaaattcaaggtagaaacaggtaacgagaaaaaaaaggtcattgtggttgatgatgatgaaaccgtcctcactttgacaaataaaatgttggaaaacgattatgatgtgagtacagtcaattcaggaaaagcggcattgaatttgttctttcagggatatgatccaaatttggtgttattggatttgaatatgcctgaaatgggcggatgggatacccttatcagaattcgggacatcagcaaattgcacaagaccccgatagcgattttcacatcttcgaacgatccgagagacagggccaaagcgcaggagatgggagcggttgattatataaacaaacctatcaaaaaagccgaattgcttgaaaaggtggcaaggttactgcgttaa

SEQ ID NO: 61502 - protein, 842 aa, Unknown
  Obtained from environmental sample
  SIGNAL (1)...(25)
  DOMAIN (136)...(214): Cache domain
  misc_feature (1)..(842): Xaa is any amino acid
MKTLFGKLLLSFGIIIFMMISSVLASFYLVYSKSYEKQIISENSEETMNMVRSLQAFINAAYKEIEDLAFESDVVSMDTQRQTHVFVDSARRNDYFELLYAQGMDGMQTGRSSGTLGNRKERWWFAQMEQIKKPFVSESYYSVGTNMPVTSIFYPIMDEGQMIGIMAGDIKLSALHDMVIEMADEGSYSFILDGKGVVVAHPDSTYQEEMYNYAKFTKTVTVKDRDGKPVQNAQGNVTEEQPFVISQAYKAAIADMMKGNKGTVKFDEEGKTIYLSYQPAPMNGASDPWYVLSVMDMEVAMRTRNEVILAILTSCAVIILLALVIVFFIARTIVSPIKEIQLFLGKVKDGDLTEKVTVKSRDEIGNLADYLNLTIENIRNLIGTMKHKINALTNTGHELSSNMAKTSESIDQISFNFEGMKAKMSKQEESASEADKAVNKIKVNIDNMNRLIDDQSASINTSSSAVEQMTANIHSVTHTLIENSKNVSELTEASENGKVGVQTVSEKIKEIARQSEGLLEINAVMENIAAQTNLLSMNAAIEAAHAGEVGKGFAVVAGEIRKLAESSSAQSKSTADMLKKIKASIDGITASSNDVLSRFGIIDEKVKTVSTHEVNIRNAMEEQEVGGKQILDSIERLKEISVTVKQGAGEMHESXDNLNRQTSEFIAISNESMSGMNDIIYGAMKEIKSAVTVVDEMSAENNKNFEDLKKESVKFKVETGNEKKKVIVVDDDETVLTLTNKMLENDYDVSTVNSGKAALNLFFQGYDPNLVLLDLNMPEMGGWDTLIRIRDISKLHKTPIAIFTSSNDPRDRAKAQEMGAVDYINKPIKKAELLEKVARLLR

SEQ ID NO: 61503 - DNA, 708 bp, Unknown
  Obtained from environmental sample
  misc_feature (1)..(708): n is a, c, g, or t
gtgaggacggtttcatcatcatcaaccacaatgaccttttttttctcgttacctgtttctaccttgaattttaccgattccttctttagatcttcaaagttcttgttgttctcggcgctcatctcgtctacaacagttaccgccgattttatttccttcatcgcgccgtatattatgtcgttcatgccgctcatggactcattgctgattgctatgaattcggaagtctgccggttcaggttatcgcntgattcatgcatttcacccgcgccctgtttgaccgttacgctgatttcttttaagcgttctatggaatcaagtatttgtttaccgcccacttcctgttcttccatcgcgttacggatatttacctcatgtgttgaaaccgtttttactttctcgtcaataatcccgaaacgcgagagaacgtcgttggaagacgccgttattccgtctatggacgcttttatcttttttaacatgtccgcggttgactttgactgcgcgcttgacgattcggcaagtttgcggatttcaccggcgacaacggcaaaccccttccccacttccccggcgtgcgccgcctcaatagcggcgttcatggaaagcaggttggtctgggcggctatgttttccattaccgcgtttatttccagaagcccttcggattgccgcgctatttcctttattttttccgataccgtttga

SEQ ID NO: 61504 - protein, 235 aa, Unknown
  Obtained from environmental sample
  SIGNAL (1)...(21)
  misc_feature (1)..(235): Xaa is any amino acid
MRTVSSSSTTMTFFFSLPVSTLNFTDSFFRSSKFLLFSALISSTTVTADFISFIAPYIMSFMPLMDSLLIAMNSEVCRFRLSXDSCISPAPCLTVTLISFKRSMESSICLPPTSCSSIALRIFTSCVETVFTFSSIIPKRERTSLEDAVIPSMDAFIFFNMSAVDFDCALDDSASLRISPATTANPFPTSPACAASIAAFMESRLVWAAMFSITAFISRSPSDCRAISFIFSDTV

SEQ ID NO: 61505 - DNA, 333 bp, Unknown
  Obtained from environmental sample
  misc_feature (1)..(333): n is a, c, g, or t
gtggatcttgaccagcttgacacggcgcagctgcttgccgattcaggcggtgacgtatttaccgccgcccgtgacggaaaaacacccgcggaagccgccctctccaaaggcgccgaggtggtaagacagctcttttcggggcccgccattaacgccagggattcatcaggaaatacgatacttcattacgccgcgaaacatggggatccctcacttgtttcccttctgatttcactgggcgcgaataaggcggtgaaaaacatctcttccgaaagcccggcggatatcgcgctgcgctggagaaacaacgcggccgcagcattgctgaattag

SEQ ID NO: 61506 - protein, 110 aa, Unknown
  Obtained from environmental sample
  DOMAIN (56)...(88): Ankyrin repeat
  misc_feature (1)..(110): Xaa is any amino acid
MDLDQLDTAQLLADSGGDVFTAARDGKTPAEAALSKGAEVVRQLFSGPAINARDSSGNTILHYAAKHGDPSLVSLLISLGANKAVKNISSESPADIALRWRNNAAAALLN

SEQ ID NO: 61507 - DNA, 894 bp, Unknown
  Obtained from environmental sample
  misc_feature (1)..(894): n is a, c, g, or t
gtgctctcttgggaagacttggcggcgcaaagcgcgaacgcgaattcaaagactaagggtaaagataaggagcgcgacagctctcggtatcaatacagatacggcatcgccgcttacaagccggagaattgcactataccgtctatacgctttttagtcaacacggtggatggcggcggtgttgatgccgttagtagtgataatagcggtattaatgtcgatagcggcgtcgggttcagcgtcggttatgcggtaaacaatacaagttacgataccttgtcgacccaacccatccctataaggatgctctccgccattcccgacgacccccctgacagcggcgggttcgctttgaaggatttgaaggggcagcagagtaccggcggggccgatctgtggtatctgtggattatcttaggggcggccttggccgtcgcggcgtttatactgataagaaaatatctcaataagaagggtgccgccgccgacgcgcctatagttccgctcttgccgccgtacgatgaggctatgggggccatagacgcgctcgacgggaaaaagtatctggagcgcggcatggtgcgcgaatacgtcttcgaactctccgagatattcaagcgctacatagggcgccgctacgacactatcgcgccggagctcaccaccgaggagataacggcgtggctcgagttcgccgatatcagccgcgagatgcggatgtgcgcggagcgcttcttccgttccagcgatcaggtaaaattcgcgaagtgggtgccggatagatcgtgcatagacgggtacatgaaggacgttatgatgtttatagaggccaccaagcccgacccggcgctgccttacgagcgcaagacggagaggatgggggttgtgcaatga

SEQ ID NO: 61508 - protein, 297 aa, Unknown
  Obtained from environmental sample
  misc_feature (1)..(297): Xaa is any amino acid
MLSWEDLAAQSANANSKTKGKDKERDSSRYQYRYGIAAYKPENCTIPSIRFLVNTVDGGGVDAVSSDNSGINVDSGVGFSVGYAVNNTSYDTLSTQPIPIRMLSAIPDDPPDSGGFALKDLKGQQSTGGADLWYLWIILGAALAVAAFILIRKYLNKKGAAADAPIVPLLPPYDEAMGAIDALDGKKYLERGMVREYVFELSEIFKRYIGRRYDTIAPELTTEEITAWLEFADISREMRMCAERFFRSSDQVKFAKWVPDRSCIDGYMKDVMMFIEATKPDPALPYERKTERMGVVQ

SEQ ID NO: 61509 - DNA, 615 bp, Unknown
  Obtained from environmental sample
  misc_feature (1)..(615): n is a, c, g, or t
gtgcatagacgggtacatgaaggacgttatgatgtttatagaggccaccaagcccgacccggcgctgccttacgagcgcaagacggagaggatgggggttgtgcaatgacattcaaaaacccgtacttcttctacatgctcatactggtcgccccgatgctctggctgtacgtcaggcgggagcgccgatataaggtaaccgtcgccttttccgatttgtcaatcataaaaaaactgccggagtcgccgtataggtggttgcgccacgttttgattgtgatgcgcgtcgccggtttttgttttttggttgtggcgcttgcccgcccgcagaagcagcacacggaggtggaggtaactacggagggtgtcgatataatgctcatacttgacatatcggaaagcatgaaggcgcttgacttcaagcctgacgaccggttgaccgtggccaagcgggagataaaaaatttcgtgaccaaacgggagaatgaccgcatggggctcgttctcttcgcggcgcgcgcctttacgcgttgtccgctgactaacgattacggcgttctcattcagatgatcgacgccgcggactacaccgactttccaaccagacggccatag

SEQ ID NO: 61510 - protein, 204 aa, Unknown
  Obtained from environmental sample
  misc_feature (1)..(204): Xaa is any amino acid
MHRRVHEGRYDVYRGHQARPGAALRAQDGEDGGCAMTFKNPYFFYMLILVAPMLWLYVRRERRYKVTVAFSDLSIIKKLPESPYRWLRHVLIVMRVAGFCFLVVALARPQKQHTEVEVTTEGVDIMLILDISESMKALDFKPDDRLTVAKREIKNFVTKRENDRMGLVLFAARAFTRCPLTNDYGVLIQMIDAADYTDFPTRRP

SEQ ID NO: 61511 - DNA, 435 bp, Unknown
  Obtained from environmental sample
  misc_feature (1)..(435): n is a, c, g, or t
atgatcctcttgaccgacggggccaacaacgccggcgaaatcccgccgcagaccgccgcaaaagccgccggagagcttggcataaagatatactccataggagtgggcaaagaggggcaggttccattccctgtggatatagtcaacccgcaaacaggcagacgcacacagaggatacagatgatgcagtcggacataaacgaaaaagagctggccgaaatagccaaatcgaccggcggagccttcttcagagcgcagaacgcggagtctttgaaaaggatatacgaggaaattgacaaaatggaaaaaacggagatcaaatccattagccacgtgtcgtattcggaatatttttataaatggctatggataggattcatagtattggcggcggagatgctgctgcagaatactgttttcaggcggattccgtga

SEQ ID NO: 61512 - protein, 144 aa, Unknown
  Obtained from environmental sample
  misc_feature (1)..(144): Xaa is any amino acid
MILLTDGANNAGEIPPQTAAKAAGELGIKIYSIGVGKEGQVPFPVDIVNPQTGRRTQRIQMMQSDINEKELAEIAKSTGGAFFRAQNAESLKRIYEEIDKMEKTEIKSISHVSYSEYFYKWLWIGFIVLAAEMLLQNTVFRRIP

SEQ ID NO: 61513 - DNA, 1506 bp, Unknown
  Obtained from environmental sample
  misc_feature (1)..(1506): n is a, c, g, or t
ttgaaaataatattgaacaatgttgaaagcggcattattataattgacgctgagactcgtaaaatattggatataaacccgtttgttgcgcgcttgcatggcggcgacagagataaaattatcggacaaagctgcaaaatacttttttgcacagaggaaggctgtcctatactggattatcaacggtcattagatcattccgagcggcaatttaaaaccgcgggcggcgaaattgttccggttataaaatccgtatcaaaaatcaattataacggacgtcccgcattgctggagaattttgcggatatatcgtatttaaaagaggctgaggaagcaaagagcgcgtcagaggcaaagagccgctttatcgcaaacatgagccacgaaatacgcacgcctcttaacgcgataaccggtatgacaacaatcggcaaaaccgcggataatttggaacgcaaagattacgcgtttgacaagatcaaagacgcgtcggcgcatttgctcggcgttattaacgacatactggatatatcaaaaatagaagcaaatatgctggaactgtctcccgctgaattcgattttgagaatatgatgcaaaaaattgttacggttatcaatttccgcgtggacgaaaaacagcaaaaactttcgatctatattgacggtgaaattcctcaaacccttatagccgatgatcagcggcttgcccaggttattaccaatcttttgagtaacgcggtaaaattcactccggaaaaaggatcggtcactcttgacgcgcgctgtattaaagtggaagaagatgtttgcacaatacaaatctccgtaacagatacgggaatcggcataaccgatgaacagcaaaaactcttattcaagtcctttcagcaagccgagagcagcacgacgcgcaaatacggcggcacggggctggggcttgcgatttccaaaagcattgtagaaatgatgggcggcaaaatatggattaaatcgggaccggaaggcggctctacttttagttttacaatcatggcgaagaaaggcaaaaccgcggaaaccaatgcgcataacgccgggggcggtcttcaagcggatggaacggcaaatattaacggacttttcacaggacggcgtattttgctggtagaagacgtggaaataaaccgtgaaatcgtacttgccctgcttgaaccgacgcaaatggagatagactgtgcggaaaacggcgtggaagccgtgcgcatgttcagtgaaactccggacaagtacgagttgatttttatggatgtgcagatgcccgaaatggacggctacgaggcgacgcggcgtattcggtcgctggatacgccgaaggggaaaaccgtcccgattgtagccatgaccgcaaacgcgttccgtgaaaatgtggaagaatgtcttgccgccggcatgaacgatcatatcgggaaaccgcttgattttgataaagttattgagaaattgtgtgcttatttgttgaaggaatag

SEQ ID NO: 61514 - protein, 501 aa, Unknown
  Obtained from environmental sample
  DOMAIN (118)...(183): His Kinase A (phosphoacceptor) domain
  misc_feature (1)..(501): Xaa is any amino acid
MKIILNNVESGIIIIDAETRKILDINPFVARLHGGDRDKIIGQSCKILFCTEEGCPILDYQRSLDHSERQFKTAGGEIVPVIKSVSKINYNGRPALLENFADISYLKEAEEAKSASEAKSRFIANMSHEIRTPLNAITGMTTIGKTADNLERKDYAFDKIKDASAHLLGVINDILDISKIEANMLELSPAEFDFENMMQKIVTVINFRVDEKQQKLSIYIDGEIPQTLIADDQRLAQVITNLLSNAVKFTPEKGSVTLDARCIKVEEDVCTIQISVTDTGIGITDEQQKLLFKSFQQAESSTTRKYGGTGLGLAISKSIVEMMGGKIWIKSGPEGGSTFSFTIMAKKGKTAETNAHNAGGGLQADGTANINGLFTGRRILLVEDVEINREIVLALLEPTQMEIDCAENGVEAVRMFSETPDKYELIFMDVQMPEMDGYEATRRIRSLDTPKGKTVPIVAMTANAFRENVEECLAAGMNDHIGKPLDFDKVIEKLCAYLLKE

SEQ ID NO: 61515 - DNA, 852 bp, Unknown
  Obtained from environmental sample
  misc_feature (1)..(852): n is a, c, g, or t
gtgcccagagccttgatcacctcttttttgatagggcccccgggtttgggcaaaaccacgctggcgcaggttgtggcaaacgagcttgaaacaggttttacgcagacatccgcgccggctatggacaagcccaaagaccttgtaggacttcttaccaacctgaaaaaaggcgatgtgttttttatagacgagatacacaggctcaaaccggccattgaggaacttctgtatatcgctatggaagattatgagcttgactggattgtggggcaggggcctatggcaagaaccttaagaatccccatacagccttttactctagtcggggccactaccaaggcgggtattgtttcaggcccgcttatcagccgcttcggaattacctgccgtttttcgttttacgagcaagaggatatggaagccatagtaaggcgatcagccggactgctcaatgtaaaaatcgacaatgacgcggctgtactgctggcaaaatcctcaagaggaacgccgagagttgtaaaccggctgctcagacgtatgagggattatgcccagtatgccggaagttccagtattacgttaactgttgttaaagacgggttaacaaagctggaaattgacgcgctggggcttgaaaagcaggatagagacatattgagaatcataatcgaacgataccagggcgggcctgttggggctgaaacccttgccatctccataggcgagtccgtggaaactcttgaggattattacgagccctaccttatacaaagcggactgttacagcgcacgccccgcggaaggatggtcacatccctgggcttacggtcatttgggggtgccccccgttaa

SEQ ID NO: 61516 - protein, 283 aa, Unknown
  Obtained from environmental sample
  DOMAIN (7)...(134): ATPase family associated with various cellular activities (AAA)
  misc_feature (1)..(283): Xaa is any amino acid
MPRALITSFLIGPPGLGKTTLAQVVANELETGFTQTSAPAMDKPKDLVGLLTNLKKGDVFFIDEIHRLKPAIEELLYIAMEDYELDWIVGQGPMARTLRIPIQPFTLVGATTKAGIVSGPLISRFGITCRFSFYEQEDMEAIVRRSAGLLNVKIDNDAAVLLAKSSRGTPRVVNRLLRRMRDYAQYAGSSSITLTVVKDGLTKLEIDALGLEKQDRDILRIIIERYQGGPVGAETLAISIGESVETLEDYYEPYLIQSGLLQRTPRGRMVTSLGLRSFGGAPR

SEQ ID NO: 61517 - DNA, 1065 bp, Unknown
  Obtained from environmental sample
  misc_feature (1)..(1065): n is a, c, g, or t
ttgaggattattacgagccctaccttatacaaagcggactgttacagcgcacgccccgcggaaggatggtcacatccctgggcttacggtcatttgggggtgccccccgttaatgcccggcaacgaaaagggttccctgttttaaatatgaaaacaagcgattttttctttgagcttcccgatgaactaatagcccagtatccgcctgaaaaacgcgggcagagccggcttatgctgcttaaccgactgaccggaaaacgctcgcaccacatggtagaagaactgcctgaaattttatgcgggcctgaattccgtggcaaagacggcggcttgcccctgttggttttcaataattcaaaagtccgtaaagcgcggcttataggcgtgtcgcaggagacaggcgcgaaagcggagtttttgttggtggaacctactccccactccctactccccactccccattcctcaacatggaaaacccttgtgaaacgggcgaaacggcgcaagattggcagcgtttatgttttttatgacaacaacggcgtggaaattaccagggctgaaattattggcggggaaggggactttaagcatctggcgtttgaccgtcccattgacgatgactggcttgacctttacgggcatataccgctgccgccctatattaagcggcaggacgctccttccgactccgaacgctaccagacagtgtacgcttccgcctgcggttcgtcggcggcgccgacagcgggactgcattttaccaatgagctgcttgagcgcattggcgcggcggggattgaaagcgtttttatcacgctccacgttgggcttggtaccttcttgcctgtgagaagcgaaaacatcgaagaccatgttatgcacagggagcttttcagcattgacgatcaatcagccttaaaaatcgaatcggcaaaggcagaagggcgcaagatcgtcgcggtggggactacgagcgcgcgtacactggaaagcgcgtgggattcangagcgataaaaagaggggagaatgctacttccatttttatataccccgggctataa

SEQ ID NO: 61518 - protein, 354 aa, Unknown
  Obtained from environmental sample
  DOMAIN (50)...(286): Queuosine biosynthesis protein
  misc_feature (1)..(354): Xaa is any amino acid
MRIITSPTLYKADCYSARPAEGWSHPWAYGHLGVPPVNARQRKGFPVLNMKTSDFFFELPDELIAQYPPEKRGQSRLMLLNRLTGKRSHHMVEELPEILCGPEFRGKDGGLPLLVFNNSKVRKARLIGVSQETGAKAEFLLVEPTPHSLLPTPHSSTWKTLVKRAKRRKIGSVYVFYDNNGVEITRAEIIGGEGDFKHLAFDRPIDDDWLDLYGHIPLPPYIKRQDAPSDSERYQTVYASACGSSAAPTAGLHFTNELLERIGAAGIESVFITLHVGLGTFLPVRSENIEDHVMHRELFSIDDQSALKIESAKAEGRKIVAVGTTSARTLESAWDSXAIKRGENATSIFIYPGL

SEQ ID NO: 61519 - DNA, 687 bp, Unknown
  Obtained from environmental sample
  misc_feature (1)..(687): n is a, c, g, or t
ttgaggacgctgattaaggaggctcccgcactgggggcttacggccttggctatgcttcctcaatgatcctctttgtcatagccaacaaactaaccgcttcggcaaacgcgataatgctgcaatacacggctccggtgtgggccgcgctgtttgggtggatgtttctgcgggaacgtccccggtccgagcattgggccgcgatggcgcttgtcggcctgggaatgtttttcgtgttcaggggcggcattgcggcaggttcttttttgggcgatatattagcgctggtgtccggcgttttgtttgcggcaaaccccgtgttgttacgcgcaagagaagacttaaatcccaccgacatcatgttatattcccatataacctgcgcgcttgtttccgccccgtttttctttttataccctccggccccaaccgcaaaatattttttatcggttatctatatgggtatattccagcttggtatggcttcagccctgtttgcctacgggatcaggcgcatatccgccgtacaggcgatgctgaccgccacgattgagccggttcttaacccgatctgggttctgcttgcgcttggagaaaaaccgtcgttatctgtaattatagggggcggcattataatcggcgccgttattttttcctctacactatcagcattgcgtcgccgtaactga

SEQ ID NO: 61520 - protein, 228 aa, Unknown
  Obtained from environmental sample
  DOMAIN (95)...(220): Integral membrane protein DUF6
  misc_feature (1)..(228): Xaa is any amino acid
MRTLIKEAPALGAYGLGYASSMILFVIANKLTASANAIMLQYTAPVWAALFGWMFLRERPRSEHWAAMALVGLGMFFVFRGGIAAGSFLGDILALVSGVLFAANPVLLRAREDLNPTDIMLYSHITCALVSAPFFFLYPPAPTAKYFLSVIYMGIFQLGMASALFAYGIRRISAVQAMLTATIEPVLNPIWVLLALGEKPSLSVIIGGGIIIGAVIFSSTLSALRRRN

SEQ ID NO: 61521 - DNA, 342 bp, Unknown
  Obtained from environmental sample
  misc_feature (1)..(342): n is a, c, g, or t
atgaaaagaagggcgcttatcagcgtgttttacaaagacgggattctggatttggtttcgtatctgaacggcagcggctgggagattctttcaaccggcggcacatcaaaatatttaatggataataatattcccgtaaccgatgttgcctcggtgacgggttttccggaatgtcttgacggcagggtaaagaccctgcaccccgcaatacacgccggccttcttgcccgccgcgatgaaagaacccacatggatacattacatgcgctggggctcgcggctatcgatcttgtctgcgtcaacctgtacccgttttttgaaaaggtacagngcaaagnctga

SEQ ID NO: 61522 - protein, 113 aa, Unknown
  Obtained from environmental sample
  DOMAIN (14)...(110): MGS-like domain
  misc_feature (1)..(113): Xaa is any amino acid
MKRRALISVFYKDGILDLVSYLNGSGWEILSTGGTSKYLMDNNIPVTDVASVTGFPECLDGRVKTLHPAIHAGLLARRDERTHMDTLHALGLAAIDLVCVNLYPFFEKVQXKX

SEQ ID NO: 61523 - DNA, 630 bp, Unknown
  Obtained from environmental sample
  misc_feature (1)..(630): n is a, c, g, or t
atggcagttgaagtaaaaatcatggctctggtttcgggcggcgggacaaatctacaggccctgcttgacgcgcagaaaaacggggcgttcgcttccggcgactcaggaggcaaaatcgtcctcgttgtgtcagacaactccaaggcatacgcgctggaaagggcaaaagccgccggagttagcgtagctgtggaggagccggacaaacgcatcaccagggatgagcgccggcaggaactgtcagatcgtattctcaggttagctgacacttatcatattgatcttatcgttctggcaggttttctttcgatattgaagggagagattgtcaggcgctatgcgggcaggatcatcaatctgcacccaagcctgctgcccaaattcgggggcgacggaatgtacggcatgcgtgtacaccgcgcggtgctggatgccggggaaaaggaatccggctgtacggtgcaccttgtggacactggagtcgataccgggcctatacttttgcggcgcaaggttccggtactgtcaggcgacacgccggataccctggcggaaaggatacatacggaagaacatatcgccattgtggaagcggtaaaaataatggtagaacggataaagaacgattaa

SEQ ID NO: 61524 - protein, 209 aa, Unknown
  Obtained from environmental sample
  DOMAIN (5)...(199): Formyl transferase
  misc_feature (1)..(209): Xaa is any amino acid
MAVEVKIMALVSGGGTNLQALLDAQKNGAFASGDSGGKIVLVVSDNSKAYALERAKAAGVSVAVEEPDKRITRDERRQELSDRILRLADTYHIDLIVLAGFLSILKGEIVRRYAGRIINLHPSLLPKFGGDGMYGMRVHRAVLDAGEKESGCTVHLVDTGVDTGPILLRRKVPVLSGDTPDTLAERIHTEEHIAIVEAVKIMVERIKND

SEQ ID NO: 61525 - DNA, 810 bp, Unknown
  Obtained from environmental sample
  misc_feature (1)..(810): n is a, c, g, or t
gtgcgtcgggtgcaggcccctgttctttctggattaccttgcctgtgggaaactcgacgcggacagtggcggcggatattgtcagaggcttcgctattggctgctcgtgaaacgggcagcgcgttgcttggcggggagaccgccgaaatgcccggattctacgaaaacggaaaatatgacatagccggtttttcagtcggcattgttgaccgcaaaaaaatagtagacggctccaaaatccgcgaaggggacgcgctgctgggaataagctcgtctggaccgcactcaaacggtttcagcctgatacgcaaaataatcccggatctgaacgaggactttggcggaatgcccatcggcatggcccttctggaaccaacgcgcctgtatgccaaacctgtattaagtttgatggaaaaaatcgagatacgcggtatggctcatattacgggcggcggcttctacgaaaacattccccggatttttgcccagcgtaaatataccgcggtgatccggcaaggttcctggaatattccgccgattttcgccaggcttgccgcgggctgttataacgccggctgctccggccccttggcccaaaggcagggagctgaactgttgaaagtcgacgcggcattacaaaaacaaatgtttaatacctttaacatgggcatcggtttcgttcttgccctttcaccctctgatgtgaaggcggcgaaagagcatttggacaactgcggttttccttcatgggaaatcggctatgttgaaaaagccgccggggataccgcgcagggtttacggatacaataa

SEQ ID NO: 61526 - protein, 269 aa, Unknown
  Obtained from environmental sample
  DOMAIN (81)...(266): AIR synthase related protein, C-terminal domain
  misc_feature (1)..(269): Xaa is any amino acid
MRRVQAPVLSGLPCLWETRRGQWRRILSEASLLAARETGSALLGGETAEMPGFYENGKYDIAGFSVGIVDRKKIVDGSKIREGDALLGISSSGPHSNGFSLIRKIIPDLNEDFGGMPIGMALLEPTRLYAKPVLSLMEKIEIRGMAHITGGGFYENIPRIFAQRKYTAVIRQGSWNIPPIFARLAAGCYNAGCSGPLAQRQGAELLKVDAALQKQMFNTFNMGIGFVLALSPSDVKAAKEHLDNCGFPSWEIGYVEKAAGDTAQGLRIQ

SEQ ID NO: 61527 - DNA, 1362 bp, Unknown
  Obtained from environmental sample
  misc_feature (1)..(1362): n is a, c, g, or t
ttggaggttagtatgtcagatttctatgtggggaataaagagtatttcccaaaaatcggaaagatcaaatacgagggaccaaaaagcagcaatccgctggccttcaagtattatgatgcggaaaagaaagtcggtaaaaagaagatgaaggatcacctgcgttttgcggtagcctactggcacagtttctgcgctgacggtaccgacccctttggttcagccacccatagccatccctggagcaaagacgcgaagactccgatggaagccgccgatcataaaatggatgccgcgtttgaattttttaccaagctgggcgcgggtttgtactgcttccatgacagggatgtcgcgcctgaaggagccacccccgccgaaagcgagaaaaatcttttcacgctggtagccaaggcaaaaaaacttcagaaagccaccggcgtcaaactgctgtggggaacggcgaatgtattcagcaatccccgtttcatgaacggcgccgctaccaaccctgaatttggcgttgtagcgcttgccgccacccaggtaaaagcggccattgacgccacgattgaactcggcggccagggctataccttctggggcgggcgcgaaggctacatgagcctgctcaataccgaccttaaaaaagaaaaagaaaatcttgcccgtttccttaccatggcgcgggattatgggcgcaaacagggctttaagggccccttctatattgaaccaaaaccgatggagccgaccaaacaccagtacgattttgacacggaaactgttataggcttcctgcgccagtggggtcttgaaaaagattttcgcatgaacatcgaagccaaccacgccgagcttgccggccatgaatttgcccatgagcttgaaactgccgccgccgccggcttcttcggctccgtggacgccaaccgcggcgacgcgcagaacggctgggacacagaccagttcccatacagttattacgaaaccgcaatggcaatgtacgcaatacttaaagcgggcggttttaccaccggcggccttaactttgactcaaaaatccgccgcaactcggttgatcccgccgacctcttcatcgcccacatcgggggcatggacgccttcgccgtcggccttgaagtcgccaaccggataatcgtagacggaaaaattccttcttttgtcaagaaacgctatgcttcgtttaacaccggcgacggcgtgaaattcagcaaaggccaaatgaccctggagcagcttgcggaaatcggcgccaaagccggttatggcaagaccggccttaccagcggcaagcaggaatatatggaaaacgttttgaatcaatatttgttcgggctgtaa

SEQ ID NO: 61528 - protein, 453 aa, Unknown
  Obtained from environmental sample
  DOMAIN (95)...(314): Xylose isomerase-like TIM barrel
  misc_feature (1)..(453): Xaa is any amino acid
MEVSMSDFYVGNKEYFPKIGKIKYEGPKSSNPLAFKYYDAEKKVGKKKMKDHLRFAVAYWHSFCADGTDPFGSATHSHPWSKDAKTPMEAADHKMDAAFEFFTKLGAGLYCFHDRDVAPEGATPAESEKNLFTLVAKAKKLQKATGVKLLWGTANVFSNPRFMNGAATNPEFGVVALAATQVKAAIDATIELGGQGYTFWGGREGYMSLLNTDLKKEKENLARFLTMARDYGRKQGFKGPFYIEPKPMEPTKHQYDFDTETVIGFLRQWGLEKDFRMNIEANHAELAGHEFAHELETAAAAGFFGSVDANRGDAQNGWDTDQFPYSYYETAMAMYAILKAGGFTTGGLNFDSKIRRNSVDPADLFIAHIGGMDAFAVGLEVANRIIVDGKIPSFVKKRYASFNTGDGVKFSKGQMTLEQLAEIGAKAGYGKTGLTSGKQEYMENVLNQYLFGL

SEQ ID NO: 61529 - DNA, 1626 bp, Unknown
  Obtained from environmental sample
  misc_feature (1)..(1626): n is a, c, g, or t
atgatcggaacaaaaggaacggtagtagccgttaacggcaatatggtaagcgtccgttttgacggtattgtttccatgaacgaggtcggctatgtaaaggtcgccgattcaaaactgaaaagcgaagttatccggattcgcggcaatatcagccagctgcaggtttttgaaattaccaaaggcattactgtcggcgatgaagttgagtttaccggagacatgttgtcggtcgaagtagggccgggattgttgggccaggtttatgacggccttcaaaacccactgcctcagctcgcgaaagccgccggttacttccttgaaaggggcgtttacatagaccctctgccgggagattcaagttggcagtttacgcccaaggtaaaagaaggcgacaaagtggaacgcgccgacaccctcggcacagtgccggaaggttcctttacccaccgcatcatggttccgttttatctttacggctcatacaccgtatcctgggtcaaacccgaaggcacctataaaattcacgacacaattgcggaacttaaagacgaaaaaggaaacgcaatacaggttaaattaagcttccgctggccggtaaaacgcgccgttgactgttacgaagagcggcttaaacccgtagacccgatggttacacgcgttcgccttatcgacactttcttcccggtcgcacgcggcggaacttactgtattccaggccccttcggcgctggcaagacggttcttcagcagataaccagccgttttgcggacgttgatatcgtaattgtcgctgcctgcggtgagcgcgccggcgaggttgtcgaaacccttaaggaattccccgaattaaaagatgaaagaacaggccgctcccttatggaacggacaatcattatttgtaacacttcttccatgccggtcgccgcgcgcgaagcgtcggtttatacggcggtaacccttgccgagtattacaggcagatgggcttgaatgtccttttacttgccgattcaaccagccgttgggcgcaggcaatgcgtgaaatgtccggccgccttgaggaaatccccggtgaggaagcgttccccgcttacatggaatcgacaatcgccaacttctacgaaagagccggtattgtgcggcttcgcgacggaagcatcggctcagtaaccatcggcggcaccgtaagcccggcgggcggtaactttgaagaaccggtaacgcaggcgacgctgaaagttgtcggcgcttttcacggtcttagccgcgagcgttccgatgcccgtaagttcccggctattcacccaatggattcctggtcaaagtacaagggaattattccctcagaaaaagtggaatatgcccacggttttatgcgccgtggcagtgaagttgaacagatgatgaaggttgtaggcgaagaaggtacaagtatcgaagactacattgtttacctgaagggcgaccttatcgactccgtttatttccagcaaaactcgtttgatgccgtagatgccgccgttaaaccggaaaggcaaaaatatgtgtttgctaaactgcttgttgttttggcgtcccagttttctttttccgataaaaacgaagcgcgaagctggttaacaggctaa

SEQ ID NO: 61530 - protein, 541 aa, Unknown
  Obtained from environmental sample
  DOMAIN (8)...(72): ATP synthase alpha/beta family, beta-barrel domain
  misc_feature (1)..(541): Xaa is any amino acid
MIGTKGTVVAVNGNMVSVRFDGIVSMNEVGYVKVADSKLKSEVIRIRGNISQLQVFEITKGITVGDEVEFTGDMLSVEVGPGLLGQVYDGLQNPLPQLAKAAGYFLERGVYIDPLPGDSSWQFTPKVKEGDKVERADTLGTVPEGSFTHRIMVPFYLYGSYTVSWVKPEGTYKIHDTIAELKDEKGNAIQVKLSFRWPVKRAVDCYEERLKPVDPMVTRVRLIDTFFPVARGGTYCIPGPFGAGKTVLQQITSRFADVDIVIVAACGERAGEVVETLKEFPELKDERTGRSLMERTIIICNTSSMPVAAREASVYTAVTLAEYYRQMGLNVLLLADSTSRWAQAMREMSGRLEEIPGEEAFPAYMESTIANFYERAGIVRLRDGSIGSVTIGGTVSPAGGNFEEPVTQATLKVVGAFHGLSRERSDARKFPAIHPMDSWSKYKGIIPSEKVEYAHGFMRRGSEVEQMMKVVGEEGTSIEDYIVYLKGDLIDSVYFQQNSFDAVDAAVKPERQKYVFAKLLVVLASQFSFSDKNEARSWLTG

SEQ ID NO: 61531 - DNA, 411 bp, Unknown
  Obtained from environmental sample
  misc_feature (1)..(411): n is a, c, g, or t
atgccttccacaggctgtgaatttatcgacagttggcgggaatgggaacgctcgttaaggcttaacctcgcgaagaaccgcgcaggtaaacttaaaagggacaatgtttcctcgtcgtccgagccgcctttttatccggtcgaggccgtagccgccgcgcttagagcggtcaataccgacatctctccgctggaaggggagttccttatcgacaaggcgcgctggaacgccatagatatgctggcgggcaacaactatttcgaccgtaacagcgtttacgcttatttcttaaaacttatgttaattgagcggcgtatgtcgttcaatactgaaaaaggatttacagaatataaatcattgtacgcttctattattgaaagcgagcataaatccctgggggttcctaaatga

SEQ ID NO: 61532 - protein, 136 aa, Unknown
  Obtained from environmental sample
  misc_feature (1)..(136): Xaa is any amino acid
MPSTGCEFIDSWREWERSLRLNLAKNRAGKLKRDNVSSSSEPPFYPVEAVAAALRAVNTDISPLEGEFLIDKARWNAIDMLAGNNYFDRNSVYAYFLKLMLIERRMSFNTEKGFTEYKSLYASIIESEHKSLGVPK

SEQ ID NO: 61533 - DNA, 1800 bp, Unknown
  Obtained from environmental sample
  misc_feature (1)..(1800): n is a, c, g, or t
atgatggataaggcgctcggcgatattggcaaagaaatccttacaagggcaaaatccaacgaaaaccaatttttcaacgtgccggggggtgtggcaagcctgaccagggtaccctcccttaactggcatatcgccgccattctgccccttaccatggcaagcgcccttaacagcggcatgacaatactctttctggtgatgatggccgttatcgcggttatcttcgttatttcctatttgtttattaccggccttatcaaacccatgaattacatggtgcagaccctggataaaatcgctgaggactgggacctgacccggcggcttgaattcaagcatcaggacgaaattgggacagtgggggagttctttaaccggactttcgagagaataagaattcttgtagaaacaataaaatacaaaaccgacgggcttaaccataccagttatgaactctccgccaacatgaacaaaacctccgaagtcgtgcagcagatagcggttaaccttgacaatatggagaacctcgtagtcaagcaggaaaacggcgctatgatagcgggcgaggcggtaggggctattaaggagaatatcgacagccttaacaaaatgatagaacaacaagccgccagcgtggacaagtcgtccgcggccatagaggaaatgacagctaacattcattcggtgacacagaccttgattgaaaacagcagaaatgtcacagtcctgaccgaagcgtcggaaaacggcaagaccggcgtccagaccgtcgcgcaagaaatacagggaatagcccgtgattccgaagggcttctggaaataaattcgttaatgaacaatatcgccagccagaccaatttactttcaatgaacgcggcgattgaagcggcccacgccggagaagcgggcaagggctttgccgtagtcgccgccgaaatccgcaaactggcggaatcatccagccagcaatccaaaaccaccacgtcaatgttaaagaaaataaaagcgtccatagacagcattaccaaatcctccgatgacgtattgaaccgtttcggcgcaattgactcaagcgtaaaaacagtttccgagcacgaacaaaatatcctaaacgccatgcgggaacaggaaacaggtggaaagcaaattttggattccataagccgcctccgggatataacccgctcagttaaaaaagggtctgacgatatggctgaatcgggcaaaactctggttaaggaaacagacgaatttataaaaacaagccagaaagcggtagaaggtatgaacgagatattgaagggcgttaatcagataagcagttcagtaagccatgtaaacgacatgagcatggaaaacaaccgaaacttcgacgccttgaagaaggaaacagaaaaatttaatgataccatcggcgacgagaagcaaaaaatcctcatagtagacgatgacgttattcatctagaaatggtggaagcggtattgcagaacaagtatgacatatcaacagtcaaatccggtaaagaagcgctgggtttattttaccagggccttgttccccaattaatattattggacttgataatgcctgatatggacggatggaatacctacagcagaataaaagcgataggcggcttgtataatactccgatagcgtttttcacggcttcaagcgatcctaaagatattcaacacgcgaaagaaatgggggcggttgattatatcaaaaagccctatgacaaagacgatttgttacgcaggatagaaaaaatcctgaaaaaagattcaccttattaa

SEQ ID NO: 61534 - protein, 599 aa, Unknown
  Obtained from environmental sample
  DOMAIN (63)...(133): HAMP domain
  misc_feature (1)..(599): Xaa is any amino acid
MMDKALGDIGKEILTRAKSNENQFFNVPGGVASLTRVPSLNWHIAAILPLTMASALNSGMTILFLVMMAVIAVIFVISYLFITGLIKPMNYMVQTLDKIAEDWDLTRRLEFKHQDEIGTVGEFFNRTFERIRILVETIKYKTDGLNHTSYELSANMNKTSEVVQQIAVNLDNMENLVVKQENGAMIAGEAVGAIKENIDSLNKMIEQQAASVDKSSAAIEEMTANIHSVTQTLIENSRNVTVLTEASENGKTGVQTVAQEIQGIARDSEGLLEINSLMNNIASQTNLLSMNAAIEAAHAGEAGKGFAVVAAEIRKLAESSSQQSKTTTSMLKKIKASIDSITKSSDDVLNRFGAIDSSVKTVSEHEQNILNAMREQETGGKQILDSISRLRDITRSVKKGSDDMAESGKTLVKETDEFIKTSQKAVEGMNEILKGVNQISSSVSHVNDMSMENNRNFDALKKETEKFNDTIGDEKQKILIVDDDVIHLEMVEAVLQNKYDISTVKSGKEALGLFYQGLVPQLILLDLIMPDMDGWNTYSRIKAIGGLYNTPIAFFTASSDPKDIQHAKEMGAVDYIKKPYDKDDLLRRIEKILKKDSPY

SEQ ID NO: 61535 - DNA, 549 bp, Unknown
  Obtained from environmental sample
  misc_feature (1)..(549): n is a, c, g, or t
ttgcccgattcagccatatcgtcagacccttttttaactgagcgggttatatcccggaggcggcttatggaatccaaaatttgctttccacctgtttcctgttcccgcatggcgtttaggatattttgttcgtgctcggaaactgtttttacgcttgagtcaattgcgccgaaacggttcaatacgtcatcggaggatttggtaatgctgtctatggacgcttttattttctttaacattgacgtggtggttttggattgctggctggatgattccgccagtttgcggatttcggcggcgactacggcaaagcccttgcccgcttctccggcgtgggccgcttcaatcgccgcgttcattgaaagtaaattggtctggctggcgatattgttcattaacgaatttatttccagaagcccttcggaatcacgggctattccctgtatttcttgcgcgacggtctggacgccggtcttgccgttttccgacgcttcggtcaggactgtgacatttctgctgttttcaatcaaggtctgtgtcaccgaatga

SEQ ID NO: 61536 - protein, 182 aa, Unknown
  Obtained from environmental sample
  misc_feature (1)..(182): Xaa is any amino acid
MPDSAISSDPFLTERVISRRRLMESKICFPPVSCSRMAFRIFCSCSETVFTLESIAPKRFNTSSEDLVMLSMDAFIFFNIDVVVLDCWLDDSASLRISAATTAKPLPASPAWAASIAAFIESKLVWLAILFINEFISRSPSESRAIPCISCATVWTPVLPFSDASVRTVTFLLFSIKVCVTE

SEQ ID NO: 61537 - DNA, 1314 bp, Unknown
  Obtained from environmental sample
  misc_feature (1)..(1314): n is a, c, g, or t
atgaactttccataccgggagccggacattgagaagatgcctcgcgctgcacttgaagcgttgcagctgcaaaagttgagggaagaaatcggcttttgtctgcgtacgccattctataaaaagcgccttgctacagtgggcattcaaagtcaggacgacatcaataccctggaagatctaaagcatattccctttaccacaaaaaacgatctcagggacggtttcccctacggttttttaagcataccgagggaggaagttgtaaggctgcacgcctcaagcggcacaaccggaaccccaaccactatttattttaaccgcaacgacatcaaaaactggacgaacaatatggcccgttgcatttacggaaccggttgtaccgaaagcgatgttttccaaaacatgataacctatggcctctttaccggaggccttggcctgcaccagggcggcgaggaagttggtatgctggttattccgtcgggcgcgggaaataccagcaggcagctaaagttgatggaagattttggtacaactgtgatacacgccactccgagtttccttctgcaccttgaaaccaaaatgaaagaagccggggtaaagagggaaagcctgtttcttaaacgcgcttttgccggagcggagccgtactcggaggatacaaggcggcggattgaagccctgctgaagattgatgtgttcaattcttacggcctttcggaaatgaacggcccaagcgttgccttcgagtgccagtgcaaaaccggcatgcacctgtgggaagacggctatatagccgagataataaacccggataccctggagcctgtgaaggaaggagagatcggggagctggtgcttaccattctatgccgggaggcgacgcccatactccgctaccgtacccgcgatcttaccgggttttacaccgagccctgccaatgcggcaggacccaccgccgcctccgccgcataaccgggcgtagcgacgacatgctcatcatcaacggcgtgaatgttttccccagccagattgaagaagtgatcatgggcatgaaggaagtcggcaacaactacctcattgttgttgaaaaagacggagcgcttgaccgcctgactgtaaaaaccgaagtaaacccggacatattcgtggacgacgcccgccccctgaacgccctgatggagcgaataaaggatacgcttaaggcttcaatttacatcagccccagggtggaactccatgagagcggcagcctgccggtatcggaaggcaaggcggtgcgtgtgcaggataagcgacccaaagacgtgtga

SEQ ID NO: 61538 - protein, 437 aa, Unknown
  Obtained from environmental sample
  DOMAIN (19)...(360): AMP-binding enzyme
  misc_feature (1)..(437): Xaa is any amino acid
MNFPYREPDIEKMPRAALEALQLQKLREEIGFCLRTPFYKKRLATVGIQSQDDINTLEDLKHIPFTTKNDLRDGFPYGFLSIPREEVVRLHASSGTTGTPTTIYFNRNDIKNWTNNMARCIYGTGCTESDVFQNMITYGLFTGGLGLHQGGEEVGMLVIPSGAGNTSRQLKLMEDFGTTVIHATPSFLLHLETKMKEAGVKRESLFLKRAFAGAEPYSEDTRRRIEALLKIDVFNSYGLSEMNGPSVAFECQCKTGMHLWEDGYIAEIINPDTLEPVKEGEIGELVLTILCREATPILRYRTRDLTGFYTEPCQCGRTHRRLRRITGRSDDMLIINGVNVFPSQIEEVIMGMKEVGNNYLIVVEKDGALDRLTVKTEVNPDIFVDDARPLNALMERIKDTLKASIYISPRVELHESGSLPVSEGKAVRVQDKRPKDV

SEQ ID NO: 61539 - DNA, 444 bp, Unknown
  Obtained from environmental sample
  misc_feature (1)..(444): n is a, c, g, or t
gtgatttaccaggattcaaaatcggtttttaaggtaaacgattatgaggaccttgccagaaaaaacaaaggccgcataagtgatctcctgaaaaacagaacagccgcttacgatccgcaaaagcccgcggaaacgcctgtcgacgcggcccgcggggaaaaagaaaagatacgcgtcctgcttgtcaaaatggaagagcgcataaaaaatatttctgacaatatgtatcccgtggagcggcgcatatcggaagagcggctgttggcgctgaaaagcgaattttcaagtttggaaaacgacatagatccgaacagtttacagccgggcattcttgtggatattgaactctcgtcaatcaagcgcaagaggacaaccctggattccatggccgcggcgctgggaaggtttctgaacagcgttgcaacgtgtttccgggatatgtga

SEQ ID NO: 61540 - protein, 147 aa, Unknown
  Obtained from environmental sample
  misc_feature (1)..(147): Xaa is any amino acid
MIYQDSKSVFKVNDYEDLARKNKGRISDLLKNRTAAYDPQKPAETPVDAARGEKEKIRVLLVKMEERIKNISDNMYPVERRISEERLLALKSEFSSLENDIDPNSLQPGILVDIELSSIKRKRTTLDSMAAALGRFLNSVATCFRDM

SEQ ID NO: 61541 - DNA, 975 bp, Unknown
  Obtained from environmental sample
  misc_feature (1)..(975): n is a, c, g, or t
atgaggtgttggatggggggaattgggagattggatgacgaacaaggcgtgttgttgtcgccaaaaaataacaaacaacgattgttcattgctcattgttcattgttcattttcttatgtttttttatcgtatttttgttcctgccggttacggctcatgcgcaggaggttccgggaccgcaggccccacaagccccacaggccccgcaggttccgcagggggggcaaacgcaggcgtccccgtttacgccggcgcaggggacaacggcattacccacgcctccgcctcccccggttattccttttattgatttaacggtacgcaacccggcgacggggcaggaagtggctttctctctgcagctcctgttattgctgacggtgctgtcgcttgcccccagtatcatcattttaacgacgagttttctccgtgtttccattgtgctggattttattaagagggcgctttcattacagcaggttcctcccaatcaggttattctggggatttctttgtttttaacgatatttatcatgtggccgacattttcaaatatctacgacagggcattgcggcctctctccgccggagaaattaatgtggagacggcctaccgcgaggcggaagctccgttgcggctgtttatgtacagccagatgaggagccgccccgaaaatattcggctgtttatggcgatgcgggggctggaccggcccgatactttggcggatgttcccacttatgtgctggttcccgcctttattttgagcgaattaacggtggcttttaagatagggattctattgtttattccctttatcgttattgatatggtggtcgccagcgcccttatgtcgatgggtatgatcatgttgccgccggttatgatttcaatgcccttcaagctgatactgtttattctggttgacggctgggggctgttaacggaccagttggttcgttcatttgtgtag

SEQ ID NO: 61542 - protein, 324 aa, Unknown
  Obtained from environmental sample
  DOMAIN (125)...(320): FliP family
  misc_feature (1)..(324): Xaa is any amino acid
MRCWMGGIGRLDDEQGVLLSPKNNKQRLFIAHCSLFIFLCFFIVFLFLPVTAHAQEVPGPQAPQAPQAPQVPQGGQTQASPFTPAQGTTALPTPPPPPVIPFIDLTVRNPATGQEVAFSLQLLLLLTVLSLAPSIIILTTSFLRVSIVLDFIKRALSLQQVPPNQVILGISLFLTIFIMWPTFSNIYDRALRPLSAGEINVETAYREAEAPLRLFMYSQMRSRPENIRLFMAMRGLDRPDTLADVPTYVLVPAFILSELTVAFKIGILLFIPFIVIDMVVASALMSMGMIMLPPVMISMPFKLILFILVDGWGLLTDQLVRSFV

SEQ ID NO: 61543 - DNA, 591 bp, Unknown
  Obtained from environmental sample
  misc_feature (1)..(591): n is a, c, g, or t
ttggcgagggcattatcgggatcattatcgggttttttccttacggtaatttttgccgccttttctactgccggccagttcttctccctgcaaatgggatttggcgcttcggaaacttttgaccccgtcgcgcaggttgaaaacccccttatgggtcagtattttaatttggtatccatgctcatctttgtaacgattggcggctttcatcagcttttccttggaggcttttggcgttccgtgcaatcgctgaatataatgtccctgattgacggaagggaacatcttgtgggaatgttcgcctccgggctttcgcgcctgttcatggacgcgattgttatctccctaccgattcttggtactttattattaacctcgctcacgacgggacttatatcaaaagccgcgccccaggtaaatattctttccgaaggatttcccatttccatcaccaccgccttcttacttattttcgcttctcttccgtttatgatagaggcgtttactcgtgtaattgattccggttttagaaacatcgaagccctctacattcaaattggcaggcagattactgaaggaggcgggttttga

SEQ ID NO: 61544 - protein, 196 aa, Unknown
  Obtained from environmental sample
  SIGNAL (1)...(24)
  DOMAIN (1)...(180): Bacterial export proteins, family 1
  misc_feature (1)..(196): Xaa is any amino acid
MARALSGSLSGFFLTVIFAAFSTAGQFFSLQMGFGASETFDPVAQVENPLMGQYFNLVSMLIFVTIGGFHQLFLGGFWRSVQSLNIMSLIDGREHLVGMFASGLSRLFMDAIVISLPILGTLLLTSLTTGLISKAAPQVNILSEGFPISITTAFLLIFASLPFMIEAFTRVIDSGFRNIEALYIQIGRQITEGGGF

SEQ ID NO: 61545 - DNA, 1368 bp, Unknown
  Obtained from environmental sample
  misc_feature (1)..(1368): n is a, c, g, or t
gtgaacttcgacatggcgacgacggaagctccggctgagggtgttgttactggatacggcaaagtgaacggcaggctggtttacgcttacgctcaggatttcacggttattggcggttccctcgggcagatgcacgccgcgaagatctgcaaggtgctggatctttccgcgaaaatgggcgcgccggtggtcgggctaaacgattcaggcggggcccgcatacaggaaggcgttgacgcgctgtccggttacggccagatattttacagaaactcggtcaactcaggggtaatcccgcagatatcggttatcatggggccatgtgctggcggtgcggtttattcgccagcgctgacggattttgtgttcatggtggacaagacggcgcatatgttcatcaccggcccgcaggtcatcaaagccgtgacgggcgaggacgtcagcgccgaagcactgggcggggccatgacgcataacagagtgtcgggggttgcgcagtttgtttcgcccggcgacaacgagtgcattgccgaagtaaagcggcttttgagtttcttgccgtccaacaacagggaaaacgcgccctgttaccaggccccttccggcgtgaacgatgtcattgccgagttgaacgatatcgtgccggttgagccgaanaaggcttacgatatgaaggagataatcagaaagctggcggacagcgccgacatgatggaagtaagcgcccattacgctttgaatatcatcacctgctttattaggatcaacggcaaaacagtcggcgtaatcgccaaccagccgagctggatagcgggctgcctcgacataaacgcctcggacaaggccgcaaggttcatcagaacctgcgactgctttaatatccccatactgaacctggttgacgtgcccggcttcttgcccggcactgaacaggagtacggaggcatcataaggcacggcgcgaaaatgctcttcgcatactccgaggctacagtgcccaaggttacggttatcgtaaggaaggcctacggcggcgcgtaccttgccatgtgttccaaagacctcggcgccgatctcgtgctcgcgtggccgcttgcggaaattgccgtcatgggccccgacggcgcggccaatatcatcttcaaaaatgatattcagaattcagcggatccgtcggcgacaaggcagcagaaaatcgaagaatacacaagggaattcgccacaccctacaaggctgcggaaaggggctttgtggacgatattatcgaaccaagccaaacccgcctgcgcctgatcagcgcttttgaaatgcttgccggcaagaagggagacctgccgtccaaaaagcacggaaatatcccgttgtaa

SEQ ID NO: 61546 - protein, 455 aa, Unknown
  Obtained from environmental sample
  DOMAIN (1)...(453): Carboxyl transferase domain
  misc_feature (1)..(455): Xaa is any amino acid
MNFDMATTEAPAEGVVTGYGKVNGRLVYAYAQDFTVIGGSLGQMHAAKICKVLDLSAKMGAPVVGLNDSGGARIQEGVDALSGYGQIFYRNSVNSGVIPQISVIMGPCAGGAVYSPALTDFVFMVDKTAHMFITGPQVIKAVTGEDVSAEALGGAMTHNRVSGVAQFVSPGDNECIAEVKRLLSFLPSNNRENAPCYQAPSGVNDVIAELNDIVPVEPXKAYDMKEIIRKLADSADMMEVSAHYALNIITCFIRINGKTVGVIANQPSWIAGCLDINASDKAARFIRTCDCFNIPILNLVDVPGFLPGTEQEYGGIIRHGAKMLFAYSEATVPKVTVIVRKAYGGAYLAMCSKDLGADLVLAWPLAEIAVMGPDGAANIIFKNDIQNSADPSATRQQKIEEYTREFATPYKAAERGFVDDIIEPSQTRLRLISAFEMLAGKKGDLPSKKHGNIPL

SEQ ID NO: 61547 - DNA, 675 bp, Unknown
  Obtained from environmental sample
  misc_feature (1)..(675): n is a, c, g, or t
gtgccttatgatgcctccgtactcctgttcagtgccgggcaagaagccgggcacgtcaaccaggttcagtatggggatattaaagcagtcgcaggttctgatgaaccttgcggccttgtccgaggcgtttatgtcgaggcagcccgctatccagctcggctggttggcgattacgccgactgttttgccgttgatcctaataaagcaggtgatgatattcaaagcgtaatgggcgcttacttccatcatgtcggcgctgtccgccagctttctgattatctccttcatatcgtaagccttnttcggctcaaccggcacgatatcgttcaactcggcaatgacatcgttcacgccggaaggggcctggtaacagggcgcgttttccctgttgttggacggcaagaaactcaaaagccgctttacttcggcaatgcactcgttgtcgccgggcgaaacaaactgcgcaacccccgacactctgttatgcgtcatggccccgcccagtgcttcggcgctgacgtcctcgcccgtcacggctttgatgacctgcgggccggtgatgaacatatgcgccgtcttgtccaccatgaacacaaaatccgtcagcgctggcgaataaaccgcaccgccagcacatggccccatgataaccgatatctgcgggattacccctga

SEQ ID NO: 61548 - protein, 224 aa, Unknown
  Obtained from environmental sample
  misc_feature (1)..(224): Xaa is any amino acid
MPYDASVLLFSAGQEAGHVNQVQYGDIKAVAGSDEPCGLVRGVYVEAARYPARLVGDYADCFAVDPNKAGDDIQSVMGAYFHHVGAVRQLSDYLLHIVSLXRLNRHDIVQLGNDIVHAGRGLVTGRVFPVVGRQETQKPLYFGNALVVAGRNKLRNPRHSVMRHGPAQCFGADVLARHGFDDLRAGDEHMRRLVHHEHKIRQRWRINRTASTWPHDNRYLRDYP

SEQ ID NO: 61549 - DNA, 1347 bp, Unknown
  Obtained from environmental sample
  misc_feature (1)..(1347): n is a, c, g, or t
ttggcagtggataacaaaaaattagttgtcaattacgcctggtgtacaggctgcggtatttgcgcggcgttttgcccggtgaaagttctggaaataaaactggaaaaagtcgtaatagcctatccggacgccctgcgtaaatgcggattttgtgagctgcgctgtcccgattacgcaattcactttacattacaagaggaagaaaaaatgaagctgcttatgggaaacgaagcctgcgtagaaggcgctatcgcggcgggaatgaaattttntgcgggctatnccatcacgccctccacggaaattgccgaggagtcttccagaaggctccccatggtgggcggcaaatttattcagatggaagacgagatagcgggcatggcagcgtgtataggcgcttccattgcggggctaaagtctatgaccgccacaagcggcccgggcttttccttaaagcaggagaacatcggctacgccgcccttgcggagataccctgcgtcattgtcaatgtccagcgttccggcccaagtaccggaatgccgacttcgccatcgcaggccgatgtcatgcaggcgcgttggggcacacatggggatcatccggtgattgccctgtcgccgtcttcggttcgcgagactttcgatctaactgtcgaggcgtttaacctttcggaaaagtaccgcacaccggtgatccttctgatggatgaaatcatcggccatctccgcgagggagtcgagtttcctgatgcgtctgaattgaaaatcgtgaacagaaaaaagccaaccgtaagccccgaagattttgttgcgtacaaagtgcccgaaggcgagatcgtaccgcccatgccgtctttcggcgaggggtacaggtacaacataacggggcttatccacgatgaaacgggcttcccgaccaacaacaacgccatcgcggcgaaaatgatggcacggttaatgaaaaaaatcgaggacaatgtcgatgacattatccgttatgagacaagcggggtttccggctgcgacattctgatcctttcatatgggggaaccattcgtaccgtaaaagcggcggtaaagctagccgccgcatccggcattaaagcaggcgttttcaggccgattacaatttggcccttccctgaaaaagctttaaagacatgtgtcagagacaacaacattaagaaggttcttgtcgctgagcttaactacggccagatttcgttagaagctgaaagaatcctaaagagcgatgccgaagtatcacacataggaaaaattgacggtgacattttgtatcccaatgaagttttcaaaaaaatatgcgaggtaataaaacatgactga

SEQ ID NO: 61550 - protein, 448 aa, Unknown
  Obtained from environmental sample
  DOMAIN (8)...(31): 4Fe-4S binding domain
  misc_feature (1)..(448): Xaa is any amino acid
MAVDNKKLVVNYAWCTGCGICAAFCPVKVLEIKLEKVVIAYPDALRKCGFCELRCPDYAIHFTLQEEEKMKLLMGNEACVEGAIAAGMKFXAGYXITPSTEIAEESSRRLPMVGGKFIQMEDEIAGMAACIGASIAGLKSMTATSGPGFSLKQENIGYAALAEIPCVIVNVQRSGPSTGMPTSPSQADVMQARWGTHGDHPVIALSPSSVRETFDLTVEAFNLSEKYRTPVILLMDEIIGHLREGVEFPDASELKIVNRKKPTVSPEDFVAYKVPEGEIVPPMPSFGEGYRYNITGLIHDETGFPTNNNAIAAKMMARLMKKIEDNVDDIIRYETSGVSGCDILILSYGGTIRTVKAAVKLAAASGIKAGVFRPITIWPFPEKALKTCVRDNNIKKVLVAELNYGQISLEAERILKSDAEVSHIGKIDGDILYPNEVFKKICEVIKHD

SEQ ID NO: 61551 - DNA, 1752 bp, Unknown
  Obtained from environmental sample
  misc_feature (1)..(1752): n is a, c, g, or t
ttggccgagtactcagtcgcttccggctgggcgctgattggctctcaccatatcaaggcgcatctaaagcccggcgaatcaaagtcgctggtgttcgtgcttggttactgcgagaaccctgacgatcaaaagtgggcgaaacctggtgttattaacaaagcgccggctaatgcgctgcttggcaaatacggctcgcctgaagcggcggacagggcgtttgccgcgcttaaggattactgggacgcgctcctgggccgcttcagcgtggaagccgaagacaagcgcatggcgcgtatggcaggggtgtggaaccagtatcagtgcatggttacgtttaacatgtcgcgcagcgcttcttattttgaatccggcatcggacgcggtatgggcttccgcgattcaaaccaggaccttttgggctttgtgcatcttgtgccggaacgcgcccgcgcccgcattctggacatcgctgccacgcagtttcctgatggcagcgcgtatcaccaataccagccgctgaccaagcgcggcaacaacgaggtcggttccggcttcaacgacgatcccttgtggctgatctgcggcgtggcggcgtacataaaggagacgggcgacttcggcatccttgatgaaaaggttcccttcgataacaaagaggagctggctgacagcctgtttgtccacctaaagcattctttcgattataccgtttcgcataccggcccgcatgggctgcccttgattggccgcgctgactggaacgactgtctgaacctcaactgtttttccaaaacgcctggcgagtcttttcagactacggccaattttgaaagcggcgtcgcggaatcggttttaatcgctgcgatttttgtgtttaacggccccgactatatagaaatctgtcgccgtacaggtcgcaaagaagaagcagagtatgccgtcaaggcggttgctacaatgaccgagacgatcaaaacgcacggctgggacggaaactggtttctgcgggcttacgacgcgtatggtcataaaatcggtagccatgaatgtgaagatggccagatatttattgaaagcaacggatttgcggtgatggctgaaatagggcttgatgacgggtgtgccaaaaaagccatcgactcggttaaggataaactggacacaaagtatggcatcgtgcttcaacagccagcgtacaaggaataccaccttgagcttggcgaagtctcatcctacccgcctggttataaagagaatgctggcatcttctgccacaataacccctggattacgattgccgaaaccaagcttggccggggtacgcgagcgtttgaaacctatacgaaaatatgcccggcttaccgcgaggacgacagcgatctgcgccgcctggagccgtacgtgtacgcgcagatggtcgccggaaaggatgcggcgcgtttcggcgaagcgaaaaattcctggctcaccggaaccgccgcgtggacttttgtcagcatttctcagcacatcctgggtgtacgcccggtgttcgatggtctgctcattgacccatgtatccccgccgccatgaaaggcttctccgttattcgccattttcaaaatgcggtgtaccgtattgctgtggacaatagcgtaggcgtggagaaaggcgttaagtcggttacgctggatggaaaaccgcttgatggcgctgtattgccggcgctgggtgacggaaagacgcatgaggtttgtgtggtgatggggtag

SEQ ID NO: 61552 - protein, 583 aa, Unknown
  Obtained from environmental sample
  misc_feature (1)..(583): Xaa is any amino acid
MAEYSVASGWALIGSHHIKAHLKPGESKSLVFVLGYCENPDDQKWAKPGVINKAPANALLGKYGSPEAADRAFAALKDYWDALLGRFSVEAEDKRMARMAGVWNQYQCMVTFNMSRSASYFESGIGRGMGFRDSNQDLLGFVHLVPERARARILDIAATQFPDGSAYHQYQPLTKRGNNEVGSGFNDDPLWLICGVAAYIKETGDFGILDEKVPFDNKEELADSLFVHLKHSFDYTVSHTGPHGLPLIGRADWNDCLNLNCFSKTPGESFQTTANFESGVAESVLIAAIFVFNGPDYIEICRRTGRKEEAEYAVKAVATMTETIKTHGWDGNWFLRAYDAYGHKIGSHECEDGQIFIESNGFAVMAEIGLDDGCAKKAIDSVKDKLDTKYGIVLQQPAYKEYHLELGEVSSYPPGYKENAGIFCHNNPWITIAETKLGRGTRAFETYTKICPAYREDDSDLRRLEPYVYAQMVAGKDAARFGEAKNSWLTGTAAWTFVSISQHILGVRPVFDGLLIDPCIPAAMKGFSVIRHFQNAVYRIAVDNSVGVEKGVKSVTLDGKPLDGAVLPALGDGKTHEVCVVMG

SEQ ID NO: 61553 - DNA, 717 bp, Unknown
  Obtained from environmental sample
  misc_feature (1)..(717): n is a, c, g, or t
gtggtcgagatcggggataagcctatcctgtggcatatcatgaagatatactccttcttcggcttcagcgagtttgtggtgctgaccggctacaagtcgcacgttatcaaggacttctttatcaactactacgcccgctacaccgacgttacggtcgatatggcgaataacgtcgtggagtaccaccgcgtcgggaccgagccttggcgtgtgactgtgctatacacgggggcgcagaccatgaccggcggacggctgctccgggcacgggagttcttgggcggcgagaggttcctcctcacctacggcgacggcgtgagcgacgtggacatccccgcggtcattcgttgccatgaggcctcaggcaagctagtaacgattaccgcggtgaagccggtggggcgctttggcaccatagcggtgggcggcgacggcgccgtggagtcgtttcatgaaaaacccgacgacggcggcgtatggataagcggcggcttcttcgtcgcggagcccggcgtctttgactatttagatcgcggcgacgaaacgattctggaacgcgagcccttcggacgcttggccggcgacgggcagatgaatgcctataaacacgccggcttctggcatcccatggacacgctacacgataagaacattcttagcgatatgtgggcaaacgggaacgctccgtgggcgctctgggagaggaaacaatgctag

SEQ ID NO: 61554 - protein, 238 aa, Unknown
  Obtained from environmental sample
  DOMAIN (1)...(216): Nucleotidyl transferase
  misc_feature (1)..(238): Xaa is any amino acid
MVEIGDKPILWHIMKIYSFFGFSEFVVLTGYKSHVIKDFFINYYARYTDVTVDMANNVVEYHRVGTEPWRVTVLYTGAQTMTGGRLLRAREFLGGERFLLTYGDGVSDVDIPAVIRCHEASGKLVTITAVKPVGRFGTIAVGGDGAVESFHEKPDDGGVWISGGFFVAEPGVFDYLDRGDETILEREPFGRLAGDGQMNAYKHAGFWHPMDTLHDKNILSDMWANGNAPWALWERKQC

SEQ ID NO: 61555 - DNA, 1110 bp, Unknown
  Obtained from environmental sample
  misc_feature (1)..(1110): n is a, c, g, or t
gtgggcaaacgggaacgctccgtgggcgctctgggagaggaaacaatgctagacttctacaaaggcaagagggtcttagttaccggacacacgggcttcaagggggcgtggctgtgccgcctcctcgccaagtccggggcggagacggtcggatacgcccttgaaccgcccacaaatccgtcgctcttcgaacagatcgggggcgaacgcgacctctaccgccacgctgtcggcgatgtcggagattttgagcggctcctgaaggtggcgacggaaactatgccgcagatcgtcgtccacatggccgcggaaccgctcgtgcgcgcctcctaccgcgatccgcgtaaaacatacgagaccaacgtcatgggaacggtcaacctgcttgaggccgttagaaacaccggtaccgtcaagtcgctcgtaaacgttaccaccgataaagtctacgaaaataaggaatggctctggggctacagagaggacgaaaacctctgcggcggcgatccctactccaacagcaaatcttgcagcgaactcgttacctacagctaccgcaaatcgttctttcgcggtgccgacgattattgcattaccgcaatctcctccgcccgttccggcaacgtgataggcggcggcgactacgcgcaggagaggatcatccccgattgcgtaagggcggcggcgtcgtcaaatgaggtgataataagaaacccgcactcgacaagaccgtaccagcacgttttggagtgcctgtacgggtacctgttgctcgcaaaaatgcagtacgaagacccctatttggagggcgcgtacaatttcggccctaatgaggagagttgcgtgacgaactgggaattagtaagcctgttctgcgacgtctacggtcacggcgcgtcgtggcgcgccggagacggcggcggcccgcacgaagctcatttcctgaaattagacagctcaaaatcaaaaacggtgttgggttggaagccgcgctggaacatcaagacagccgtggaaaagacagtggagttcgcgaaggcaggtagcgacgccgacagattgaagtgtgtggataggcagattgacgagtacttgacggaggcgcaatga

SEQ ID NO: 61556 - protein, 369 aa, Unknown
  Obtained from environmental sample
  DOMAIN (27)...(252): Male sterility protein
  misc_feature (1)..(369): Xaa is any amino acid
MGKRERSVGALGEETMLDFYKGKRVLVTGHTGFKGAWLCRLLAKSGAETVGYALEPPTNPSLFEQIGGERDLYRHAVGDVGDFERLLKVATETMPQIVVHMAAEPLVRASYRDPRKTYETNVMGTVNLLEAVRNTGTVKSLVNVTTDKVYENKEWLWGYREDENLCGGDPYSNSKSCSELVTYSYRKSFFRGADDYCITAISSARSGNVIGGGDYAQERIIPDCVRAAASSNEVIIRNPHSTRPYQHVLECLYGYLLLAKMQYEDPYLEGAYNFGPNEESCVTNWELVSLFCDVYGHGASWRAGDGGGPHEAHFLKLDSSKSKTVLGWKPRWNIKTAVEKTVEFAKAGSDADRLKCVDRQIDEYLTEAQ

SEQ ID NO: 61557 - DNA, 1125 bp, Unknown
  Obtained from environmental sample
  misc_feature (1)..(1125): n is a, c, g, or t
atggccgagaagccggtcaggctctgcgggaagaaatcaaggggcaagcaaaaagcccaagagagctttcaagcgggaacttctttacagctgggcaagggaattgcggcggcgtggtcgggcaatcataaaacgctggcagatctggcgttcagccctaatctgaaaagcgataactggactaaccctaaagatgtttcatggagcgaaaagggatggacggtttcaaaggccgctctcggcgagccgatgggcaacatggcaaccaatgaccagtaccttatcaatccaatttatgaaacggagattatgaccgaagcagccaaaaaatccgtgatgatgcctcttgtccgtcatcgtccgatgatggggccgtcaatcttccttcccacaagggatcggggcggcgttcagttgaactggcttacagcctacggccaaaaaatcgaaggcagcaaaccgcaaggggcggagcgggtcgagctaaaagcctacacattggcgggttatattccgtggttcgatgaatttgaagaggacgtttttgtcgatttgggggctatgttcgtggacgaatttcttgaaacctatggacatgaatttgacaggcaatgcctgttagccgataacgatccgttcacaggggctatgaagtgcgccgatgttacagaggtaacaatcaagggaaacaccatagaggatttgacttggaaggatttccgggacgcagtttacaaagtgggcgcagaggagagaaaagattgctgctggtttttgaatgaaacggtcttaaaccatatcgccaatatcgaggacactactggccgcccgatttggcggcggcctacagaggcaatgccggggcgtttggatttgtacccatatcacgaagtttccatccttccgcagattgccgacatcgaggaagatcaggcgtttgcgatttttatgaatcccaagagaatccaacatggtaaccgcagaggtatcgaactaaaaaagtttgacggtactacagaaagcctggaatatggggaactgtttttaaggttccgcaagcgtgatgggtttctcgttacaaggccgaaagggaacatggtcatattaaaaaccaaagcgtcataa

SEQ ID NO: 61558 - protein, 374 aa, Unknown
  Obtained from environmental sample
  DOMAIN (91)...(371): Phage capsid family
  misc_feature (1)..(374): Xaa is any amino acid
MAEKPVRLCGKKSRGKQKAQESFQAGTSLQLGKGIAAAWSGNHKTLADLAFSPNLKSDNWTNPKDVSWSEKGWTVSKAALGEPMGNMATNDQYLINPIYETEIMTEAAKKSVMMPLVRHRPMMGPSIFLPTRDRGGVQLNWLTAYGQKIEGSKPQGAERVELKAYTLAGYIPWFDEFEEDVFVDLGAMFVDEFLETYGHEFDRQCLLADNDPFTGAMKCADVTEVTIKGNTIEDLTWKDFRDAVYKVGAEERKDCCWFLNETVLNHIANIEDTTGRPIWRRPTEAMPGRLDLYPYHEVSILPQIADIEEDQAFAIFMNPKRIQHGNRRGIELKKFDGTTESLEYGELFLRFRKRDGFLVTRPKGNMVILKTKAS

SEQ ID NO: 61559 - DNA, 1227 bp, Unknown
  Obtained from environmental sample
  misc_feature (1)..(1227): n is a, c, g, or t
ttgactttaggaagtttgtttgacggcataggcgggtttccgcttgccgctgtaaggaatggaatattgccagtgtgggcaagcgaaattgaggcagcccctatcagcattactaaacggcattttccagccatgcggcatttgggagacattaagaaaataaacggcggggaaatcgagcctgtggacattatcacattcggttcgccttgtcaggatttaagcatatcaggccgccgtgcagggctggatggggagcgttcagggctgtttttacaggcggtgcgcgtcataaaggaaatgagggttgcaacaaaaaatacctgtccagcaagaattatttgggaaaacgtgcctggaacctttagtgcaaataagggaagggatttccagacggtcattcaggaaattgcgggaattgccgagcagggagtttcaattcctagaccttcggcaaaaatcggctggctggctgctggggcggtcatgggagatagctggtcgctggcctggcgggtcatggatgcccaatactggggcttgccccagcgtcgccgtcgcatcttccttgtcgcagattttacaggcagaggtgccggggaaatactttttaagcaggaaggcaaaacaagggatattgagaagggcaaaaattcggggaaaggaattgccggaaacattgaaaacagcgttagagttgcaggcttcaatgggtggaaaagtataactggttcattggaatataaagaaaatagtgcgccttgcatacaagctactatgccgcctaatgttgtaacacaatacaatgttgataaaggcattgatcaatacactgttgacattggttattctaccgaccgaattcaaatgaacgctcaatcatctgtaacattgagggcaaatagcgggggtaatggtgcaaatacagggctgtattttttacctgtaaccaattatcaagatacaataggctctttatgtgcaagggacagtaaaggcattggcaatcaatacatcgatgaagataaatgtatctgtaccagcaaatatgaagtacggagactaaccccactagagtgtgaacggcttcaaggctttcccgatgggtggacagaatacggacatgacggaaagctaatctctgacaatcaaagatataaagcattgggaaacagcgtagctattccatgtgttgaatttgtgcttaaaaatcagcttccatgctga

SEQ ID NO: 61560 - protein, 408 aa, Unknown
  Obtained from environmental sample
  DOMAIN (1)...(407): C-5 cytosine-specific DNA methylase
  misc_feature (1)..(408): Xaa is any amino acid
MTLGSLFDGIGGFPLAAVRNGILPVWASEIEAAPISITKRHFPAMRHLGDIKKINGGEIEPVDIITFGSPCQDLSISGRRAGLDGERSGLFLQAVRVIKEMRVATKNTCPARIIWENVPGTFSANKGRDFQTVIQEIAGIAEQGVSIPRPSAKIGWLAAGAVMGDSWSLAWRVMDAQYWGLPQRRRRIFLVADFTGRGAGEILFKQEGKTRDIEKGKNSGKGIAGNIENSVRVAGFNGWKSITGSLEYKENSAPCIQATMPPNVVTQYNVDKGIDQYTVDIGYSTDRIQMNAQSSVTLRANSGGNGANTGLYFLPVTNYQDTIGSLCARDSKGIGNQYIDEDKCICTSKYEVRRLTPLECERLQGFPDGWTEYGHDGKLISDNQRYKALGNSVAIPCVEFVLKNQLPC

SEQ ID NO: 61561 - DNA, 1293 bp, Unknown
  Obtained from environmental sample
  misc_feature (1)..(1293): n is a, c, g, or t
atgaatgtacgcataaccccgcgccgatttacggataccgtcagaataccggcttccaagtctcatacaatcaggcagttactgattgcttctcttgcggacggcgaatcggaaattaaatacccgctcgattcatgggatacgcgctcctgcttctccgcctgcaaggcttcgggcgcggaaatagcggaacaacgtaacgggacagagatagtcagttggaaagtacggggtaacggcggttttaaaaaaggaattaattccggtgtgaaaattgacgtaggcaattccgggacgactctttatctggcgctcgctgttgcgggacttcaacaacagccgattgaatttacaggcgatgaacaaattcaaaagcgaagcgccgctccgcttctcgacgcgttagctgggctcggcgttaattcgcaaagcaacaatggctgcgctccaatcacgattaaaggcgcgtggaaaggcgggaaggtgagccttccgtgccccacaagccaatacttgtcggcgattttaattgcagccccgttagctcccgccggcgttgtcacggaaattgatgtaccgcttcttaacgaaaaaccgtatatcgagatgacactttcttacttaaaagcccacggtattccgtacaatacttcgccggatttctcgcatttttccatccccggcggttcgtcgtggaaacccttttcctcctcagtgccgggcgacttctcgtcagccgccttccctgccgccgccgccgcaattacaggcggaccggtaaccctgctcggtcttgatccgcaggatactcaaggcgacaagtttttccttgaaatactgcaaaaaatgggctgtgatgtccaatacaacgataatcgcgaaaacggcttgtctataaccgtatcccgaaacggttccctccaaggcggaaccttcgatttaaataaaacccccgatcttctccccgcggcggcggttacagccgcctatgcaagcggagacacctcgcttgtcaatgtcgcccacgcccgtatcaaggaaactgacagaattgccgtaatggcgcaagagttagcaaagcttggaatacgttgcactgagttaccggacggtctgattattcatggaaaaggcgcactgtctccgcccgaaaaccccgttattgagggtcacggcgatcatagaattgtcatggcttttgccgttgcggctctcgcaagccccgttcccgtcgaaataaccgccgccgaatgcgcggcagtcacatatcccggtttatctcgtgccatctga

SEQ ID NO: 61562 - protein, 430 aa, Unknown
  Obtained from environmental sample
  DOMAIN (5)...(430): EPSP synthase (3-phosphoshikimate 1-carboxyvinyltransferase)
  misc_feature (1)..(430): Xaa is any amino acid
MNVRITPRRFTDTVRIPASKSHTIRQLLIASLADGESEIKYPLDSWDTRSCFSACKASGAEIAEQRNGTEIVSWKVRGNGGFKKGINSGVKIDVGNSGTTLYLALAVAGLQQQPIEFTGDEQIQKRSAAPLLDALAGLGVNSQSNNGCAPITIKGAWKGGKVSLPCPTSQYLSAILIAAPLAPAGVVTEIDVPLLNEKPYIEMTLSYLKAHGIPYNTSPDFSHFSIPGGSSWKPFSSSVPGDFSSAAFPAAAAAITGGPVTLLGLDPQDTQGDKFFLEILQKMGCDVQYNDNRENGLSITVSRNGSLQGGTFDLNKTPDLLPAAAVTAAYASGDTSLVNVAHARIKETDRIAVMAQELAKLGIRCTELPDGLIIHGKGALSPPENPVIEGHGDHRIVMAFAVAALASPVPVEITAAECAAVTYPGLSRAI

SEQ ID NO: 61563 - DNA, 615 bp, Unknown
  Obtained from environmental sample
  misc_feature (1)..(615): n is a, c, g, or t
gtgggaaaaacatcggttcttgtacagcttgcccttgacaagcttcttcaaggaaaaaaagtaattcacgtttctttttcaagccataattcattgggacagctcattcatcatgtgcctgtttggtataacgatatttttgacgagtttatcaacaaaaaaaatcttgagaacgccgttgaaataaaaaacaaccttgttaaaaaccgcgtgttaatgaactttaatcaggaaggcataacaaaagatcagcttcttaaaagtttaagagcgatgattatagaaggcggctttaaggccgactcgattataattgacggttttgattttgcgcaaactgaaaaagaagttattgccgccgttaaaacattcgctacggaattgggtgtaagcgtttggtatagctgttccgtaaaagacgagggacagcagtacgataaggaaaacattcccgtaatactaaacggctttatcgacattttagacatcgtaattattttacagccgaaacatgatcacgttgagctttcaatttccaaggacagggattcaattatttcaaaggcgatggcgatgaaacttgatccgaaaactctgttgatactggaatcataa

SEQ ID NO: 61564 - protein, 204 aa, Unknown
  Obtained from environmental sample
  misc_feature (1)..(204): Xaa is any amino acid
MGKTSVLVQLALDKLLQGKKVIHVSFSSHNSLGQLIHHVPVWYNDIFDEFINKKNLENAVEIKNNLVKNRVLMNFNQEGITKDQLLKSLRAMIIEGGFKADSIIIDGFDFAQTEKEVIAAVKTFATELGVSVWYSCSVKDEGQQYDKENIPVILNGFIDILDIVIILQPKHDHVELSISKDRDSIISKAMAMKLDPKTLLILES

SEQ ID NO: 61565 - DNA, 726 bp, Unknown
  Obtained from environmental sample
  misc_feature (1)..(726): n is a, c, g, or t
atgatttacaaaacatttggaaaaacaggcgtaaaagtttcggctcttggcttcggcgcaatgcgcttacccatgaaagaagttgacggcaagaaaatagtagacgaagaccttgccgtccctctcatgcaaaaagcgtttgacatgggcgtaaactacgttgataccgcgccgctttactgcgaaatgttaagcgaaatagctgtaggcaaggcattgaaaggctatcgcgacaaagtgtatctgtccacaaagaaccccattgaagacgccgacggcgatcattggatggaacggttggaaaaatcgcttaaaaaattggacacggactacatcgacttttatcatttttggggtatctcgttaaaaagtttcgagtcatggcagggattaaaattcggtcctattgaagcggcgtacaaagcgaaggaacaggggcttataaagcacatttcattttcataccacgacgcggcggaaaattataaaaagatagtagactcaggtcactttgaaacaacacttgttcagtacaatatgctggatcgttccaacgaggaaaatatagcctacgctaaatccaagggtttaggcgtcgtggtaatgggacccgtaggcggcggacgtctcggcgcgcccagcgaanaaaatcaaagcctgcttaaaaacaatcgacnagcaccgctgaaatggctctgcgctttgtacttgcaaacgaaaatatag

SEQ ID NO: 61566 - protein, 241 aa, Unknown
  Obtained from environmental sample
  DOMAIN (7)...(237): Aldo/keto reductase family
  misc_feature (1)..(241): Xaa is any amino acid
MIYKTFGKTGVKVSALGFGAMRLPMKEVDGKKIVDEDLAVPLMQKAFDMGVNYVDTAPLYCEMLSEIAVGKALKGYRDKVYLSTKNPIEDADGDHWMERLEKSLKKLDTDYIDFYHFWGISLKSFESWQGLKFGPIEAAYKAKEQGLIKHISFSYHDAAENYKKIVDSGHFETTLVQYNMLDRSNEENIAYAKSKGLGVVVMGPVGGGRLGAPSEXNQSLLKNNRXAPLKWLCALYLQTKI

SEQ ID NO: 61567 - DNA, 441 bp, Unknown
  Obtained from environmental sample
  misc_feature (1)..(441): n is a, c, g, or t
atggctctgcgctttgtacttgcaaacgaaaatatagacatggctctttccggcatgggcaatctcgacatgttaaaggaaaattttgaaatcgcttcccgcacaggacatttaacggaagaagaactgcgtcaagtaaaatccatgatggaagaaaacaaaaacctagccaaactttactgcacaggctgtaactattgcaaaccctgtccgcaaggcattgacattccctatctttttgaaataatgaaccgctatcgcgtctacgatttaaaagaacacgcaaaaagcgcatacgaagaaatgatgaacggcttaagctggataaaaagcgcggacgcgtcaaagtgcgttgcctgcggcgcgtgcgaagaaaaatgcccgcagaagctaccgattatcaaacagttgcaagagacacataagacattggcaaactag

SEQ ID NO: 61568 - protein, 146 aa, Unknown
  Obtained from environmental sample
  DOMAIN (110)...(133): 4Fe-4S binding domain
  misc_feature (1)..(146): Xaa is any amino acid
MALRFVLANENIDMALSGMGNLDMLKENFEIASRTGHLTEEELRQVKSMMEENKNLAKLYCTGCNYCKPCPQGIDIPYLFEIMNRYRVYDLKEHAKSAYEEMMNGLSWIKSADASKCVACGACEEKCPQKLPIIKQLQETHKTLAN

SEQ ID NO: 61569 - DNA, 438 bp, Unknown
  Obtained from environmental sample
  misc_feature (1)..(438): n is a, c, g, or t
ttgaaacctacacgaaaatttgccccgcctaccgcgaagacgacagcgactttacgcaaaatggagccgtatgtatacgcgcaaatggtagccggcaaagacgcggttaatcacggcgaggcaaaaaattcatggcttaccggaaccgctgcgtggacatttgtaagtatttcgcagtatattctcggaatacgccccgtctttgacggtcttttgatagacccgtgcattccttcaactatgaaaggctttaccgttacacgtcgtttccgtaacgctgattatcacatctcggtaaacaacagcgccggcgtggaaaagggaataaagtccataacgattgacggcaaaccaatggaaggcgaatggttaaagaacgcggtaatcccgacatttaacgacgagaaagtgcataatattgatgtggtgatgggctag

SEQ ID NO: 61570 - protein, 145 aa, Unknown
  Obtained from environmental sample
  misc_feature (1)..(145): Xaa is any amino acid
MKPTRKFAPPTAKTTATLRKMEPYVYAQMVAGKDAVNHGEAKNSWLTGTAAWTFVSISQYILGIRPVFDGLLIDPCIPSTMKGFTVTRRFRNADYHISVNNSAGVEKGIKSITIDGKPMEGEWLKNAVIPTFNDEKVHNIDVVMG

SEQ ID NO: 61571 - DNA, 1605 bp, Unknown
  Obtained from environmental sample
  misc_feature (1)..(1605): n is a, c, g, or t
gtgctgacaaacgtatcccaagctgacaaggatgtcgatatgttttcttttatcgaattttgtctgtggaacgccaatgacgatatgaccaatttccagcgcaatttcagcatcggcgaagttgaggttgacggctcgcgcatttatcacaagaccgagtaccgcgagcggcgcaatcattacgcggtgtgggcggtaaatgttccagtcgagggctttgacacggacaggcagacattccttggtctttacaacggtttcgatcacccgcaggcagtttttgcgggagagtcaaagaactccgtcgcctccggttgggctcctatcggctctcaccacatcaaggcgcggctttcgccgggcgagtctaaaactttcgtttttgttcttggttactgtgaaaatcccgaagatcaaaaatgggaaaaacagggagtaatcaacaaaaaacccgctaatacgcttcttgaaaaatacggaacgcccgaatccgcggacaaggctcttgccgcgcttaacgaatactggaaagaacttttggggcgtttcaccgtggaagcggaagataaaaaaatggcgcgtatggcgggcgtttggaatcagtaccagtgcatggtaacgtttaacatgtcgcgcagcgcatcttattttgaatctggaatcgggcgcggcatgggtttccgcgattcaaatcaggatttattgggctttgttcatcttgttcccggtcgcgcccgcgcccgcattttggacatagcggcgacacaattccccgacggcagcgcgtatcatcagtatcagccgcttacaaagcgcggcaataacgagattggttcaggctttaacgacgatcctctgtggctcatctgcggagcggcggcgtacatcaaagaaacgggcgattacagcatacttaatgaaaaagtgcctttcgataacaacgatgagttagctgacactctctttattcaccttaaacgctcattttattacaccgtaacgcacaccggaccgcacggcttaccgttaatcggacgcgcagactggaacgactgtttaaatcttaactgcttttccaaaactcccggcgaatcttttcagacaaccgcaaactacgaaagcggcgttgcggaatcagttttaatagcggcaattttcgtatttgtcggtcctgactttgttgaaatttgcaaaaggacaggtcgtaccgaagaagcgcagcgcgccgaaaaagccattgccgacatgattgaggcgattaaaacgcacggctgggacgggaaatggttccttcgcgcttatgacgcgtacggtaaaaaaatcggaagccgcgagtgcgaggacggaaaaatatttatcgaatccaacggcttcgcggtaatggcggacataggcattaaagacggacgcgcgcaaaaagcgcttgattcggtaaaagaacagcttgacaccaaatacggcattgttctgttacagccggcgtacaaagattatcatcttgagttaggtgaagtttcttcttatccgccgggatacaaagagaacgccggaattttctgccacaataacccgtggattacgatagcggaaaccagactgggctga

SEQ ID NO: 61572 - protein, 534 aa, Unknown
  Obtained from environmental sample
  DOMAIN (50)...(138): Glycosyltransferase 36 associated family
  misc_feature (1)..(534): Xaa is any amino acid
MLTNVSQADKDVDMFSFIEFCLWNANDDMTNFQRNFSIGEVEVDGSRIYHKTEYRERRNHYAVWAVNVPVEGFDTDRQTFLGLYNGFDHPQAVFAGESKNSVASGWAPIGSHHIKARLSPGESKTFVFVLGYCENPEDQKWEKQGVINKKPANTLLEKYGTPESADKALAALNEYWKELLGRFTVEAEDKKMARMAGVWNQYQCMVTFNMSRSASYFESGIGRGMGFRDSNQDLLGFVHLVPGRARARILDIAATQFPDGSAYHQYQPLTKRGNNEIGSGFNDDPLWLICGAAAYIKETGDYSILNEKVPFDNNDELADTLFIHLKRSFYYTVTHTGPHGLPLIGRADWNDCLNLNCFSKTPGESFQTTANYESGVAESVLIAAIFVFVGPDFVEICKRTGRTEEAQRAEKAIADMIEAIKTHGWDGKWFLRAYDAYGKKIGSRECEDGKIFIESNGFAVMADIGIKDGRAQKALDSVKEQLDTKYGIVLLQPAYKDYHLELGEVSSYPPGYKENAGIFCHNNPWITIAETRLG

SEQ ID NO: 61573 - DNA, 435 bp, Unknown
  Obtained from environmental sample
  misc_feature (1)..(435): n is a, c, g, or t
atgcagtacggttattttgacgatagcgcgagggaatacgtaatcactcgccctgatactccatatccgtggatcaattatttaggcagtgaagatttttacggccttttttcaaacacatcaggcggttactgcttttaccgcgatgcgcgtttaatgcgtttgacgcgttaccgttacaacaacgtgcccaccgactcaggcgggcgttatttctacatacgcgatagcgtacgggacagcggcgatatttggacgccttcatggatgccgatgaaatccgcgcttgaccgctacgaatgtcgtcacgggatgggctattcgtgcttttcttccgcgcgaaacggactggttttttctcaaacctcgtttgtgccgttaaaagataactgccaaattcacaaaaatcgtgctgacaaacgtatcccaagctga

SEQ ID NO: 61574 - protein, 144 aa, Unknown
  Obtained from environmental sample
  DOMAIN (66)...(142): Glycosyltransferase family 36
  misc_feature (1)..(144): Xaa is any amino acid
MQYGYFDDSAREYVITRPDTPYPWINYLGSEDFYGLFSNTSGGYCFYRDARLMRLTRYRYNNVPTDSGGRYFYIRDSVRDSGDIWTPSWMPMKSALDRYECRHGMGYSCFSSARNGLVFSQTSFVPLKDNCQIHKNRADKRIPS

SEQ ID NO: 61575 - DNA, 468 bp, Unknown
  Obtained from environmental sample
  misc_feature (1)..(468): n is a, c, g, or t
gtggaacccacccgcgtggggcagcgcagcgattatgacaagctggtaatggagatttggaccgatggaaccgtaaagcccgatgacgcacttgccgaggccgcaaaaattaccaaggatcaccttgcggtatttatcaactttgatgaaaataatctgggcctggatgaagaaaatgacgaggacaatgagcgtatacgggcaatcttgaacactccggttgaggaactggaactttcggttcgttcttcaaactgcctcaaaaatgctgatataaaaaccatcggggaactgacccgcaaaaccgaagacgatattgccaaaacccgaaattttggcaagaaatccctgcaggaaatcaaggagaaactgaaagaatggaatttgagcctggggataactgatttgaatgtcctgaaaaacgcggttcgggtgatgccccagaaggaaacaacagatgaaacatag

SEQ ID NO: 61576 - protein, 155 aa, Unknown
  Obtained from environmental sample
  DOMAIN (59)...(126): Bacterial RNA polymerase, alpha chain C terminal domain
  misc_feature (1)..(155): Xaa is any amino acid
MEPTRVGQRSDYDKLVMEIWTDGTVKPDDALAEAAKITKDHLAVFINFDENNLGLDEENDEDNERIRAILNTPVEELELSVRSSNCLKNADIKTIGELTRKTEDDIAKTRNFGKKSLQEIKEKLKEWNLSLGITDLNVLKNAVRVMPQKETTDET

SEQ ID NO: 61577 - DNA, 1134 bp, Unknown
  Obtained from environmental sample
  misc_feature (1)..(1134): n is a, c, g, or t
atgaaaaataaattattattttttgtcattcttatttcttttgttttctcatgttattccaaccccgaaaaagcggaaaaaccgcctgatcttcctgtgccggtaataacaaacacacttacccttgttgcgacaggcgataacttatttcacgaaacaataatagattcgtcgctaaaaaacggcgtttatgactttacgccggtttactcggaaataaaaagcataatagaaaaagccgatcttgcttttatcaatcaggaaacggttatggggggcgcgaattacggctattcgggataccctgcttttaatacgccccagtctttggcgaaaacaatcgcggacacgggctttgacatcgtaaatcaggcaaacaaccacgccatggacatggggcaaaagggccttaccgcgactcttgatttatgggacacaatagaaggaataaccgtaatcggcgcaaggaagaccggagacagcgcccggataataacaaaaaacaacataagccttggattcctgtcctatacctacggccttaacggcattgctcttccggcggataatccgaatcttgtatcccttatcaataaaaataaaatggagacggaaattgacgcgctgcgccccttatgtgatttcttgattgtttccatgcattggggcgatgaatacaaaacggaaccgggaaaaacgcaaaccgaccttgccctttttatggcggaacacggcgtagaccttatcatcgggcatcatccccatgtgctccagcgcgcgcaaaccattactcttgaagacggaagaaaaacattttgcatctattcccttggaaactttgtatccaaccagagggaaacagaaaggataataggcggaatgctggccgtaacttttacaaaaaagacgcaggaagaggaaacaaaggaattatatatttccgatttcgggatgattcctgttatatgccattttgaccgcggctttataaatacaaaagtttatcccttgtattcatacaccgaggaactgcttaaaaaccacgccttaaaaaacaaagatctgacgattgattctttttatacaatattgaaaagaatggaaacaaaaatttttatgcacaatcctttttag

SEQ ID NO: 61578 - protein, 377 aa, Unknown
  Obtained from environmental sample
  SIGNAL (1)...(20)
  misc_feature (1)..(377): Xaa is any amino acid
MKNKLLFFVILISFVFSCYSNPEKAEKPPDLPVPVITNTLTLVATGDNLFHETIIDSSLKNGVYDFTPVYSEIKSIIEKADLAFINQETVMGGANYGYSGYPAFNTPQSLAKTIADTGFDIVNQANNHAMDMGQKGLTATLDLWDTIEGITVIGARKTGDSARIITKNNISLGFLSYTYGLNGIALPADNPNLVSLINKNKMETEIDALRPLCDFLIVSMHWGDEYKTEPGKTQTDLALFMAEHGVDLIIGHHPHVLQRAQTITLEDGRKTFCIYSLGNFVSNQRETERIIGGMLAVTFTKKTQEEETKELYISDFGMIPVICHFDRGFINTKVYPLYSYTEELLKNHALKNKDLTIDSFYTILKRMETKIFMHNPF

SEQ ID NO: 61579 - DNA, 981 bp, Unknown
  Obtained from environmental sample
  misc_feature (1)..(981): n is a, c, g, or t
ttgaaaagaagaactgctgcaatcgagcggcacggaagccgccgcgtcctaaccgtaaaaatgaatgtccgcgaagcgctggttaagggcagtgccgatctaaaatcaaccggtattgaatcatcatcccttgacgcttctcttttgcttgcgcatgttttgaataccacgcgcacggcgcttcttgcaaaaggaacggatacgttaactgacaacgcccttgcggcgtttcgcgctcttatcgaaagaagacttaacggcgaatgcgccgcttacatacttgggaaaaaagaattcagagggcttgagtttctggtaaacaagtcggtacttgtgccgcggcctgagacagagacgcttgtagaaacggcgattaacatacttaacaaagaaaacaaagatacggaaaagacttgcgttcttgatctctgtacggggtcgggggcaatcgccgtttcaataaagagcgaaatgccggaagttgacgtatgggcaacggacataagcggacaagcccttgaaaccgcgaaaattaacgcagcccgtcttttgcacggcagcgctgttcaattttatcaaggcgacttatttaaggcgctgccgttttctgcgctgccatttaacgagccgccggataacgcgctgacagataacgcaaagccgtctttgcgattttccgtaattgtaagcaatcctccgtatattcctaccgaggaaataaaaactctcgcggcggaggtgcaaaatgagccgctcattgccctcgacggagggcaatcggggctggaaataattgaacgaatcattgaaggcgcgcccgattaccttattaaaaacggcgcgctgttaatggaaaccgcgggcaaaaaacagactgaaaaaatcgccgtactgcttgaaaaaaaaggatttaccaatataaatatatataaggatttatccggacaagagcgggtgatcgggggcatatatgaaaaataa

SEQ ID NO: 61580 - protein, 326 aa, Unknown
  Obtained from environmental sample
  DOMAIN (117)...(299): Methyltransferase small domain
  misc_feature (1)..(326): Xaa is any amino acid
MKRRTAAIERHGSRRVLTVKMNVREALVKGSADLKSTGIESSSLDASLLLAHVLNTTRTALLAKGTDTLTDNALAAFRALIERRLNGECAAYILGKKEFRGLEFLVNKSVLVPRPETETLVETAINILNKENKDTEKTCVLDLCTGSGAIAVSIKSEMPEVDVWATDISGQALETAKINAARLLHGSAVQFYQGDLFKALPFSALPFNEPPDNALTDNAKPSLRFSVIVSNPPYIPTEEIKTLAAEVQNEPLIALDGGQSGLEIIERIIEGAPDYLIKNGALLMETAGKKQTEKIAVLLEKKGFTNINIYKDLSGQERVIGGIYEK

SEQ ID NO: 61581 - DNA, 1011 bp, Unknown
  Obtained from environmental sample
  misc_feature (1)..(1011): n is a, c, g, or t
atgattgttgttataaagcaggacgcaaacgaaaaaagcgtagaaaatcttatctcctggcttgaaaatcaggggctgcgcgttaatgtaaaccggggcgtatatcaaacggtgctggggctgattggcgacacgcacagcctcaacgcggaactgatcgacggcatggacattgtagagcgcgtacagcagatcagcgagccgtataaaaaagccaaccgcaagtttcacacggacgataccgtggtggacatgggcgggtataaaatcggcggcggccattttcagtttatcgccggcccctgttcggtggaatcctccgagcagatttgcggaatagcgcggcaggtgcatgaagccggggcgaatcttctgcggggcggcgcgtttaagccgcggacttcgccctattcgtttcaggggcttcgggacgaaggcatagaatttttgctgaaagcgaaagagctgaccggtatgccggttgtcagcgaaataatgaacgcaaaccatcttcccatgttcgagcaggtcgatgtcattcaggtgggcgcgcgcaatatgcaaaattttgaactgctgaaagaactggggacgcaggaaaagcccattctgctgaagcgagggcttgccaatacgcttgaggaattgctgatgagcgcggagtatatcatgtccggcggaaacgagcatattattctctgcgagcgcggcatccgtacttttgaaacatccacccgcaatacccttgatatttccgccataccgatgcttaagcggctgacgcatctgccggtcattattgatcccagccatgccgcgggcgacgcggctctggtgtatccgctttcaatggcggcggcggcggcgggcgcggatggtctgatcattgaggtacacaacgaccccgcccatgccctgtgcgacggacctcagtcaattacaccggatgcttttgcttctttggcaagcgatgttaaaaagattttggaaattgtaagcaagaaaaaataa

SEQ ID NO: 61582 - protein, 336 aa, Unknown
  Obtained from environmental sample
  DOMAIN (80)...(334): DAHP synthetase I family
  misc_feature (1)..(336): Xaa is any amino acid
MIVVIKQDANEKSVENLISWLENQGLRVNVNRGVYQTVLGLIGDTHSLNAELIDGMDIVERVQQISEPYKKANRKFHTDDTVVDMGGYKIGGGHFQFIAGPCSVESSEQICGIARQVHEAGANLLRGGAFKPRTSPYSFQGLRDEGIEFLLKAKELTGMPVVSEIMNANHLPMFEQVDVIQVGARNMQNFELLKELGTQEKPILLKRGLANTLEELLMSAEYIMSGGNEHIILCERGIRTFETSTRNTLDISAIPMLKRLTHLPVIIDPSHAAGDAALVYPLSMAAAAAGADGLIIEVHNDPAHALCDGPQSITPDAFASLASDVKKILEIVSKKK

SEQ ID NO: 61583 - DNA, 360 bp, Unknown
  Obtained from environmental sample
  misc_feature (1)..(360): n is a, c, g, or t
ttgtgtacctcaatgatcagaccatccgcgcccgccgccgccgccgccattgaaagcggatacaccagagccgcgtcgcccgcggcatggctgggatcaataatgaccggcagatgcgtcagccgcttaagcatcggtatggcggaaatatcaagggtattgcgggtggatgtttcaaaagtacggatgccgcgctcgcagagaataatatgctcgtttccgccggacatgatatactccgcgctcatcagcaattcctcaagcgtattggcaagccctcgcttcagcagaatgggcttttcctgcgtccccagttctttcagcagttcaaaattttgcatattgcgcgcgcccacctga

SEQ ID NO: 61584 - protein, 119 aa, Unknown
  Obtained from environmental sample
  SIGNAL (1)...(24)
  misc_feature (1)..(119): Xaa is any amino acid
MCTSMIRPSAPAAAAAIESGYTRAASPAAWLGSIMTGRCVSRLSIGMAEISRVLRVDVSKVRMPRSQRIICSFPPDMIYSALISNSSSVLASPRFSRMGFSCVPSSFSSSKFCILRAPT

SEQ ID NO: 61585 - DNA, 891 bp, Unknown
  Obtained from environmental sample
  misc_feature (1)..(891): n is a, c, g, or t
atgaatattgatacgctgaataaggaaatagacggcattgacgagcagttgctgaaactgtttgaacagcgcatggagcttgccaaaaaactgggacagcataagcaggatatttcccagccggtcatggactcagagcgcgagcgcaaaatcctgtaccagttgtgcgaacaggcgcggcctgaactgtcaggatatgtcaaagttttgttttcttccctgttcgagataagccgcagtcatcaaaaagcgcagagccattatgattcggcggtaaaaaaacttcttgacgacacgtccgcgtatatacccgaattcccttcacgggccactgtcgcctgtcagggggtggagggtgcgtattcccaggccgcctgcgacaagttgttctctccggcggacatcacttatttcaacagttttgaaggcgtttttcaggcgatagacggcggcctgtgccgttttggggtagtgccgctggaaaacagttccgcggggtcggtcaatgaggtgtatgccctgatgaaccgttacaggttttatattgtacgcagcataaagctgccggtaacgcatacattactggcggcccccggcgcgaagttagacgacattaaagaagttttttcgcatgagcaggcgatccgccaatgcagccggtttttaaaatcatggaacggcgtcaaaataaccgaatgcgcgaacacggcaatggccgcaaaacaggcggcaagttcaggacggacagacgcggcggttatctcgtcgcgggattgcgctgaattgtacggtctgcaggcgctgtcatacaatatccaaaacaccgacaacaattacacgcgcttcatctgcatatcgaaaaagccnggaaatatatccgggtgcccataa

SEQ ID NO: 61586 - protein, 296 aa, Unknown
  Obtained from environmental sample
  DOMAIN (8)...(85): Chorismate mutase type II
  misc_feature (1)..(296): Xaa is any amino acid
MNIDTLNKEIDGIDEQLLKLFEQRMELAKKLGQHKQDISQPVMDSERERKILYQLCEQARPELSGYVKVLFSSLFEISRSHQKAQSHYDSAVKKLLDDTSAYIPEFPSRATVACQGVEGAYSQAACDKLFSPADITYFNSFEGVFQAIDGGLCRFGVVPLENSSAGSVNEVYALMNRYRFYIVRSIKLPVTHTLLAAPGAKLDDIKEVFSHEQAIRQCSRFLKSWNGVKITECANTAMAAKQAASSGRTDAAVISSRDCAELYGLQALSYNIQNTDNNYTRFICISKKPGNISGCP

SEQ ID NO: 61587 - DNA, 573 bp, Unknown
  Obtained from environmental sample
  misc_feature (1)..(573): n is a, c, g, or t
atgaaaaaatctatcccaatatcaaatggattttgcccgcaaacactgtttctgtatggaacatataaagaagacaaaactccgaattttggattattttgttggtttagttattactgggacaaagaaatgggagtaatggcttgtatcggagagaataaacttacaaaagaccggatacggaagaataaaattttttcggctaatcttgttacagaagaaatattgtctatcgcggattatttcggcaataaacaaggatatgacaataacaaaatgaatattgaaatagaaacagaaaagggacaagttcttgatgttcccgttttttcaaaaagtcctgtggtttttgaactggaagtcgatcaatctctgacttttggagatagtgaagtatttctatgcaaaataagaaatgtactcgccgatgaatatttgtgtgatgaaactataagcgttgaaaaacgaataaaaacaattcgtcctgttcataccacggtgcagaaatatttttcgtgggatggaaatgaagttggtgattggggaaaagcaatgaagggaacgataaaataa

SEQ ID NO: 61588 - protein, 190 aa, Unknown
  Obtained from environmental sample
  misc_feature (1)..(190): Xaa is any amino acid
MKKSIPISNGFCPQTLFLYGTYKEDKTPNFGLFCWFSYYWDKEMGVMACIGENKLTKDRIRKNKIFSANLVTEEILSIADYFGNKQGYDNNKMNIEIETEKGQVLDVPVFSKSPVVFELEVDQSLTFGDSEVFLCKIRNVLADEYLCDETISVEKRIKTIRPVHTTVQKYFSWDGNEVGDWGKAMKGTIK

SEQ ID NO: 61589 - DNA, 633 bp, Unknown
  Obtained from environmental sample
  misc_feature (1)..(633): n is a, c, g, or t
atgcggggtcttataggtaaaaaagttggaatgacgcggctctttaacgagaccgggcgtgtggtcggggtgacggtcatccttgccggcaacaatgtcgtcgagcagataaagaccgaggagaacgacggttacgatgccgtgcagctcggtttcgaggaagtcgcgcccaggaaggtccgcaagccgcaggaagggcactttaagaagctgggaaccgctcccatgaaggtgctcaaggagtttgagcccgactgcgacgccgataaggagctcaagcccgggcagtcgataggggtggaggtctttgaaaacgtcaagttcgtgaacgtgacgggcatatcaaaaggccgcggccacgccggtacgatcaagcggtataatttccagcgcggccgcgaaacgcacggtaataccaacctaagggagcgcgggtcttccggagccggttcatatccggcgcgtgttccgcccggattaaagatgtccggccacatgggggccgagcaggtaacaacacgtaggttagaagttgtcggaatcgataaagaagccgggcttgtattcgtcaaaggatcggtaccgggttgccgtacgggaatcgtatttttgagaaaatttattgagaagtaa

SEQ ID NO: 61590 - protein, 210 aa, Unknown
  Obtained from environmental sample
  DOMAIN (8)...(205): Ribosomal protein L3
  misc_feature (1)..(210): Xaa is any amino acid
MRGLIGKKVGMTRLFNETGRVVGVTVILAGNNVVEQIKTEENDGYDAVQLGFEEVAPRKVRKPQEGHFKKLGTAPMKVLKEFEPDCDADKELKPGQSIGVEVFENVKFVNVTGISKGRGHAGTIKRYNFQRGRETHGNTNLRERGSSGAGSYPARVPPGLKMSGHMGAEQVTTRRLEVVGIDKEAGLVFVKGSVPGCRTGIVFLRKFIEK

SEQ ID NO: 61591 - DNA, 441 bp, Unknown
  Obtained from environmental sample
  misc_feature (1)..(441): n is a, c, g, or t
ttgacgaatacaagcccggcttctttatcgattccgacaacttctaacctacgtgttgttacctgctcggcccccatgtggccggacatctttaatccgggcggaacacgcgccggatatgaaccggctccggaagacccgcgctcccttaggttggtattaccgtgcgtttcgcggccgcgctggaaattataccgcttgatcgtaccggcgtggccgcggccttttgatatgcccgtcacgttcacgaacttgacgttttcaaagacctccacccctatcgactgcccgggcttgagctccttatcggcgtcgcagtcgggctcaaactccttgagcaccttcatgggagcggttcccagcttcttaaagtgcccttcctgcggcttgcggaccttcctgggcgcgacttcctcgaaaccgagctgcacggcatcgtaa

SEQ ID NO: 61592 - protein, 146 aa, Unknown
  Obtained from environmental sample
  misc_feature (1)..(146): Xaa is any amino acid
MTNTSPASLSIPTTSNLRVVTCSAPMWPDIFNPGGTRAGYEPAPEDPRSLRLVLPCVSRPRWKLYRLIVPAWPRPFDMPVTFTNLTFSKTSTPIDCPGLSSLSASQSGSNSLSTFMGAVPSFLKCPSCGLRTFLGATSSKPSCTAS

SEQ ID NO: 61593 - DNA, 354 bp, Unknown
  Obtained from environmental sample
  misc_feature (1)..(354): n is a, c, g, or t
ttgacttttaaagataaaaagataaagacaaggagtataggaaaaatgccgggagaaagaattcgtatcaggttaaagtcgtttgaccacaatatcctcgacaagtccgcgtcggatatcgtgcgtacggccaaaggcacgggcgcccgtatctccgggcctatacccttgcctacggagaagactatctacacggtcctccgctcgccccacgtgaacaagaagtcgcgcgagcagttcgagacccgtgtgcataagaggttgatcgacattctcgagtccacgccgcagacggtcgactcgcttatgaagcttgatctgccggccggcgttgatgtcgagataaaggtttga

SEQ ID NO: 61594 - protein, 117 aa, Unknown
  Obtained from environmental sample
  DOMAIN (20)...(115): Ribosomal protein S10p/S20e
  misc_feature (1)..(117): Xaa is any amino acid
MTFKDKKIKTRSIGKMPGERIRIRLKSFDHNILDKSASDIVRTAKGTGARISGPIPLPTEKTIYTVLRSPHVNKKSREQFETRVHKRLIDILESTPQTVDSLMKLDLPAGVDVEIKV

SEQ ID NO: 61595 - DNA, 1680 bp, Unknown
  Obtained from environmental sample
  misc_feature (1)..(1680): n is a, c, g, or t
atggaccgtatcggagcggatttcgacggttgcgtcggcgctatggcgcgcaagttttcttccatgaaagcggttgcggtgcagatgccgatgggggctgaggataagttcgagggcgtgatagacctcgtgtctatgaagtcttaccggtacgatgaggagacgttgggcgctaaggtgataacgggggagatacccgcgcggttcgccaaggaggcggcggcccggcgtgaggagatgcttgaggcggcggtcgatttcagcgacgagttgatggcgaaggtgttggatggcggcgatgtcggcgaagagttgatcagggcggctcttaggtgcggggttttgcggaataagatttatcccgtgctttgcgggtcctcctttaagaataaaggaattcagcagttgcttgacgcggtggtctcttatttgccctctcctatagataggggggcggtcacgggggttgaacccgttaccttggaggcgaaggagagattgcccgatgcggagaggcagccgttttcggcgcttgtcttcaaaatcgcggcggatcagcatgtcgggcggttggcttacgctagagtttattcgggcaaggcggggtttaagagcgttctctacaatcccaggataaagtcgagggagaaggccgctaggattttcaggatgcactccaataagaggcatgccgaaaatagtatggaagcgggggatatcgtcggtttggtaggtctaaaggacaccgtcaccggcgacacgatttgcgaccccgattttccgatcatctttgagcagatgacctttcccgacacggtgttgtcgaggtcgatagagcctaagagcaccgcggatgaggagaagctgaatctggcgcttgagaggttgactgacgaggatcctacttgcagggtgcgggtggacagtgagacggggcagaggcttatctccggaatgggggagcttcacgtagagattttggtagatcgtttggttaaggagtttaatgtaggcgtgcacgtcggcaagccgcaggtctcttacaaggagacggtgacggcggcggcggttcaggaatacgagttcaatcagttggttggcggcaagactcatcacggccacatcacgttgggtgtggaacctatggaggccgcggccggcgtggagtttataaacggggtatcggccgaggcgttgccggcgggatttgccggcgcggtgaggcaaggggtgctggaagccgcgggcggcggggcgctttcgggatttcctgttgcgggagtgcgagtcaagttattatcttctgtatataaagaagccgaatccaccgagatcggtttcaaaatagccggaagcatggccttcaaagaagcgtgcgcgaaagcgtcgcctgcggtgttagagccggtgatgtccgtcgaaatagtcgtgccgcccgagtatatgggcgcggtgataaacgactttaacagccggcgcgggaaggttctggggatagaagcccgtaaggatgttcaagcggtgagcggctttgctccgctctccgagatgttcggttacgctactgcgctgagatcacagagccaaggccgagcgtcttatacgatgcagcttgataagtatgaagtcgctagcaaagcggtgcaagagagcatattaaagagaatagggcgcctatga

SEQ ID NO: 61596 - protein, 559 aa, Unknown
  Obtained from environmental sample
  DOMAIN (189)...(256): Elongation factor Tu domain 2
  misc_feature (1)..(559): Xaa is any amino acid
MDRIGADFDGCVGAMARKFSSMKAVAVQMPMGAEDKFEGVIDLVSMKSYRYDEETLGAKVITGEIPARFAKEAAARREEMLEAAVDFSDELMAKVLDGGDVGEELIRAALRCGVLRNKIYPVLCGSSFKNKGIQQLLDAVVSYLPSPIDRGAVTGVEPVTLEAKERLPDAERQPFSALVFKIAADQHVGRLAYARVYSGKAGFKSVLYNPRIKSREKAARIFRMHSNKRHAENSMEAGDIVGLVGLKDTVTGDTICDPDFPIIFEQMTFPDTVLSRSIEPKSTADEEKLNLALERLTDEDPTCRVRVDSETGQRLISGMGELHVEILVDRLVKEFNVGVHVGKPQVSYKETVTAAAVQEYEFNQLVGGKTHHGHITLGVEPMEAAAGVEFINGVSAEALPAGFAGAVRQGVLEAAGGGALSGFPVAGVRVKLLSSVYKEAESTEIGFKIAGSMAFKEACAKASPAVLEPVMSVEIVVPPEYMGAVINDFNSRRGKVLGIEARKDVQAVSGFAPLSEMFGYATALRSQSQGRASYTMQLDKYEVASKAVQESILKRIGRL

SEQ ID NO: 61597 - DNA, 492 bp, Unknown
  Obtained from environmental sample
  misc_feature (1)..(492): n is a, c, g, or t
ttgcctcaccgcgccggcaaatcccgccggcaacgcctcggccgataccccgtttataaactccacgccggccgcggcctccataggttccacacccaacgtgatgtggccgtgatgagtcttgccgccaaccaactgattgaactcgtattcctgaaccgccgccgccgtcaccgtctccttgtaagagacctgcggcttgccgacgtgcacgcctacattaaactccttaaccaaacgatctaccaaaatctctacgtgaagctcccccattccggagataagcctctgccccgtctcactgtccacccgcaccctgcaagtaggatcctcgtcagtcaacctctcaagcgccagattcagcttctcctcatccgcggtgctcttaggctctatcgacctcgacaacaccgtgtcgggaaaggtcatctgctcaaagatgatcggaaaatcggggtcgcaaatcgtgtcgccggtgacggtgtcctttag

SEQ ID NO: 61598 - protein, 163 aa, Unknown
  Obtained from environmental sample
  misc_feature (1)..(163): Xaa is any amino acid
MPHRAGKSRRQRLGRYPVYKLHAGRGLHRFHTQRDVAVMSLAANQLIELVFLNRRRRHRLLVRDLRLADVHAYIKLLNQTIYQNLYVKLPHSGDKPLPRLTVHPHPASRILVSQPLKRQIQLLLIRGALRLYRPRQHRVGKGHLLKDDRKIGVANRVAGDGVL

SEQ ID NO: 61599 - DNA, 468 bp, Unknown
  Obtained from environmental sample
  misc_feature (1)..(468): n is a, c, g, or t
atggcggcaatagcatcacgcagaaaaggccgcattctggcattccaggcgctgtactgctgggaatcaaaccaagtttcttccgatgagttaatggcgttttcatggctggaaaacgagaagctggctgaacttgacaatagcatcgccgctttttcacgtttgttaataactggcactattgagaatattcagccgattgacgaaatgatcaaaagccatttgcagcattgggatatttcccggcttaaccgggtggatcttgccatactcaggatgagcgtatatacattgatgtatcagagggaaattgccccgtcaatagtgatagatgaagcgattggcatttcaaaagaatacggaaccgatgattcatatcgctttatcaacggggttttggatagtatccatcacacgcttctggtacagacggaaaaaggggccgtccttaccaaaaatgcgttataa

SEQ ID NO: 61600 - protein, 155 aa, Unknown
  Obtained from environmental sample
  DOMAIN (8)...(140): NusB family
  misc_feature (1)..(155): Xaa is any amino acid
MAAIASRRKGRILAFQALYCWESNQVSSDELMAFSWLENEKLAELDNSIAAFSRLLITGTIENIQPIDEMIKSHLQHWDISRLNRVDLAILRMSVYTLMYQREIAPSIVIDEAIGISKEYGTDDSYRFINGVLDSIHHTLLVQTEKGAVLTKNAL

SEQ ID NO: 61601 - DNA, 1044 bp, Unknown
  Obtained from environmental sample
  misc_feature (1)..(1044): n is a, c, g, or t
atgaaacgaattgcattttttacctttttttccttatttttaaccagtttatgctttgcgcaggcggacttgcaaccggcggctattgtcaacttaatcagaagcgaacccattacggtcaaacaattccgtactgaggttgaaaaagtggaaaaaagtacccggcgttcgttaaacgacaaggaacggcgggaagttctggatgcgatgattaatgagcgtttggcaattcaggctgcggaaaaggataaaattaccgtttctgaaaacgaggtaacccagcagatcaatcagcttaaaaatcagatggttcaggctataggacggccgcccactgacgcggaatttgccgcggcaatcaaaaacgaaaccggtcttgatatgcccgcgttccgggatcaagcgcggcggcagcttctcacgcaaaagtacctcatgtcaaaaaaacagagcagttttgaaaatataaaaacgcctactgaggctgatattacgaacgcctataatttaactaaagcccagtttgtcagacccgataccgtccgtttttccatgatacagatagaatatggcccggacgccgcttccaagaccaaagccaaggatctggcggacaggttgattagggaaattggatctagcgcgtcgaaatttgacgaggttgttcttcggggtcaggcgccaaattccggttatcaggcaggggatggcggttatctgccccggaacatggaagccgcgcagattgttgggcaggagtttatcaccaccgcttttaacctcaagcagggtgaagtttccagattgatggaaggcgttcggggttatcaaatcattaaagttaccgaaacctacgcccagaaaaaccttgaattggatgatatttttcagttgggcagccgtattactgtccgtaattatattggcaactccattctacaggaacggcagatggagactcttaagaaagctaccgaggaattggtagccgaattgcgggcgggaaagacttttcagatatttgaaagaaatttgtcctggtaa

SEQ ID NO: 61602 - protein, 347 aa, Unknown
  Obtained from environmental sample
  SIGNAL (1)...(22)
  DOMAIN (186)...(283): PPIC-type PPIASE domain
  misc_feature (1)..(347): Xaa is any amino acid
MKRIAFFTFFSLFLTSLCFAQADLQPAAIVNLIRSEPITVKQFRTEVEKVEKSTRRSLNDKERREVLDAMINERLAIQAAEKDKITVSENEVTQQINQLKNQMVQAIGRPPTDAEFAAAIKNETGLDMPAFRDQARRQLLTQKYLMSKKQSSFENIKTPTEADITNAYNLTKAQFVRPDTVRFSMIQIEYGPDAASKTKAKDLADRLIREIGSSASKFDEVVLRGQAPNSGYQAGDGGYLPRNMEAAQIVGQEFITTAFNLKQGEVSRLMEGVRGYQIIKVTETYAQKNLELDDIFQLGSRITVRNYIGNSILQERQMETLKKATEELVAELRAGKTFQIFERNLSW

SEQ ID NO: 61603 - DNA, 1752 bp, Unknown
  Obtained from environmental sample
  misc_feature (1)..(1752): n is a, c, g, or t
gtgcaaattcagggaaaatccctgctgcccgacaacgatccaacggtgctttttaccaccgctgggatgcatccgctggttccctacctcttgggcgaggcccaccccgcggggaaacggctggtggattaccagaaatgcatacgcaccggggatattgacagcgtgggcgacacaagccacctgactttttttgaaatgctcggcaactggtcgctgggggattattttaaggaaggcgccattgaaatgagctttgaattcctcacttccccgcaatggctgaatattcctataggaaaactgggagttaccgtttttgtgggcgacggtgaagtgccgcgggatgacgaatccgcctcggtgtggaggaaaatgggcattcccgaaaaccgtatcgcctatctgccccgcgccgacaactggtgggggcccgccggaagcaccggcccctgcgggccggattcggagatgttctactatgtgggcgaggcgccttgcgggccggattgcaaaccgggctgttcctgcggcaaatggctggaaatctggaacgacgtgttcatgcagtacaacaaaaaagccaatggtgaatatgagccgctgacccgtaaatgtgttgacacgggcatgggcatagagcggacggtgacgatcctcaacggcaagcagtcggtgtatgacactgatatatttgcgtcaatacgcggcgcggtggaaaaaggcgcgggctatgtttacggaactgacagcgagaaggacaagtcggtgcgtataatctgcgatcacctgcgcgcctcaaccttcatcctgggcgatccaaaggcggtaagcccctccaacgtcggggccggttatgtgttgcgccgccttatacgccgggcagtgcgccacgggcgaaagttggggataaacatggaaactcccctgctgtcgccaatcgccgatattcttatcgggcagatgcatgggccctacccggaattgacggagaacagggcccgtataatgggagaactggacagggaagagcaaaaatttctggaaaccctgcaaaaaggcgagcatgaatttgaaaaattactccccaatttattaaaagaccccagaaagatcatgccgggacgcctggcattcaagctctacgatacttacggcttccccattgaactgaccgaggagcttgccgcggaaaacggcatgaaggtgaaccgcgatgaatttgacgaggcttttaaaaaacaccaggagctttcccgggcgggcagcgagcagattttcaagggcggcctgcaggatcatggggaaatttccaccaaataccatacggccacccatcttttacatcaggccttgcggatcgttctgggggatcatatcgctcaaaagggaagcaatatcaccgccgagcggatgcgcttcgattttgcccatccggcgcccatgaccgcggaagaaatcaaaaaggttgaagccattgtcaacgagcagatacaaaaagatttgcctgtttccatggaaatgatggctctggacgcggcaaaagcctcgggcgcaatcgccctttttggtgaaaaatacgaatcccaggttaaagtatacacaattggcacatcggagtgttttttttcaaaagaggtatgtggcggcccgcatgtggaacgcacaggggggcttggaaaattcaccattcagaaggaacaatcatcttcggcaggggtcaggcggataagagcggtattggaatgttaa

SEQ ID NO: 61604 - protein, 583 aa, Unknown
  Obtained from environmental sample
  DOMAIN (531)...(578): Threonyl and Alanyl tRNA synthetase second additional domain
  misc_feature (1)..(583): Xaa is any amino acid
MQIQGKSLLPDNDPTVLFTTAGMHPLVPYLLGEAHPAGKRLVDYQKCIRTGDIDSVGDTSHLTFFEMLGNWSLGDYFKEGAIEMSFEFLTSPQWLNIPIGKLGVTVFVGDGEVPRDDESASVWRKMGIPENRIAYLPRADNWWGPAGSTGPCGPDSEMFYYVGEAPCGPDCKPGCSCGKWLEIWNDVFMQYNKKANGEYEPLTRKCVDTGMGIERTVTILNGKQSVYDTDIFASIRGAVEKGAGYVYGTDSEKDKSVRIICDHLRASTFILGDPKAVSPSNVGAGYVLRRLIRRAVRHGRKLGINMETPLLSPIADILIGQMHGPYPELTENRARIMGELDREEQKFLETLQKGEHEFEKLLPNLLKDPRKIMPGRLAFKLYDTYGFPIELTEELAAENGMKVNRDEFDEAFKKHQELSRAGSEQIFKGGLQDHGEISTKYHTATHLLHQALRIVLGDHIAQKGSNITAERMRFDFAHPAPMTAEEIKKVEAIVNEQIQKDLPVSMEMMALDAAKASGAIALFGEKYESQVKVYTIGTSECFFSKEVCGGPHVERTGGLGKFTIQKEQSSSAGVRRIRAVLEC

SEQ ID NO: 61605 - DNA, 984 bp, Unknown
  Obtained from environmental sample
  misc_feature (1)..(984): n is a, c, g, or t
atgagcgaacaggtaaagaattctattgatctattgataaacaatatcaagagtctaatttcggttgatacaaaaaaactggaatatattattgccgcgcagatagcgggcggtcatgtaatcctggcggactcgcatggggtgggaaaaacgtcccttgcgcgggcattggctcagtccatccactggcatcctgaggatatggcggtcgctaaaggaaaagacgaagccgtaatggaaggattcagccgtatccagtgtacggttgatcttctcccgcaggacattttgggatataaccgttttcttggtcattctggagaactgatttttaacaagggaccgatcttcgcgcactttgttttgtgcgacgaaattaacctgcttacgccgaaaacgcagggaagtttttttcaggtgatggaagaacagagcgtgactatcgaggggaaattgtacaaattgactgatccgttctttatcatcgctacgatgaatttaaaaggcgttcatttattccccctacccacgccccagcttgaccgttttatgattcgcctctctcttggttatccaagtgaagaagatgaaactgaaattatcaacaggcacggcaagattgacgcatgggacagttttacaagcgtcatagacagcgccgatttaatccgctggaaaaaaatggtggacaccgtgcagatgcaccccgatgttacttcctatcttgtaaactgcgtccgtcaaacaagagttcatcccgacattgagacgcccgcaagtcctcgtgcaggcgtgcgtatctcgcggttggctcgttctctcgctctctgccgaggtatggactatgttcccgtcgatatcattaaagaaatttttatacattcaatggctcacagaataatcacccgcgatccttccataccgccggaagcgccgttggaaaatatcctgaacacagtccctgtcgaaccgaaacgggggtaa

SEQ ID NO: 61606 - protein, 327 aa, Unknown
  Obtained from environmental sample
  DOMAIN (39)...(238): ATPase family associated with various cellular activities (AAA)
  misc_feature (1)..(327): Xaa is any amino acid
MSEQVKNSIDLLINNIKSLISVDTKKLEYIIAAQIAGGHVILADSHGVGKTSLARALAQSIHWHPEDMAVAKGKDEAVMEGFSRIQCTVDLLPQDILGYNRFLGHSGELIFNKGPIFAHFVLCDEINLLTPKTQGSFFQVMEEQSVTIEGKLYKLTDPFFIIATMNLKGVHLFPLPTPQLDRFMIRLSLGYPSEEDETEIINRHGKIDAWDSFTSVIDSADLIRWKKMVDTVQMHPDVTSYLVNCVRQTRVHPDIETPASPRAGVRISRLARSLALCRGMDYVPVDIIKEIFIHSMAHRIITRDPSIPPEAPLENILNTVPVEPKRG

SEQ ID NO: 61607 - DNA, 690 bp, Unknown
  Obtained from environmental sample
  misc_feature (1)..(690): n is a, c, g, or t
gtggattgggtcaagaacggcaaggcgaaccacgttattttggtccgtgaggagaccaaccccgaagacatcgagggtatgcgcgccgcccagggcatccttaccgcccgcggcggtatgaccagccacgccgctctcgtagcccgcggttggggcaagtgttgcatcgtaggcgccgccgatttccatatcgacgccaaatccaagaccatcacgatcaagggcaagacgctcaaagagggcgacgtcgtcacgctcaacggcactaagggcaacgtctacgagggcgcgctccccatgatcgacgcgaccgagaacccgcgcttccagagcttcctcaagctagccgacaagtacaagtcgatgaaggtccgcgccaacgccgacacccccttccgacgcgaaagtcgcccgcagtttcggcgccgagggtatcggcctcttccgcaccgagcacatgttctacggcgagggcagcgacgagccgttaagctacctgcgccagatgatcctctccaagaacgtcggcgagcgccgcgccgccttagacaagctcttccccttcgtgaagcgcgatatcaaggcgacgatgcacgcgatggccggcttcccggttaccatccgcctcttggacccgccgttgcacgagttcgtgccggagcgccaagagctgcagagcgacctcgctaa

SEQ ID NO: 61608 - protein, 229 aa, Unknown
  Obtained from environmental sample
  DOMAIN (4)...(91): PEP-utilising enzyme, mobile domain
  misc_feature (1)..(229): Xaa is any amino acid
MDWVKNGKANHVILVREETNPEDIEGMRAAQGILTARGGMTSHAALVARGWGKCCIVGAADFHIDAKSKTITIKGKTLKEGDVVTLNGTKGNVYEGALPMIDATENPRFQSFLKLADKYKSMKVRANADTPFRRESRPQFRRRGYRPLPHRAHVLRRGQRRAVKLPAPDDPLQERRRAPRRLRQALPLREARYQGDDARDGRLPGYHPPLGPAVARVRAGAPRAAERPR

SEQ ID NO: 61609 - DNA, 1098 bp, Unknown
  Obtained from environmental sample
  misc_feature (1)..(1098): n is a, c, g, or t
atgttctacggcgagggcagcgacgagccgttaagctacctgcgccagatgatcctctccaagaacgtcggcgagcgccgcgccgccttagacaagctcttccccttcgtgaagcgcgatatcaaggcgacgatgcacgcgatggccggcttcccggttaccatccgcctcttggacccgccgttgcacgagttcgtgccggagcgccaagagctgcagagcgacctcgctaagaaattgggtatctcgcccgttgaagtcagcgcgcgcggcaagagccttgaggaggtgaacccgatgctcggccaccgcggcgtccgcctcggcgtcacctaccccgagcttaccgagatgcaggtgcgcgccatacttgaggccgccgccgagcttagcaaagagggcacgaaggtcacgccggagatcatgatccccgtaacctgcaccccgaaagagcttgcccaccagaaggccatcgttgacaaggtggccgacgaggtcaagaagaagtacgagctcaagaacttcgagtacctctacggcacgatgatagagatcccccgcgcggcgcttctggccaacgagatggccaccgttgcggagttcttctccttcggtaccaacgacttgacgcagatgggcttcggcttcagccgcgacgacatcggcgcgttcatgggcgactacttggacaagaagctcctgcccgaggatccgttcctgagcatcgaccagtccggtatcggccagttggtgcggtacggcgtcgagcgcggccgcgacgtcaggcacaacctgaaagtcggcgtctgcggcgagcacggcggcgaccccgcctccgtggagttcttctacggtcttggcttaaactacgtgagctgctcacccttccgcgttcccatcgcccgcctcgcctccgcgcacgcggagataaaggctaagagggccgcgaagtccggatcggccaaaaagtcgggctccgccaagaaggccggtaagaaagcggagaagaaagccgagaagaaagcggccaaaccggcggccaagaagtcggccccggcgaagaaagccgcgaagaagagcggcgcgaagaagaggtaa

SEQ ID NO: 61610 - protein, 365 aa, Unknown
  Obtained from environmental sample
  DOMAIN (6)...(310): PEP-utilising enzyme, TIM barrel domain
  misc_feature (1)..(365): Xaa is any amino acid
MFYGEGSDEPLSYLRQMILSKNVGERRAALDKLFPFVKRDIKATMHAMAGFPVTIRLLDPPLHEFVPERQELQSDLAKKLGISPVEVSARGKSLEEVNPMLGHRGVRLGVTYPELTEMQVRAILEAAAELSKEGTKVTPEIMIPVTCTPKELAHQKAIVDKVADEVKKKYELKNFEYLYGTMIEIPRAALLANEMATVAEFFSFGTNDLTQMGFGFSRDDIGAFMGDYLDKKLLPEDPFLSIDQSGIGQLVRYGVERGRDVRHNLKVGVCGEHGGDPASVEFFYGLGLNYVSCSPFRVPIARLASAHAEIKAKRAAKSGSAKKSGSAKKAGKKAEKKAEKKAAKPAAKKSAPAKKAAKKSGAKKR

SEQ ID NO: 61611 - DNA, 414 bp, Unknown
  Obtained from environmental sample
  misc_feature (1)..(414): n is a, c, g, or t
ttgaaacgatacgtattagacgcatgtgcgctattggccgtatggggcggagaagatggagctgaaaatataaagagtttatttagggaagctgttaatcgacaaattttcttgatgatgcataaaataaactttcttgaagtgtattacagaatttatagaaactatggaaaaatagaggctgataatttacttaaaaagatggaacaaaagccaatattaataaaagctacaataacagatgatgtatttagagaagccggaagattaaaatcaaaatataagttatcattggcagattcaatagctgtttctgaaagcataataagcaaaggttcattggttacggcggatcatcgtgagattgaacctattgaaattgctgaaaagatagacgttacgtggtttagataa

SEQ ID NO: 61612 - protein, 137 aa, Unknown
  Obtained from environmental sample
  SIGNAL (1)...(16)
  DOMAIN (4)...(133): PIN domain
  misc_feature (1)..(137): Xaa is any amino acid
MKRYVLDACALLAVWGGEDGAENIKSLFREAVNRQIFLMMHKINFLEVYYRIYRNYGKIEADNLLKKMEQKPILIKATITDDVFREAGRLKSKYKLSLADSIAVSESIISKGSLVTADHREIEPIEIAEKIDVTWFR

SEQ ID NO: 61613 - DNA, 591 bp, Unknown
  Obtained from environmental sample
  misc_feature (1)..(591): n is a, c, g, or t
gtgaaggctgtacctctaacagtagcccagtggaaaaacaaaaaaaaagtatttgataatcccgattattattcgctttttgatgtaggatntgcatcgttttatcttaatagaactacccgatcaggtattttagatggtaggcctataggcggactgnagcaaaaaggaatatggaaaattgatgctcggtttaacagaactgaattaattaaccgaatagtaaagatagcttgctataaggaacggattaatgttttcaacttggaggcgcatctctttttgacatacctcaataattcagaaaaaaaaatattcatttatctcgatcccccttattacaaacctggaccagaattatatctaaatttttataaaccacatgatcataaatcactagcccaatatatacaaaaagagctacggcatccttggattatcacatatgacaatactaaagaaatagcagaattgtataaaagccaaaaatcacttgcttttgaattggcctatagtgcaaattcgcacaaaaagggctatgaattattgttctttagccctcaactgaaaattgttcctactgttatttga

SEQ ID NO: 61614 - protein, 196 aa, Unknown
  Obtained from environmental sample
  misc_feature (1)..(196): Xaa is any amino acid
MKAVPLTVAQWKNKKKVFDNPDYYSLFDVGXASFYLNRTTRSGILDGRPIGGLXQKGIWKIDARFNRTELINRIVKIACYKERINVFNLEAHLFLTYLNNSEKKIFIYLDPPYYKPGPELYLNFYKPHDHKSLAQYIQKELRHPWIITYDNTKEIAELYKSQKSLAFELAYSANSHKKGYELLFFSPQLKIVPTVI

SEQ ID NO: 61615 - DNA, 846 bp, Unknown
  Obtained from environmental sample
  misc_feature (1)..(846): n is a, c, g, or t
atgaccaaatttacgatccttcttgcgatagtatccattataattgcggcggtaattatattctttacccttcaaagcactaccaatccgattgtcaaggtagcggataccttaaaggatatttccgaaggcgaaggcgacctgacgcggagtatcgctgtcagttccaaagacgagatcggcgaccttgccctgtacttcaacaaaactttggaaaaaatcaaaaatcttgtcttgattatcaagaaagaggcgacaagcctccagggtattggaaccgacctttccagcaacatgaccgaaaccgccgcggcggtcaatcaaattaccgcaaacatccagagcatcaagggccgggttattaaccagtccgccagcgttaccgaaaccaatgccaccatggaacaggttatcgccaacatcaacaaacttaacggtcatgtggaaagccagagccgtaatgtttcccaggtttcatccgccattgaggaaatggtcgccaatatcggttcggtcaccaacacgctggtgaacaactccgccaatgtaaagaccttgagggaagcctccgaagtaggacggaacgggttgcaggaagtggcgacggatattcaggaaatagcccgcgaatccgaaggtctgttggaaattaactcggtaatggaaaacatagccagccagaccaatctgctgtcaatgaacgcggcgattgaggcggcgcacgccggggaagcgggcaagggctttgccgtagtcgccgatgaaatccgcaaactggcggaagttccggcgagcagtccaaacgattggtacggtactgaagaaaatagcggaatcaatcaataa

SEQ ID NO: 61616 - protein, 281 aa, Unknown
  Obtained from environmental sample
  SIGNAL (1)...(26)
  DOMAIN (149)...(281): Methyl-accepting chemotaxis protein (MCP) signaling domain
  misc_feature (1)..(281): Xaa is any amino acid
MTKFTILLAIVSIIIAAVIIFFTLQSTTNPIVKVADTLKDISEGEGDLTRSIAVSSKDEIGDLALYFNKTLEKIKNLVLIIKKEATSLQGIGTDLSSNMTETAAAVNQITANIQSIKGRVINQSASVTETNATMEQVIANINKLNGHVESQSRNVSQVSSAIEEMVANIGSVTNTLVNNSANVKTLREASEVGRNGLQEVATDIQEIARESEGLLEINSVMENIASQTNLLSMNAAIEAAHAGEAGKGFAVVADEIRKLAEVPASSPNDWYGTEENSGINQ

SEQ ID NO: 61617 - DNA, 480 bp, Unknown
  Obtained from environmental sample
  misc_feature (1)..(480): n is a, c, g, or t
atgaaatccgcaaactggcggaagttccggcgagcagtccaaacgattggtacggtactgaagaaaatagcggaatcaatcaataaaattaaaagcgccacagagaacgttctgaccggattcgaggctattgatacaggcgtcaagacggtagcggagcaggaggaggtaatccgccacgcgatggaagagcaggctgaaggaagcaatcaactgcttcagggaaccaccaacctgaatggaattacccagcaggtaaaggccggttccgaagaaatgcttcggggcagtcaggaagtaatgcatgaaagccagaatcttgataaagtaacgcaggaaattaccagcggcatgaatgagatggcatcaggcgcggatcaggtgaatgtcgcggtacaccacgtcaacgagataagcggcaagaaccaggaagccattaactctttgatgaaagaagtttcacgctttaaggttgagtaa

SEQ ID NO: 61618 - protein, 159 aa, Unknown
  Obtained from environmental sample
  misc_feature (1)..(159): Xaa is any amino acid
MKSANWRKFRRAVQTIGTVLKKIAESINKIKSATENVLTGFEAIDTGVKTVAEQEEVIRHAMEEQAEGSNQLLQGTTNLNGITQQVKAGSEEMLRGSQEVMHESQNLDKVTQEITSGMNEMASGADQVNVAVHHVNEISGKNQEAINSLMKEVSRFKVE

SEQ ID NO: 61619 - DNA, 1614 bp, Unknown
  Obtained from environmental sample
  misc_feature (1)..(1614): n is a, c, g, or t
atgggaaatgaacgaaaaaaaattatagccgtagacgataatgttgaaaacctgaccgccatcaaaaacaccctgaaagacatatacgacgtgtatccctgcccctccgcggctaaaatgttcaatttactggagcatattcatcccgatttaattctgctggatgtggaaatgccggaaatgaacgggtatgaagccataggaaaactgaaaagcaacgataaatactcggaaacgcccgttatcttcctgacctccatgagcgaggcgaaaagcgaaatggagggactgcagcttggcgccgtcgattatatccgcaagccctttgccgccctgctgctgcttcagcggataaaaacgcatatttccattatggaacaggaacgggaaattaaggatctgcttgaattaaaaacaaaggaagtcagccttcgcgaactggcggaacaggaagcccagaacgcgtcccgcgccaagggcgagttcctttcccacatgagccacgaaataagatccccgttaaacgccgttataggcatgataaacatcgccaccgacgagaatgacattgactccataaagctgtatctcgggaaggcggacaacgcggcaaagcacgtcctgggcgttatcaacgacattcttgacatgtccaaaattgaggcggacaagctcgatctttccaacggcgaatttgacttcgggaaaatgatgaccaacattgtcgacgtgaccggcatccgcgcccgggagaaacaccagcagattgccgttaatatgaatcccaatattccgtcattcgtaatcagcgacgaattacggctctcgcaggttattaccaacctgatgaccaacgcgataaaattcaccccggaaaacggcaaggtgactttgagcgcggaaaagctggatgaaaaagacggcgatattaccataagaatcgaagtagaggactcaggcatagggatttcgccggaacagcagaaaaaactcttccaggcttataatcaggccgactcaagcatctccggcaaattcggcggcacggggctggggctggtcattaccaaacggattatagagctgatgcggggcacgatatggattgagtcggaactcggcaagggcgcgaaatttatatttaccataaaagtgaaacagggaccccgacccgcggataaagcaacatcggccggagcagacataaaagccgccgatttgcatttacagggttataccatattggtcgcggaagacatggatttcaaccgtgaagtcctttccaagtatctggaaaagaccggcgtaaccattgattttgccttcgacggcaaaatagccattgacatgttcaaagagaatccggataaatacaaattgattttcatggatattaacatgccggaaatgaacggagacgaggcggcaaaggtaataagggcgcttgacatgaagaaggcaaaggagatccccattatcgccatgacggcggatgtttttaaggaagacattgataaatgcctggcggccggcatgaacgatcatatccccaaaccggttgcccctaaaactatactaagaaagctcaagcaatatatgattactcaaccttaa

SEQ ID NO: 61620 - protein, 537 aa, Unknown
  Obtained from environmental sample
  DOMAIN (158)...(223): His Kinase A (phosphoacceptor) domain
  misc_feature (1)..(537): Xaa is any amino acid
MGNERKKIIAVDDNVENLTAIKNTLKDIYDVYPCPSAAKMFNLLEHIHPDLILLDVEMPEMNGYEAIGKLKSNDKYSETPVIFLTSMSEAKSEMEGLQLGAVDYIRKPFAALLLLQRIKTHISIMEQEREIKDLLELKTKEVSLRELAEQEAQNASRAKGEFLSHMSHEIRSPLNAVIGMINIATDENDIDSIKLYLGKADNAAKHVLGVINDILDMSKIEADKLDLSNGEFDFGKMMTNIVDVTGIRAREKHQQIAVNMNPNIPSFVISDELRLSQVITNLMTNAIKFTPENGKVTLSAEKLDEKDGDITIRIEVEDSGIGISPEQQKKLFQAYNQADSSISGKFGGTGLGLVITKRIIELMRGTIWIESELGKGAKFIFTIKVKQGPRPADKATSAGADIKAADLHLQGYTILVAEDMDFNREVLSKYLEKTGVTIDFAFDGKIAIDMFKENPDKYKLIFMDINMPEMNGDEAAKVIRALDMKKAKEIPIIAMTADVFKEDIDKCLAAGMNDHIPKPVAPKTILRKLKQYMITQP

SEQ ID NO: 61621 - DNA, 1248 bp, Unknown
  Obtained from environmental sample
  misc_feature (1)..(1248): n is a, c, g, or t
atgtcggtggagcggaaaataattatcgtcgtagacgattctcgcgagaatctggccatcctcaaagaaactttgaaaggcgcgtacgaggtatatccatgcccttcggcggcaaagatgtttgaattgctggaacatgttataccggatctaattctgctggatgtggaaatgccggagatgaacgggtatgaagccgcaaagaagctgaaaggcaccgtggaatacagccaaataccctttatgtttctgaccgtcagggacgacgtagaaagcgaagttcacggtttggaactgggcgccgttgattatatacacaaaccgtttgtcgcccccctgcttctccagcggataaaaaaccaggtcaccctgatggattatcaaaaaatagcgattatttccgtagcgacggtatccgccatgaaccacatcagggaaggttttgtcctggtggacgtggacaataattacctgacttccaatcccgcgatggcgaaaatgcttccgggggtcgccaaactcgagaaggggaaatccatattcctcgcgaagggctggccggaggaacttaacagtattgaacacggttccgtcgaattctccgttaccgatgaaagcaccaggtatataagggccggcatcagcccggtttttatcgggagcaagacttacatcggcagaattttcctgttcaccgacattaccgataatatcaattacctggcgggaattgaaaaagcggcctacacggacgcccttacggggctctataacagaaagcattttctggaactcgcggaagcggatatagaaagggccgccaggattaaccaggcaatctatgcggcgatggcggatattgacaatttcgtcaagattaacgatacctacggccacaccgcgggggacatggtcctgaaaacggccgcggatattatccggcagacgattcgttcctatgatcttgtcggccgttacgcgggcgagagattcagcgtcatgttcgcgatctcggatgaatcggaagtcagtaatctggcggaaagaatacgggcgaatatagaacgagcctgcacggactatgaaggagacgagataaaggctacctgcagcataggcatcgccaaattgcaaaaaacagataccctggaaaccgttatccagaaggccgacgaagccctcttcgtcgcgaaaaactcgggccgtaaccgggtaaaattttatgatgccaaactgtacgaaggatga

SEQ ID NO: 61622 - protein, 415 aa, Unknown
  Obtained from environmental sample
  DOMAIN (6)...(119): Response regulator receiver domain
  misc_feature (1)..(415): Xaa is any amino acid
MSVERKIIIVVDDSRENLAILKETLKGAYEVYPCPSAAKMFELLEHVIPDLILLDVEMPEMNGYEAAKKLKGTVEYSQIPFMFLTVRDDVESEVHGLELGAVDYIHKPFVAPLLLQRIKNQVTLMDYQKIAIISVATVSAMNHIREGFVLVDVDNNYLTSNPAMAKMLPGVAKLEKGKSIFLAKGWPEELNSIEHGSVEFSVTDESTRYIRAGISPVFIGSKTYIGRIFLFTDITDNINYLAGIEKAAYTDALTGLYNRKHFLELAEADIERAARINQAIYAAMADIDNFVKINDTYGHTAGDMVLKTAADIIRQTIRSYDLVGRYAGERFSVMFAISDESEVSNLAERIRANIERACTDYEGDEIKATCSIGIAKLQKTDTLETVIQKADEALFVAKNSGRNRVKFYDAKLYEG

SEQ ID NO: 61623 - DNA, 3867 bp, Unknown
  Obtained from environmental sample
  misc_feature (1)..(3867): n is a, c, g, or t
ttgagagaggaaagtaatgtccggctcttttttcttttcaggctgggtccctacggccccatcattgtcatcatcgcggtgctgctcattgtcatgctggtaataatcccctttgcgatgaagctcaggcgcaaacggattaaaggcaaagaaacaagagaaataatgaaggaccttttcacatggcggcacattgcccggctggtgaaggggggggaagatcatgacaaggccaagctggaactgtcggataatattgtcaggatcaacgaacttttcaaacaaggcgccgcccatgtgtcgcataacattcaaaatccttccaaaatcccctggtatgtgatgctgggagagccgagggcggggaaatcctcccttcttgcggcaagcgagcttgaattgactccctccaccgaagaagaaaacccccaggaggatccacggcagagcctgccgctgcgtttttgggtcggggccaaagccgccgtttatgacatcagcgggaaagttttttttgaccgctggcttgaagaatcaggcgccgagtggaattacattgtccggcaaatttgccgcagaaaagggccgcgcgttctggacggggtaataatcaccgtcccggcagacgcgctccttgcggatgatgaaaatctttcctcgaaaaaagccatactcatcgccagcgaactaggcaaactcctgcgtcaaagcggcatgaggctgccctgttatgtggttgtcaccaagctggatatggtgagcggttttcaggaatatgtcaggaatttcaacggggatttaaggcatcagatactgggctttgagagcgacgcgaaattatttcaccatgaaacatttgaaaagttctggggcggtcttgtcaaccggttccggtccggcgccaaacagcttctcttcccgcttgcgacggacaaagaaaacggcggagttttccgtatggacaaggcaggaaagatatggctttttcccgataatttcaacgccttatataaaaacttatatatttatcttgacgccatttttggggaaaataattttcacggcacaaaagacacgttttttgagggggtttatttcacttcttccatggatcagaacttcgctttaagtcccgacatcgcgtccctggccggaaaacatacggaagatatgttaatccccgtgttcaacccaaacacggcgcctgccgaagcggcggttcgggaatcaggcccgccggaactcccggtttcttcgacagcccttatggcggtaaacgccggccgtaccatgctcgcgccctatctgcgaaagaagaaccgcctgcacggttactttatcagggaattcctgcaccagcgggtcttagttccctctgttcacgcggaatatgtcagagcggaagcgatacgccgccatattcccctgtatatcctctgcgccgccatgattttactgggcttgatatggtttttcggcgcgcttttcaggacaaacgaattacaggcgtccatgatccaggcggaatcctactacagttggcttggcggcgttatgcgaaaaggagggccttttaattccccgttgataaccgaagaggcgggccggaggtttatcctgaacaacgaaccggtggcgggtgagagcttttcatcgcgggtgcagttctattataacgcccttctttaccgtgaccttaagatcgccgtccccgcggctttccgcgtttccgaggctgttgttttccgctttgaccggaacatgggttaccgcgacaaggccttcattgccaaccagctccataaagcaatggtcagaatgccggtaataaaaaacacgggggcaaggcttattgaacaggttgacatccggacgctggacatggaaaccagaaatattatcacttcatttatttcattggacgcgatagaaggagtgaatttttataaatactttaaaggcccgtatttcaaactggattccatgatccgttatctgattccggacatatccgatgacgctatggagttccttaccggctaccagccgcgctatgatcaggcatgggcgcctcaactggacgtggattacatttattccggggattaccgtgacgcaaagaggaacggcataagaaccattttttccgcatggcgacgccacatggtttaccccgattcgctctattcgaaaatccatacccttgcttccatatccgaagagattatcgccaattatgaaaacatcaccgccgcccttaaccggataaaccttgtttccaatccggaaggggtggaacgggccgttcttgaatggaaagaacttaccgagcggcacaggaacatgaccgcaaggggcagggccgtcttcgaggaggtaaggatcctcatgcgggccgcccatatccccctggcatttgagaacaggctgcctgaaataagtatctccggcaaaggcgtatcaaaaaggccggctcctgacgccttcggcgataacctgataaacgattatctttttaacgatcttgtattaagatacgcccttagtgaatataccaaactttttgacgcggacatggcgctggtcaagcgggaaatgggcgtttccggatccacagaggttatgggagaagttatatcgttacagaataacttcaaaggcgatcttaacatggagcttgaagaactgcgccgcagggcaggaacattgcagaacaacaggctgctgtcagaaaaaaccggcgacaagcctgaggatttatccctctttatggttattgaaagaatacttaccttaagttccggcatacccctgccgcggcgggagcaaaaccggaatttcgcttccaacatggaacagggccagatcggcattaaaaacgcccgggacgcgtttgaagagtatgttaagccttacgcggagaataaaaaactttcggcttttattgccaacgcgcgggtaatgatgctggccgaagcatattacaatcggtatattatctttaccggttcccttgcttttctcaataccttcgaaggtaatatagcctcagttgttgaatcagaagcaaagggcggcgagctgttccccttctccggcactgctattgaggagcttttcggcgggttttattttcaccggcgctacgatccttacgttgttaaagcgattgcggatgacgtcgcttcttttatttccatctttaaagaagcgggcggggagaacctgcccctctttctgcggaatgttgataaaaacatttaccagcccccggcctttatggaatacctggcaaattattttaattattggggaaactatccggaaaatgtctatgtctccgcgggaacctgggaacggttcatggcccgatcaaggcgctacaaatccttccagatcaattcggtgctgctttcgatctattcaggaagcatggaagcaatagcccggattgacgattcgctgttaaccaatacgcttgtgaatttaaaaagcaaaacaaccgccgccatgggaaaccgtttggccctgctgaaccaggttttaagcgccgatgccgaacgtatgttctccgcctgggccagcctgccggaagaccctttaattacgtataacatgctgcggagcctttccggggaagatttgaattcttcttatctggttgtttatacgtccccggtacaaaaactcgaagcggaagggcggcctcaagccttgtctctcggctggtggaacagttttgttctggatggccttaacattctcgcgcgggaggctgacacggcaaacatggcgaggcttttggagaacatggagcgttatcgggcctggcctctggcaagcgacgccgcccctcggccaatctga

SEQ ID NO: 61624 - protein, 1288 aa, Unknown
  Obtained from environmental sample
  misc_feature (1)..(1288): Xaa is any amino acid
MREESNVRLFFLFRLGPYGPIIVIIAVLLIVMLVIIPFAMKLRRKRIKGKETREIMKDLFTWRHIARLVKGGEDHDKAKLELSDNIVRINELFKQGAAHVSHNIQNPSKIPWYVMLGEPRAGKSSLLAASELELTPSTEEENPQEDPRQSLPLRFWVGAKAAVYDISGKVFFDRWLEESGAEWNYIVRQICRRKGPRVLDGVIITVPADALLADDENLSSKKAILIASELGKLLRQSGMRLPCYVVVTKLDMVSGFQEYVRNFNGDLRHQILGFESDAKLFHHETFEKFWGGLVNRFRSGAKQLLFPLATDKENGGVFRMDKAGKIWLFPDNFNALYKNLYIYLDAIFGENNFHGTKDTFFEGVYFTSSMDQNFALSPDIASLAGKHTEDMLIPVFNPNTAPAEAAVRESGPPELPVSSTALMAVNAGRTMLAPYLRKKNRLHGYFIREFLHQRVLVPSVHAEYVRAEAIRRHIPLYILCAAMILLGLIWFFGALFRTNELQASMIQAESYYSWLGGVMRKGGPFNSPLITEEAGRRFILNNEPVAGESFSSRVQFYYNALLYRDLKIAVPAAFRVSEAVVFRFDRNMGYRDKAFIANQLHKAMVRMPVIKNTGARLIEQVDIRTLDMETRNIITSFISLDAIEGVNFYKYFKGPYFKLDSMIRYLIPDISDDAMEFLTGYQPRYDQAWAPQLDVDYIYSGDYRDAKRNGIRTIFSAWRRHMVYPDSLYSKIHTLASISEEIIANYENITAALNRINLVSNPEGVERAVLEWKELTERHRNMTARGRAVFEEVRILMRAAHIPLAFENRLPEISISGKGVSKRPAPDAFGDNLINDYLFNDLVLRYALSEYTKLFDADMALVKREMGVSGSTEVMGEVISLQNNFKGDLNMELEELRRRAGTLQNNRLLSEKTGDKPEDLSLFMVIERILTLSSGIPLPRREQNRNFASNMEQGQIGIKNARDAFEEYVKPYAENKKLSAFIANARVMMLAEAYYNRYIIFTGSLAFLNTFEGNIASVVESEAKGGELFPFSGTAIEELFGGFYFHRRYDPYVVKAIADDVASFISIFKEAGGENLPLFLRNVDKNIYQPPAFMEYLANYFNYWGNYPENVYVSAGTWERFMARSRRYKSFQINSVLLSIYSGSMEAIARIDDSLLTNTLVNLKSKTTAAMGNRLALLNQVLSADAERMFSAWASLPEDPLITYNMLRSLSGEDLNSSYLVVYTSPVQKLEAEGRPQALSLGWWNSFVLDGLNILAREADTANMARLLENMERYRAWPLASDAAPRPI

SEQ ID NO: 61625 - DNA, 1116 bp, Unknown
  Obtained from environmental sample
  misc_feature (1)..(1116): n is a, c, g, or t
atggacattgaaaaagcggcgatgatgagcgagagcgtaaggcggcggaaggcttttgtagaggcggcgacatggatttccattttaagatgtaaaaccgacgggcttgaccgcaatccctggctcttgaacgtgaagaatgggactatagatattttaagcggcgaattcagggagcacaagcaagaggatatgattaccaaaattgccaatgtggattatgaccctgcggcggattgcccgatgtggaagaaatttgttcgtgaaattatggactacaaagcggacataataaaattcgtccagactgcggctgggtggtctttgtcgggcgacatttcggagcagacaatgtttattctgtacggtactggcgctaacggcaaatccacttttttgaatacgataatgtacctgctgggcgattacgcaatcgccacgcctacggaaacttttatgaaaaagtcgggggacaattattcaaatgacgttgcccgcctgcggggtactcggtttgttacgactacggaagttgagcaggggcggcggctgtccgaaccgctgataaaaaagataacaggaaacgacgaaatgacggctcgttttttgtatggggaattttttaattttatgcctactttcaaaatttttatggcgaccaaccacaagcctgttatcaagggtactgaccacggaatatggcggcggataaaactaattcctttcaccgaaaggataccggaagaaaagcaggacaagcatttggaactganactgcgggaagaaaagcagcgtattcttaactggctgctggaaggcatagcggtttggcagcgggaaaggttaataccgccgaaggctgtatcattcgctaccgacgaatacagggaagaaatggacgttatcggaaatttcataaaagaaaaatgtgtccagaaggaaaatgcgtctatcacgattaagaggctgtacaaggcttattccgactggtgcgagggaaaccacgaacaccctgtaagcgagaggtttcttactctgcggcttaaagaaatggggtttgtgcaggacaggacggcaacggaaaggttctggacgggggttacaattaacaattaa

SEQ ID NO: 61626 - protein, 371 aa, Unknown
  Obtained from environmental sample
  DOMAIN (43)...(354): Poxvirus D5 protein-like
  misc_feature (1)..(371): Xaa is any amino acid
MDIEKAAMMSESVRRRKAFVEAATWISILRCKTDGLDRNPWLLNVKNGTIDILSGEFREHKQEDMITKIANVDYDPAADCPMWKKFVREIMDYKADIIKFVQTAAGWSLSGDISEQTMFILYGTGANGKSTFLNTIMYLLGDYAIATPTETFMKKSGDNYSNDVARLRGTRFVTTTEVEQGRRLSEPLIKKITGNDEMTARFLYGEFFNFMPTFKIFMATNHKPVIKGTDHGIWRRIKLIPFTERIPEEKQDKHLELXLREEKQRILNWLLEGIAVWQRERLIPPKAVSFATDEYREEMDVIGNFIKEKCVQKENASITIKRLYKAYSDWCEGNHEHPVSERFLTLRLKEMGFVQDRTATERFWTGVTINN

SEQ ID NO: 61627 - DNA, 2466 bp, Unknown
  Obtained from environmental sample
  misc_feature (1)..(2466): n is a, c, g, or t
atgacgatcatatcacctccgacaaaaatgacatacatcagcggggaaccgcttgatctttccggtcttgttgtaatgctcatttttgacgaaggctcgccggaaaacgtggcgtacagtaattttggcgcatacaatataacgacagttccggcgcacgatacgccgcttacttcagcggataacggacagcccattacggtaaacgcaagcggtagaagtgaaaataccactagttatttaaaggttatagaacctatcgccaccgccgccgttaccgtaacccctccggctaaaaacgccgcgccgagtactgccgcgacaagttcaggtcattttatcgtcggcgcggtttcatggtctcctaatcacaatacgttccagagcgacacagcgtacacggcaactgttacacttacggcgaataccgactatacgttcacaggactgtcctccgcgaccattaacggcggcggcgcaagtatcagcaacaacaccggaacaacggttaccctgtcgtatacattcgcaaaaacgcctgtaaaggagatcaccggaataacggttaaattaccgcctacaaaaatggcatacaccaacgtggagacgcttgacctttccggtcttgttgtaactctgcattttgacgataccaccaccgaagatgttgtttttgcggattttgtggcaaaaggcataacgacaagccctacgcagggaacggcgcttaatttaacgcataatggaacgtctgttgcggtaaccaccgctaacgaaaaaaccacgaataccggtaatttaacggtcagcaaggcaggcgcatccgccgtcaccttcccctctgcgtcggcaatcacctacggcgaggcgctttcgtcatcaacattaagcggcggctcagcggggcgcggtacttttgcgtgggttaacggaacgacagttccctccgccggtacgcacagctatgatgtcgagtttaccccgaatgacgagggcacttacgattattccagtgtacccaactggaacggcgttacaaataaagttgtaaggtctgtttccattaccgtaaaccaaaaatacatcactattaccccgaccgccggacaaagcaaggtctacggcacggctgacccggcatttacctatactccgagcgaagcgttacttcccggtaacagctttacaggcacgttagcctacacaggtactaatgtaggaacgtatccatttacgcaaggctcgctttccgcgggaggtaactataatctgactttagccggaagcgttacatttgccataaccagagccccaggctctgttgtaaccaagccgtccggcacttggaatttcagtacgaaaacgattaacgttaccgccgtaagtttaagcacagcgaccggacaggatattgaatacgccataagcacatcaggttcggcatcagtcgcttcattaacatggacagttaacaaacttacattcgatattaccgcaatcgatacaacccactttatatatgcgcgttcaagagaaagcgccaactacagcgcgggtacggtaaatgtcagcgaagggattaatacaccttctatacctagctccattatcagccctactacaggaatagaaatggtctctatacctgccggaacctttacgatgggcagtcctaatggcgaaaaagactcacagagcgaagaacaccctccacattctgtaactcttaacagtttttacatgagcaagtatcaggtaacgcaggcgcagtatcaggcagtaatgggtacaaatccaagcaatttttattccaacccgcaaactggtgaaaatcagagtaaacgtccagtagaatctgtatcctggtatcaggctttggtattctgcaatgtattaagcgtgacggatggattaactcctgtatacagcattgatggcagtaccaacgtggcggattggggattagtaccaacgagcgataatcctaaatggaatgcggtacaaattgttgacggttctaccggttatcgattaccgacagaagcggaatgggaatacgcctgccgcgccggaacaacaacggcgattaacaatgggaataatgattatacagatgtcgattctgttgggtggtatgccgataactctggaaataagacacatgaagtgggattgaaatccgctaatgcgtggggactatatgatatgaatgggaatgtgactgaatggtgctgggattggtacgatactagtttttatacgactagttattcgagtagtcctgtgagtaatccaatgggacctagtaccggcaattatggcaaggtgaaacgcggtggttctttcgattcatcaatgacctatatgcgttcngcagcgcggggcggtggttactcatggacaaagtgggatgttcacggcttacgattggtgcgtaaaagcgcggaaaatcctctttatcaatag

SEQ ID NO: 61628 - protein, 821 aa, Unknown
  Obtained from environmental sample
  DOMAIN (541)...(812): Domain of unknown function (DUF323)
  misc_feature (1)..(821): Xaa is any amino acid
MTIISPPTKMTYISGEPLDLSGLVVMLIFDEGSPENVAYSNFGAYNITTVPAHDTPLTSADNGQPITVNASGRSENTTSYLKVIEPIATAAVTVTPPAKNAAPSTAATSSGHFIVGAVSWSPNHNTFQSDTAYTATVTLTANTDYTFTGLSSATINGGGASISNNTGTTVTLSYTFAKTPVKEITGITVKLPPTKMAYTNVETLDLSGLVVTLHFDDTTTEDVVFADFVAKGITTSPTQGTALNLTHNGTSVAVTTANEKTTNTGNLTVSKAGASAVTFPSASAITYGEALSSSTLSGGSAGRGTFAWVNGTTVPSAGTHSYDVEFTPNDEGTYDYSSVPNWNGVTNKVVRSVSITVNQKYITITPTAGQSKVYGTADPAFTYTPSEALLPGNSFTGTLAYTGTNVGTYPFTQGSLSAGGNYNLTLAGSVTFAITRAPGSVVTKPSGTWNFSTKTINVTAVSLSTATGQDIEYAISTSGSASVASLTWTVNKLTFDITAIDTTHFIYARSRESANYSAGTVNVSEGINTPSIPSSIISPTTGIEMVSIPAGTFTMGSPNGEKDSQSEEHPPHSVTLNSFYMSKYQVTQAQYQAVMGTNPSNFYSNPQTGENQSKRPVESVSWYQALVFCNVLSVTDGLTPVYSIDGSTNVADWGLVPTSDNPKWNAVQIVDGSTGYRLPTEAEWEYACRAGTTTAINNGNNDYTDVDSVGWYADNSGNKTHEVGLKSANAWGLYDMNGNVTEWCWDWYDTSFYTTSYSSSPVSNPMGPSTGNYGKVKRGGSFDSSMTYMRSAARGGGYSWTKWDVHGLRLVRKSAENPLYQ

SEQ ID NO: 61629 - DNA, 1047 bp, Unknown
  Obtained from environmental sample
  misc_feature (1)..(1047): n is a, c, g, or t
ttgcggatcatacttccggtttggaggttaaaaatgagcgcagaaaacagcgtgatggtatatattcagcaaaatggcggaaaagccgccgaagtgagcctggagcttgtatccaaggcgcgggaacttgcggacaagctgggagtggaagtcagcgccgcgcttttcggcgacaaggtgtccggagaagtccctcgccttgcgagcctcggtgcggatcgcgtgtacgtaatggaagatccccgcctgaaattctacactccaattccttacagcaagctgatgatccagacggtagccgaaaggaagccgcagatcgtcctttacggcgctagcaccgagggtcgggacattgctccgcgtgtggcgtctcacctcaaagtggggctgaccgcggactgtacggatttgcagatcggcgaccacacccagcaggaaacggaatacaagaacatcctttaccagatacgtccggctttcgggggcaacataatcgcaaccatcgtatgcccggagaagaaaccgcagatggccacagtccgcgagggcgttatgcgcatggcgcagagcgacccttcccgcaaggccgagatcgtgaacatttcctcgaagcttgggccggaggatttccccagtgaaataattgagcgggtcatggaagagaaaaccgtcaacctcaagggctcccagatcattgtatcaggcggtataggcgttggaagcagggacaatttcgcgcttataagggagcttgcggaaacgcttggcgcggaagttggcgcttcccgcgcggcagtggatgcgggcttcatcggcaaggagcaccaggtcgggcagacgggaaccaccgtcaggccgaagctctacatagcctgcggtatttccggcgcgattcagcaccgggcgggcatggacaattccgcccgcatcatcgcgatcaacaatgatccggaagcgccgattttcagcattgcccattacggtatcgtgggagacctgaacgaggttatcccccggatgatcaaagcgtacaaggccagagtgtag

SEQ ID NO: 61630 - protein, 348 aa, Unknown
  Obtained from environmental sample
  DOMAIN (17)...(214): Electron transfer flavoprotein domain
  misc_feature (1)..(348): Xaa is any amino acid
MRIILPVWRLKMSAENSVMVYIQQNGGKAAEVSLELVSKARELADKLGVEVSAALFGDKVSGEVPRLASLGADRVYVMEDPRLKFYTPIPYSKLMIQTVAERKPQIVLYGASTEGRDIAPRVASHLKVGLTADCTDLQIGDHTQQETEYKNILYQIRPAFGGNIIATIVCPEKKPQMATVREGVMRMAQSDPSRKAEIVNISSKLGPEDFPSEIIERVMEEKTVNLKGSQIIVSGGIGVGSRDNFALIRELAETLGAEVGASRAAVDAGFIGKEHQVGQTGTTVRPKLYIACGISGAIQHRAGMDNSARIIAINNDPEAPIFSIAHYGIVGDLNEVIPRMIKAYKARV

SEQ ID NO: 61631 - DNA, 501 bp, Unknown
  Obtained from environmental sample
  misc_feature (1)..(501): n is a, c, g, or t
atggcgttatgggatatcccagccatcaacgccgatcccgtgcagtgcgggcttgccggttcgccgaccaaggtaaagcatatcaattctgtagtgctgaccgccgcggacatcaggtacatcgatccaggcgaagcgggcgtcacagagttgatccacggccttattgcggatcatacttccggtttggaggttaaaaatgagcgcagaaaacagcgtgatggtatatattcagcaaaatggcggaaaagccgccgaagtgagcctggagcttgtatccaaggcgcgggaacttgcggacaagctgggagtggaagtcagcgccgcgcttttcggcgacaaggtgtccggagaagtccctcgccttgcgagcctcggtgcggatcgcgtgtacgtaatggaagatccccgcctgaaattctacactccaattccttacagcaagctgatgatccagacggtagccgaaaggaagccgcagatcgtcctttacggcgctag

SEQ ID NO: 61632 - protein, 166 aa, Unknown
  Obtained from environmental sample
  misc_feature (1)..(166): Xaa is any amino acid
MALWDIPAINADPVQCGLAGSPTKVKHINSVVLTAADIRYIDPGEAGVTELIHGLIADHTSGLEVKNERRKQRDGIYSAKWRKSRRSEPGACIQGAGTCGQAGSGSQRRAFRRQGVRRSPSPCEPRCGSRVRNGRSPPEILHSNSLQQADDPDGSRKEAADRPLRR

SEQ ID NO: 61633 - DNA, 870 bp, Unknown
  Obtained from environmental sample
  misc_feature (1)..(870): n is a, c, g, or t
gtgcctgacacccagaatatcagcggggaggccatgacgccggaaggcacggtaaaccgggcggctcttccggcaatatttaaccccgacgacctctacgccctggaagcggctctgcaaataaaagacgccaaccctgacaccaaggtgaccgtgataaccatgggcccgccgtccgccgccgcggtgctaaaggagtgcctttaccgaggagcggattttaccgccctggtttctgaccggggctttgccggagcggatacccttgccacttcctacgcgcttaaatgcgcgataaaaaaagccggggcttttgatctcgtgctatgcggacgtcaggcgatagacggggacaccgcgcaggtaggcccccagaccgcggaaaaactgggagtcaaccagatcacctgcgtctccaaaatcgaagccctggacgccgcaaagaaagaaataaccgcggttcgttccatcgaaggcggctgggaaaaagttaaagcgaaactgccagttctcgttacctttaccgaagagggagaaacgccccgcccagcatccgcaatcaagacctgcgcttttaaacgcgcggcccctgccgccggacgccggttctccgagcgacccggcgggctttgtcgaaaaaaccgacgcggaggaaaacggcgcggcaaaccccatggcgttatgggatatcccagccatcaacgccgatcccgtgcagtgcgggcttgccggttcgccgaccaaggtaaagcatatcaattctgtagtgctgaccgccgcggacatcaggtacatcgatccaggcgaagcgggcgtcacagagttgatccacggccttattgcggatcatacttccggtttggaggttaa

SEQ ID NO: 61634 - protein, 289 aa, Unknown
  Obtained from environmental sample
  DOMAIN (15)...(209): Electron transfer flavoprotein domain
  misc_feature (1)..(289): Xaa is any amino acid
MPDTQNISGEAMTPEGTVNRAALPAIFNPDDLYALEAALQIKDANPDTKVTVITMGPPSAAAVLKECLYRGADFTALVSDRGFAGADTLATSYALKCAIKKAGAFDLVLCGRQAIDGDTAQVGPQTAEKLGVNQITCVSKIEALDAAKKEITAVRSIEGGWEKVKAKLPVLVTFTEEGETPRPASAIKTCAFKRAAPAAGRRFSERPGGLCRKNRRGGKRRGKPHGVMGYPSHQRRSRAVRACRFADQGKAYQFCSADRRGHQVHRSRRSGRHRVDPRPYCGSYFRFGG

SEQ ID NO: 61635 - DNA, 1140 bp, Unknown
  Obtained from environmental sample
  misc_feature (1)..(1140): n is a, c, g, or t
atggacttgaaggaactacggaaaaaaattgatgaaatcgacgacggcttggttcgcctgtttcaggagcggatggacgtatccgccgaaatagcgcgttacaaaaaggaaaacaaactgccggtgcatgatccggcgcgcgaacgggaaaaattatatgatctttcttttaagacaaaccctgggcgcgaatcttatattaccgcgttatactatctgctctttgaattaagccgcgccgatcaggaaaggattttaaaccaaacctgcgagcttacggaaaaaatacagaacagcataaaaaatacggaatggatgtttccctcgcggacggttatcgcctgtcagggaaccgaaggctcatattcccagctggcggcggaaaaattgtttgatcttccaagcattatgtactgtaacacctttgaaggcgttttctccgctattgacaacggactgtgccaatacgggcttcttcctctggaaaacagcacggcaggctcaatcaatcaagtatacgatttaatgatgcgctatccgtacagcattgtgcgcagcgtccgcttaaaaatcgaccacagccttcttgcgaaaaaaggcgtaaaaatttccgacattaaagaagttttttcccacgaacaggcaatcgcccagtgcgcgggctatcttaaaacgctcaactgcaaagtaaccgcctgcgagaacacggcaatagccgcaaagatggtagccgaatccggcagaacggacgttgcggctctttcttccgcaaaatgcgcaagtatatacgacttacaccgccttgccgattcggtgcaggatcgcggcagcaactttacccgttttatctgtgttacaaaatcactcgccatttatccgggggcggacaagaccagccttatgatgaccattccgcacaaacccggttctctctaccatgttctgtcgcggttttatatccatgggattaaccttatcaaactggaaagccgcccgattcccgacagcgattttgagtttatgttttattttgatcttgaaacgcctgtttactcgcccgcgcttatgcagacaatacgggaattaagcgaattaagcgacagattttattatctgggcagttattcggaagtagtgtga

SEQ ID NO: 61636 - protein, 379 aa, Unknown
  Obtained from environmental sample
  DOMAIN (7)...(85): Chorismate mutase type II
  misc_feature (1)..(379): Xaa is any amino acid
MDLKELRKKIDEIDDGLVRLFQERMDVSAEIARYKKENKLPVHDPAREREKLYDLSFKTNPGRESYITALYYLLFELSRADQERILNQTCELTEKIQNSIKNTEWMFPSRTVIACQGTEGSYSQLAAEKLFDLPSIMYCNTFEGVFSAIDNGLCQYGLLPLENSTAGSINQVYDLMMRYPYSIVRSVRLKIDHSLLAKKGVKISDIKEVFSHEQAIAQCAGYLKTLNCKVTACENTAIAAKMVAESGRTDVAALSSAKCASIYDLHRLADSVQDRGSNFTRFICVTKSLAIYPGADKTSLMMTIPHKPGSLYHVLSRFYIHGINLIKLESRPIPDSDFEFMFYFDLETPVYSPALMQTIRELSELSDRFYYLGSYSEVV

SEQ ID NO: 61637 - DNA, 1284 bp, Unknown
  Obtained from environmental sample
  misc_feature (1)..(1284): n is a, c, g, or t
gtgaatcatcgtttcctgaaacgccgtttcttgaaacgccgcttcggcttgttaggtgaaaaactttctcacagtttctcgccgcaaattcacgccgagttgggcgattacgagtaccgcctgtacgaaaaaaaaccggaagaaatcgaagcctttttgcgcaacggcgattttgacggtttaaatgttacaattccctataaaaagacggtaatccccttttgcgcggatttgtcggaaacggcgcggttaacaggcagcgtaaacacccttgtccgcaataaagacggcgcattgtccggccacaatacggactttttcggcgtaagttacctgataagcaaggcgaaaatgaatccctccgatggaaaaacattagtgcttggaagcggcggctcttccgtaaccgtacaagccgtgttaaaaagtcaaaactcgccggaagtaatcgtaatttccagaacaggcgaggacaattatcaaaaccttgaaaaacaccgtgacgcgaaatggataataaacacaacgcctgtgggaatgtaccctaacaacggcatctctcctatacctgacttcaaacttttcagcgactgccggggagtgatagaccttatttacaaccccgcaagaacggaattgctggcgcaggcgcaggatgcgggcattcccgcttttaacggccttgcaatgcttgtggcacaggcaaaaaaagcggcggagtattttacggataccgtcatcgcggacgagaaaaatgaaatgatcaattcaataattgcccgccaatctctgaacataattttaatcggaatgcccggctgcggcaaaaccagcgtggggcttgcccttgcaaaaaagatgaagcgggaatttattgacaccgacaaattgataataaaggccgcgaaaaagccgataccggaaatatttgcggataacagcggcggaaccaccggcgaagaaaaattcagggaattggaaacaagcattctgcaaacagcgtgcaggcaaagcggaaaagttatcgccacaggcggcggcgttgtaacgcggaacgagaaccgccatatcatcaggcagaacggaattgttgtatacagggaaagggatatttcgctcttaccggtaaaagaccgccccgtctcccagcgcgacggcatcgaagcgcttgccgcggtacgcctgccgctctaccacagttggagcgactacaccgcgcagggcaatgacatcgatcaaacggcggcggatattaaaaaacattttgaagaagatttaccatga

SEQ ID NO: 61638 - protein, 427 aa, Unknown
  Obtained from environmental sample
  DOMAIN (109)...(214): Shikimate / quinate 5-dehydrogenase
  misc_feature (1)..(427): Xaa is any amino acid
MNHRFLKRRFLKRRFGLLGEKLSHSFSPQIHAELGDYEYRLYEKKPEEIEAFLRNGDFDGLNVTIPYKKTVIPFCADLSETARLTGSVNTLVRNKDGALSGHNTDFFGVSYLISKAKMNPSDGKTLVLGSGGSSVTVQAVLKSQNSPEVIVISRTGEDNYQNLEKHRDAKWIINTTPVGMYPNNGISPIPDFKLFSDCRGVIDLIYNPARTELLAQAQDAGIPAFNGLAMLVAQAKKAAEYFTDTVIADEKNEMINSIIARQSLNIILIGMPGCGKTSVGLALAKKMKREFIDTDKLIIKAAKKPIPEIFADNSGGTTGEEKFRELETSILQTACRQSGKVIATGGGVVTRNENRHIIRQNGIVVYRERDISLLPVKDRPVSQRDGIEALAAVRLPLYHSWSDYTAQGNDIDQTAADIKKHFEEDLP

SEQ ID NO: 61639 - DNA, 1173 bp, Unknown
  Obtained from environmental sample
  misc_feature (1)..(1173): n is a, c, g, or t
ttggagtatcaagtgaagaaaactaaaattattactatcgcgataatttcgcttattgcgttatttgctatccttatactgcttaattttctttttcccggaaaagcaaaaaccccgggacaggcgcaagcgggcggtcccgcatccgcaagcaattccggcagcggtaactcaggcagttccggcagagcgggtaatgccgatggttcaggcagaggctcgccgccttccgacggttccggcagagccgataatgctccagccaatagcgacagagagggtaatgccgacggctccggcagggggaattccggcggtcagggcggacaaggtaattcggtcgcaaacgcagggcgccaaggcggtccaggcggcggctcttcgcgtaacgctacaactgtccgcgttacgcccgtctccacaagcactatcgagaaaagcgtaattataaacggcgaaatattggcacgtaatcaggtaacgattttccccactataggcggaaaacttgtagagacaaggctcggcataggggacagggtttcaagcggacaaattgtcgctatggtagacccgtcaaaacccggagaagtttattcgcgaagtcctgtcgtctccacggtgtcgggaaccgttatacaggctcccttcagtataggcgatacgctcacaacgcagtcggcagtctacatagtgggagacctttcatcgctgttagttgaaacttttgtaccggaaagatttgtcgcgtccgtcgtacagggaatgcgcgcgcagttgaagcttgaggcaatagtcggcgaatcatttgacgccgaagttatcgaaataaaccccgtgcttgacccggcaaccagaacattaagaatacgcctgcggtttgtaaagcccgaccctcggataaaggcgggaatgttcgccactatcagccttgtaacaaatcgcaaggtcgatgttcctgtgattcaaagaacttccgtaataaacacctatggttcatggattgtttttctcgttgacgaaaacaataccgcgcggcggcgggaagtaacattgggacttgaaaacgaagacttttttgaaatattaggcggcataaatttgggcgataaagttgtaagcgccggacagaactttctttccgacggcgatcctgtaagggttgtggactaa

SEQ ID NO: 61640 - protein, 390 aa, Unknown
  Obtained from environmental sample
  misc_feature (1)..(390): Xaa is any amino acid
MEYQVKKTKIITIAIISLIALFAILILLNFLFPGKAKTPGQAQAGGPASASNSGSGNSGSSGRAGNADGSGRGSPPSDGSGRADNAPANSDREGNADGSGRGNSGGQGGQGNSVANAGRQGGPGGGSSRNATTVRVTPVSTSTIEKSVIINGEILARNQVTIFPTIGGKLVETRLGIGDRVSSGQIVAMVDPSKPGEVYSRSPVVSTVSGTVIQAPFSIGDTLTTQSAVYIVGDLSSLLVETFVPERFVASVVQGMRAQLKLEAIVGESFDAEVIEINPVLDPATRTLRIRLRFVKPDPRIKAGMFATISLVTNRKVDVPVIQRTSVINTYGSWIVFLVDENNTARRREVTLGLENEDFFEILGGINLGDKVVSAGQNFLSDGDPVRVVD

SEQ ID NO: 61641 - DNA, 1722 bp, Unknown
  Obtained from environmental sample
  misc_feature (1)..(1722): n is a, c, g, or t
ttgtggaataacggagtttatatgacgataagcgaatattcagtaaaacgtcccgtaacagtcgttatactgttcgcccttactatcggaattgcgcttacattacttgtaaatctcgcgctggatctctacccttccatagcaagtcccgttctttccatatatacccgtttccccggcgcgggaccggaagacattgaacgcaatgttactgaacggcttgaacgttccctatcttcatcaaggggacttgtcaatatgacaagtaattcgcagtttgaggcgagttttatcaatcttgaattcgcttatggtacaaacatggataaagcggctagtgacgcgcaaatacttcttaacaggcttgtcaactctcttcccgacggagttcaaactcctacggtacgccgctttgatatgagcactttgcccattatgcgccttgtcgtgaggggtaattatccgccggatcaactgcgtatttttgcggaagatgaaatccagtccagcatagaacgaattgagggcgtcgcggcggcggaagtaaccggcggcactacgcagattgtcaaagttgaggtctcgcttaacaggctttacgcttttaatttaaccttaagcgatatttccaattcattaaaagggcagaatgttctttcctcagggggcaatttaaggcgcggaacacgcgagtatcaaatcatgacgcaggaagagcttgtaagtatagaacaaattaaaagattggcggtaaaatccgtgcctatttcaggaacgggacaggcagtccgttatcagattatccgcgttgaggacgttgccgatgtttttatggggtataatgacaacgcgtcgagggttaatgtaaacggacagagcggcgtgtatattcaggttacaagcgagagcggaagcaatcaggtaaaagtatcggacagggtacaagccgcgcttgcggaaatcaactctaccctgccgccgggcatcacgctgcaagttctgtcagataatacttcgatgatccgcgcgactatgagtcaggtttactcaaacgccattcagggcggtcttcttgccatgtttatacttcttttatttttgcgcaacgtaaaagctaccgtaatcatagggctttcaattcccatttccatacttattacccttatgtcaatgtcgattttcggctttacgctgaatcttatgaccatgaccggactgattatgggtatgggtatgacgcttgacgcttctattgtaattattgaaaatatccacagttaccgcgagcgaggagccaaggcttcggtcgcggcaattctgggaagccgtgaaatgttacgcgctattaccgcttctaccgccactaccctttgcgtattcgttccgcttatcatttataaaaacgatcttaaagaaatggggcttatgttcagcgagcttatttttacggttgtaataagtttgactgtttccattattgtcgctgttacgcttgtaccaagcctttccggcgctattctgcgtcttaacacaagggtgcaaaaaccgataaaaaataaaatattaaagataatagacgataaaatagaatccgctcttgtctttctggaaaaaaaataccgtatcgcgcttgattactgcctttcccacaggcttatgattatttcccttgtcgtacttattcttgctttctctctgcttcaattcagcggcatggaataa

SEQ ID NO: 61642 - protein, 573 aa, Unknown
  Obtained from environmental sample
  DOMAIN (10)...(573): AcrB/AcrD/AcrF family
  misc_feature (1)..(573): Xaa is any amino acid
MWNNGVYMTISEYSVKRPVTVVILFALTIGIALTLLVNLALDLYPSIASPVLSIYTRFPGAGPEDIERNVTERLERSLSSSRGLVNMTSNSQFEASFINLEFAYGTNMDKAASDAQILLNRLVNSLPDGVQTPTVRRFDMSTLPIMRLVVRGNYPPDQLRIFAEDEIQSSIERIEGVAAAEVTGGTTQIVKVEVSLNRLYAFNLTLSDISNSLKGQNVLSSGGNLRRGTREYQIMTQEELVSIEQIKRLAVKSVPISGTGQAVRYQIIRVEDVADVFMGYNDNASRVNVNGQSGVYIQVTSESGSNQVKVSDRVQAALAEINSTLPPGITLQVLSDNTSMIRATMSQVYSNAIQGGLLAMFILLLFLRNVKATVIIGLSIPISILITLMSMSIFGFTLNLMTMTGLIMGMGMTLDASIVIIENIHSYRERGAKASVAAILGSREMLRAITASTATTLCVFVPLIIYKNDLKEMGLMFSELIFTVVISLTVSIIVAVTLVPSLSGAILRLNTRVQKPIKNKILKIIDDKIESALVFLEKKYRIALDYCLSHRLMIISLVVLILAFSLLQFSGME

SEQ ID NO: 61643 - DNA, 1119 bp, Unknown
  Obtained from environmental sample
  misc_feature (1)..(1119): n is a, c, g, or t
gtggaatacgatatcgaaatgcttaacgaaatgggctactgttcgggtatcgaaaattactccgctcatttggcaggacgcaaaagcggcgaaactcccgacacgcttgtagattattttccgaaaagacatttaacgttcattgacgaaagccacgttactctgccgcagttaggcgcaatgtacgcgggcgaccgcagccgtaaacagagccttgtcgattacggcttccgtctcccctgcgcccttgataaccgcccccttcgctacgatgaatttgtcgagcggctggataaaactgtttttgtttccgccacacccggaaaaaacgagattgagcaatcggcgcgggttgtacagcaggtgatacgccccacaggacttttagaccccgaaatagaagtgcgtcccagcgaagggcaaatggaagacatttacggcgaagtgcaaaaacgcattaaagcaaaagaacgctctcttattctcaccctgacaaaaaaaatggcggaagaccttacggattatcttaccagtctcggattgaaagtccgctacattcacagcgaggtggaaaccattgagcgtgtggaaattctcacgcaactgcggcaaggcgattttgatattctcgtaggcattaacttgttacgcgaaggtatcgacctgcctgaggtttcgtttatcgcaattctcgacgccgacaaaatcggatttttgcgctcgcttacaagtcttgtgcaaataatcgggcgggcggctcgtaacgccgcaggaaaagtaatcatgtacgccgaccgcatgagtgaagcgatggaaaaagcaatcgccgaaaccaaccgccgccgtgaaatacaaatagcgttaacaaaaaacacggggataaccccggcgacggttaagaaagcaatcgcggatatactgacccgccatgtcgaagaggcggatgacgcagcggcgtctacggtagaggtgcttaaaaagtcctataacttgttgatcccggcgcagcgcaaacagttggttaaggctcttgagaaggaaatgcttgaacacgccaaaaaccttgaatttgagcaggcggcggcgattcgggacgagattgcccgtttaaaagaatag

SEQ ID NO: 61644 - protein, 372 aa, Unknown
  Obtained from environmental sample
  DOMAIN (338)...(372): UvrB/uvrC motif
  misc_feature (1)..(372): Xaa is any amino acid
MEYDIEMLNEMGYCSGIENYSAHLAGRKSGETPDTLVDYFPKRHLTFIDESHVTLPQLGAMYAGDRSRKQSLVDYGFRLPCALDNRPLRYDEFVERLDKTVFVSATPGKNEIEQSARVVQQVIRPTGLLDPEIEVRPSEGQMEDIYGEVQKRIKAKERSLILTLTKKMAEDLTDYLTSLGLKVRYIHSEVETIERVEILTQLRQGDFDILVGINLLREGIDLPEVSFIAILDADKIGFLRSLTSLVQIIGRAARNAAGKVIMYADRMSEAMEKAIAETNRRREIQIALTKNTGITPATVKKAIADILTRHVEEADDAAASTVEVLKKSYNLLIPAQRKQLVKALEKEMLEHAKNLEFEQAAAIRDEIARLKE

SEQ ID NO: 61645 - DNA, 831 bp, Unknown
  Obtained from environmental sample
  misc_feature (1)..(831): n is a, c, g, or t
atggcgaagatcatcgaggcggtgcagatgcccaccctgatcgtaagccacaataagacactggcggcccagcttttccgggagtttcgggggttttttccgaacaacgcggtagaatactttgtttcctattacgattactaccagccggaagcttatgtggcaagccgcgacctatatatcgaaaaagacgcgtccataaacgacgagatagagcgcctgcggctttccgccacccggagccttatggaaagggaagacgtgatcatcgtggcaaccgtctcgtgcatttatggccttgcaacgcctgaagtctacaagaagatgaccgccactttctcccggggcgataccatcgacgtggacgccttgatccggcgctttgtggaacttcaatacgagcgtaacgacgcgattcttgaacgcggacgcttccgccgcaggggcgacaccctggaaatttatcccgcttacctggaagaggcctacagggtggatttggattgggacaaggtggaaagaatacgccgcatcgatccgatttccggtgcaacaattgaagagctggatagagcgctaatttacccggcaaaacagttcgtgatgcccgcggacatggtgcagaacgctatgggggccattaaagaagagcttgcaaaccgatacgagttttttatcgcggaaggaaagatgctggaggcggagcggctgaagacagggtggaatacgatatcgaaatgcttaacgaaatgggctactgttcgggtatcgaaaattactccgctcatttggcaggacgcaaaagcggcgaaactcccgacacgcttgtag

SEQ ID NO: 61646 - protein, 276 aa, Unknown
  Obtained from environmental sample
  misc_feature (1)..(276): Xaa is any amino acid
MAKIIEAVQMPTLIVSHNKTLAAQLFREFRGFFPNNAVEYFVSYYDYYQPEAYVASRDLYIEKDASINDEIERLRLSATRSLMEREDVIIVATVSCIYGLATPEVYKKMTATFSRGDTIDVDALIRRFVELQYERNDAILERGRFRRRGDTLEIYPAYLEEAYRVDLDWDKVERIRRIDPISGATIEELDRALIYPAKQFVMPADMVQNAMGAIKEELANRYEFFIAEGKMLEAERLKTGWNTISKCLTKWATVRVSKITPLIWQDAKAAKLPTRL

SEQ ID NO: 61647 - DNA, 627 bp, Unknown
  Obtained from environmental sample
  misc_feature (1)..(627): n is a, c, g, or t
atgaaaagagctttacgaacccaggttacaactgaacactcaagcaaaagtgttgcgcagctaacggttttgcccggggaaatcttcgaagtggagaccgaactctgtaacggggattggcttcaaagtattgactcggtttactcaccggagaaaaataaagggcccaatccatgcgtggtgattgcgattgatggggcgcttcctggagactctatccgcgtccatatacacaacatcattcccgacgtcctgggttttacaggttttatgaacagaaaccatgagcttgccaaccggatcgtagacagggattggggatacaatatacgggttgtgcgtattgaggatggttttgtgcatttttcaccttccctgaaactgcccgttagaccgatgattggcactcttggtacggcgcctccaggcggcgcggtcattaattccagggccgggcggcatggcgggaacatggacgcacaggaagtccgcgccggggcagttgttacattgccggtggaggtacccggggcattgcttcacataggggatgcccatgccattcagggtgacggggaaatcaacggcgcgggaggcattgagtgccgtcccctcgtgccgatctga

SEQ ID NO: 61648 - protein, 208 aa, Unknown
  Obtained from environmental sample
  DOMAIN (7)...(207): Acetamidase/Formamidase family
  misc_feature (1)..(208): Xaa is any amino acid
MKRALRTQVTTEHSSKSVAQLTVLPGEIFEVETELCNGDWLQSIDSVYSPEKNKGPNPCVVIAIDGALPGDSIRVHIHNIIPDVLGFTGFMNRNHELANRIVDRDWGYNIRVVRIEDGFVHFSPSLKLPVRPMIGTLGTAPPGGAVINSRAGRHGGNMDAQEVRAGAVVTLPVEVPGALLHIGDAHAIQGDGEINGAGGIECRPLVPI

SEQ ID NO: 61649 - DNA, 1422 bp, Unknown
  Obtained from environmental sample
  misc_feature (1)..(1422): n is a, c, g, or t
atgactgattctacagggactgaaactgaaccgcaaaaaaacggcgactgccgcacagattttatcagcgaatttattaaagaagatttagctgccggaaagtacaattatgtgcttacgcgttttccgccggaaccaaacggctggctgcatatcggccactgcaaggcgttctttatcgactttagcatggcagagcgtttcggcggaaaatgcaatctgcgttttgacgataccaatcccgaaaaagaggatgtctcctacgttgaggcgattaagcgcgacattaaatggatgggctttgattgggaagaccgcgaattttacgcttccgattactatgactacctgtacgagttagctgtaaagatcatcaaaaagggaaatgcttatgttgacgatctgacagatacagaaatcagcgagtacaggggaactgcggtagcggataagaacaatatcaccgtaacgccgccgggcagaaacagcccgtatcgggaccgttctgtcgaagaaaatcttgacctttttgcgaaaatgcgctcgggcgaatacccggacggagcaaaaaccctgcgcgcaaaaattgacatgacccaccctaacttaattatgcgcgatcctgtcatgtaccgcatacgccgtgaaactcattaccgtaccggaaactcgtggtgtatttatcctatgtatgattttcagcatccgctctcggatgcaaaagagggaatcacccactctctctgttcgcttgaatacgaaattcaccgtcctctttacgaatggtttattaacgaagcggaagtttttccgtcccggcagatagaattcgcccgtcttaacctgacatataccgttatgagcaaacgctggcttttaaggcttgtgcaggaaaaatatgtatccggctgggacgatccgcgtatgcctacaattgccggtctccgtaggcgtggatatactccgcaggcgatccgcagttttgtctcgcagatcggtattgccaaaacggacagcgttgtggacatcgcttttcttgaatactgcctgcgcgaagatttgaacaagcgcgcattgcgcgtaatggcggttttacaccctcttaaattgatcattgaaaattgggaagaaaataaaacggaaaccctcgaagccgtaaacaaccccgaagatgaaagcgccggaaagcgcagtattgttttttcccgcgaactctggattgaacgcgaagactttgaggaaacgccgccgcccaaatatttccggttgttccccggaaataccgtgcgcctgcgttatgcgtacattgttacgtgcaccggttttgacaaggacacggacggcaatattacggctgttcgctgcacttacgatcccgaaactaagggcggcaacgcctcggccaatctgatacttgcctaa

SEQ ID NO: 61650 - protein, 473 aa, Unknown
  Obtained from environmental sample
  DOMAIN (358)...(473): tRNA synthetases class I (E and Q), anti-codon binding domain
  misc_feature (1)..(473): Xaa is any amino acid
MTDSTGTETEPQKNGDCRTDFISEFIKEDLAAGKYNYVLTRFPPEPNGWLHIGHCKAFFIDFSMAERFGGKCNLRFDDTNPEKEDVSYVEAIKRDIKWMGFDWEDREFYASDYYDYLYELAVKIIKKGNAYVDDLTDTEISEYRGTAVADKNNITVTPPGRNSPYRDRSVEENLDLFAKMRSGEYPDGAKTLRAKIDMTHPNLIMRDPVMYRIRRETHYRTGNSWCIYPMYDFQHPLSDAKEGITHSLCSLEYEIHRPLYEWFINEAEVFPSRQIEFARLNLTYTVMSKRWLLRLVQEKYVSGWDDPRMPTIAGLRRRGYTPQAIRSFVSQIGIAKTDSVVDIAFLEYCLREDLNKRALRVMAVLHPLKLIIENWEENKTETLEAVNNPEDESAGKRSIVFSRELWIEREDFEETPPPKYFRLFPGNTVRLRYAYIVTCTGFDKDTDGNITAVRCTYDPETKGGNASANLILA

SEQ ID NO: 61651 - DNA, 585 bp, Unknown
  Obtained from environmental sample
  misc_feature (1)..(585): n is a, c, g, or t
atgtatcgaggtaatatggctgccaatcattcaatccccagcgaataccgtaaagcggctgaacgtctgtttttcaaggacggattttccagggggcataaacctgatgtaaaagccgcgtgtgaatttgccaagtcgcttggcatcggcattgaatatcagcgtttgcttgcgctcgaaaaaaacagcggagagctgcggacttttcttgatcagtttcagaataatttgtctctgttaataaaaaaaacatgggtggaaaaatccgatgaaaaccgcaaggggaaattgcaggatgatattccgttatttatgtctacagttgagcagacggattatataagggccatagatgaattcagcgaaatccttgatgaattagcctatctgtttttcggcgctcaaagcgagaaagaagactttgccgagtatactttccgcatagacgtgcaaatggggcttttttggtattacggaagcaaacttgagatgttaaaagacatgaaaactcaaaatatagacagaaacgataaagtgttatgggcaatattgcttttaggactctgttatctgacgaatttttaa

SEQ ID NO: 61652 - protein, 194 aa, Unknown
  Obtained from environmental sample
  misc_feature (1)..(194): Xaa is any amino acid
MYRGNMAANHSIPSEYRKAAERLFFKDGFSRGHKPDVKAACEFAKSLGIGIEYQRLLALEKNSGELRTFLDQFQNNLSLLIKKTWVEKSDENRKGKLQDDIPLFMSTVEQTDYIRAIDEFSEILDELAYLFFGAQSEKEDFAEYTFRIDVQMGLFWYYGSKLEMLKDMKTQNIDRNDKVLWAILLLGLCYLTNF

SEQ ID NO: 61653 - DNA, 600 bp, Unknown
  Obtained from environmental sample
  misc_feature (1)..(600): n is a, c, g, or t
atgtttaatttttgcccgtcatgcgcctcaaaaaaaatcgcttttgtaaagggaaaatctttccgttgtccagattgcggttttgtttattatcacaatgtagccgcggctacaggctgtattattgttgttccggaagatgaaaattctacggaaacggggcagttgtctaacaatttgccatataaagaatcggacaggatcatctttcttgttcggggcaaggagccgggcatcggtaaactcgatcttcccggcggctttgtcgatccgggcgagggcgtactagacggcgtctaccgcgaattacaggaggaacttagttggacgccgcatattcccgagggcgcaaggttatcggatgtttttaaattgtttgcatcttttccaaatgtgtacctttataaaggtataaattacaatacatgtgatatgtatttttcagtccgtgcgccgggtcttaagccggaggacttgtgtcgggaaaaagccgaaatttcggagattcgatttttaaaacccaaagaaattgatttttcccagtttgcctttccttctaccgtgaaggctgtaaaaacgtatcttaacatccttgactaa

SEQ ID NO: 61654 - protein, 199 aa, Unknown
  Obtained from environmental sample
  DOMAIN (34)...(197): NUDIX domain
  misc_feature (1)..(199): Xaa is any amino acid
MFNFCPSCASKKIAFVKGKSFRCPDCGFVYYHNVAAATGCIIVVPEDENSTETGQLSNNLPYKESDRIIFLVRGKEPGIGKLDLPGGFVDPGEGVLDGVYRELQEELSWTPHIPEGARLSDVFKLFASFPNVYLYKGINYNTCDMYFSVRAPGLKPEDLCREKAEISEIRFLKPKEIDFSQFAFPSTVKAVKTYLNILD

SEQ ID NO: 61655 - DNA, 393 bp, Unknown
  Obtained from environmental sample
  misc_feature (1)..(393): n is a, c, g, or t
atgaaaacagagtgttcattaaaggtgagatcatacgaatgtgacagttataatcatgtaaataacgccaattacttaaactatctggaatatgcccgctgggaattcttaaaggacattggttttgactatgataaggcgtttaaatcagtttatgggacttatattacccggatagaaattaattacaaaaagcctgcctttaccgacgacgagttggtaataagatcgtgtcctgttaaaaaaggcgcggtcagcggaaccatagcgcaggaaatttggcgcggagaagatctaatagttgaggcaaaagttacatgggcgtttgttgattcaagggggatgcctgtaagaattccgcctgagtttgatgtgccggggcttaagccgtag

SEQ ID NO: 61656 - protein, 130 aa, Unknown
  Obtained from environmental sample
  DOMAIN (17)...(102): Thioesterase superfamily
  misc_feature (1)..(130): Xaa is any amino acid
MKTECSLKVRSYECDSYNHVNNANYLNYLEYARWEFLKDIGFDYDKAFKSVYGTYITRIEINYKKPAFTDDELVIRSCPVKKGAVSGTIAQEIWRGEDLIVEAKVTWAFVDSRGMPVRIPPEFDVPGLKP

SEQ ID NO: 61657 - DNA, 555 bp, Unknown
  Obtained from environmental sample
  misc_feature (1)..(555): n is a, c, g, or t
atgacagaacagttaaaggaaatcggcgcccggcttggggcattacgggacattttcgacattcccattaaggaaatggcgaagacaatgaaaatttccgtagaggattataccgcttatgaaaacggtcagcgggatttttcgttcagctttttacagaatgcggcgcatattttcggcgttgatgttgtagacattatttccggcgagtctccaaaacttaccaaatgcgccattgtccgaaaaggcgaaggtttcaacatagaacgacgcaaggcttacgactataaacatcttgcgtttaccttcagtaataaaaaagccgagcctttcattgtaacggtagagccaaaaccgaatgaggtgccgacattgcactcgcacgacgggcaggagtttgactatatgctatccggtaaaatggaatttcactttgacaatttaatctatgaacttaacgagggcgacagcgtgtattttgattcgggcgtaccgcacgccatgaaagccgccggcgatcaagcggtaaaatttcttgccgtggtaataaaatag

SEQ ID NO: 61658 - protein, 184 aa, Unknown
  Obtained from environmental sample
  DOMAIN (12)...(66): Helix-turn-helix
  misc_feature (1)..(184): Xaa is any amino acid
MTEQLKEIGARLGALRDIFDIPIKEMAKTMKISVEDYTAYENGQRDFSFSFLQNAAHIFGVDVVDIISGESPKLTKCAIVRKGEGFNIERRKAYDYKHLAFTFSNKKAEPFIVTVEPKPNEVPTLHSHDGQEFDYMLSGKMEFHFDNLIYELNEGDSVYFDSGVPHAMKAAGDQAVKFLAVVIK

SEQ ID NO: 61659 - DNA, 1731 bp, Unknown
  Obtained from environmental sample
  misc_feature (1)..(1731): n is a, c, g, or t
gtggttttaaaaaagtggaatcgcgtttttatattttttttcttcgcattgatcttggtttcctgcaaatcaggaccggaatcatcgcagtctgagccgaaacagactgcagaaaaaaaagcaaaaaacacaaaaaaacaaaccgccgctaatcagccttccggcagtctcgcggaagaaatacgcggtttgacagaaacaggaattttgtcatctatgcttcaggcggtggaattaattcgaagcagggatttaggcggttccgaattcgggcgcactatgtccggaatcaacacgatattgataaagctgatttatcccgattcgctggcaagacttcccgccgtcgatcttccgcagacgtcaaattatacaaagataataagggaggcggagaaaggcgtttatgttccgcccgccacaacatcaaacgatttttttgagcatattttgccctttctggctataaatgagcaaacggagcccgccgtccttgcgaatattttaagcaatattgagaaagcgcanagtttaagacctaattccgttttgccgccgttatttcagggaatgatacatcaacgcgagggcaggaatagtcaggcggaaagggcttttaggcaggcgtacgaaatttccgatgaatgttatccggcaaggataggtattgcccgcgcgagaaggaacgccggaaatccgcaggaagcgattgctattttatccgaattaattattcgttaccccgacagtacgcaaataaaaaaagaacgcgccttttgttattatgaaagccgtgacttgtcgcgggcgttatcctctattgacgagattttgcagacagaccccaaagacggagaaatacttttacttaaagcggctattctgctggaacaggggcagtattcgcaatcaaacgccgcgctggatagttacgcgtcaattaattcaaataacagaacgtatctttttttacgcgcaagaatacaagccgaaggaaaccgcaaccgtgattctgcgttgaattatcttcgctcaattttacgcattaatgaagatgacgcggaagcccttgtttatgccgccggtttgcttatggagtctcagcgcgcggaagatcaaaccgaaggcagggaaatgctggatcgcctgcggaagacaaacagttcttccgtggaagtgttaagtttgagcgtaaaggacgcaatacagagggaaagatggcaggaagctcaagggtatttgaatcgcatccttgtcatccgccgcacagcccaggatttaacagacgcgtacaccgttgagcgcggacttggaaacaacgcaagggctcttacctttgcccgcgaattatatgatcgtgataattccaatcacgaatacgcggctatttatatttctgctctgattaattccggcagaagggacgaagcctcccgtattctggaaaaccgcattatttcggctgcaagcggtcaggtaaaaagcaaatattattatttacgcagccgtttacagacaaatcaggaagacgttctggctaacttacgctccagtctttttgaagaccccagaaatcttgacgcgcttatagccacatttgaaatctaccacaaccgccgcgaagaacgccgcgcggtttactatttaaaacaagcgctcgccatcgcccccgatcatccggcgttgaagcgttatgagaaagaatatgcttcgctgttaggcaagaattga

SEQ ID NO: 61660 - protein, 576 aa, Unknown
  Obtained from environmental sample
  SIGNAL (1)...(24)
  misc_feature (1)..(576): Xaa is any amino acid
MVLKKWNRVFIFFFFALILVSCKSGPESSQSEPKQTAEKKAKNTKKQTAANQPSGSLAEEIRGLTETGILSSMLQAVELIRSRDLGGSEFGRTMSGINTILIKLIYPDSLARLPAVDLPQTSNYTKIIREAEKGVYVPPATTSNDFFEHILPFLAINEQTEPAVLANILSNIEKAXSLRPNSVLPPLFQGMIHQREGRNSQAERAFRQAYEISDECYPARIGIARARRNAGNPQEAIAILSELIIRYPDSTQIKKERAFCYYESRDLSRALSSIDEILQTDPKDGEILLLKAAILLEQGQYSQSNAALDSYASINSNNRTYLFLRARIQAEGNRNRDSALNYLRSILRINEDDAEALVYAAGLLMESQRAEDQTEGREMLDRLRKTNSSSVEVLSLSVKDAIQRERWQEAQGYLNRILVIRRTAQDLTDAYTVERGLGNNARALTFARELYDRDNSNHEYAAIYISALINSGRRDEASRILENRIISAASGQVKSKYYYLRSRLQTNQEDVLANLRSSLFEDPRNLDALIATFEIYHNRREERRAVYYLKQALAIAPDHPALKRYEKEYASLLGKN

SEQ ID NO: 61661 - DNA, 810 bp, Unknown
  Obtained from environmental sample
  misc_feature (1)..(810): n is a, c, g, or t
atgtcaagaacattcgtttattcagccctagtactcagaaaccgcccttcaggcgagtccaacagcgaggtttcccttcttaccgccgaagaaggtatcgttaaagcgaccgtattcggcggcccgaagagcaaattgcgttctcattcagcttcttacaactcaggcaaggtctggatttaccgcgaacctgtaaaagactacaacaaactaagcgattttgacgttcattcatggcgacccggactaagagagctttacgaccggacaatggccgcaggagggactgccgagacgattctttccactcacggcggcggcggcgattgggaaaaagccctgcaactagcggaaaatgcgcttaatgctctggaaaacgcaaacgaagagctctgtccccgaattttggtacactttttatggttatgggcggatttcttaggtatccggcccgaaatcgagtattgttcatcctgcgggaatgaagcggcaaacaatccgctgtggttttccggccgtgaaaacaccttgctatgcgggaattgtgtgccatttgaaagctctgtccccaaaaccgagctctgtccccaaaatcgagctctgtccccaaaatcgagctctgtccccgccggcggtttattacaactcaatccgggctgccggcgctggcttgccgctgtgagttcggttgatccctcacttttataccgttattcaatggataacaagtcttttaacgaggtaaaggtgctcaccaccgctgtaatagccgcggctctgggaaaacgactggcaagttgggaatggtaa

SEQ ID NO: 61662 - protein, 269 aa, Unknown
  Obtained from environmental sample
  misc_feature (1)..(269): Xaa is any amino acid
MSRTFVYSALVLRNRPSGESNSEVSLLTAEEGIVKATVFGGPKSKLRSHSASYNSGKVWIYREPVKDYNKLSDFDVHSWRPGLRELYDRTMAAGGTAETILSTHGGGGDWEKALQLAENALNALENANEELCPRILVHFLWLWADFLGIRPEIEYCSSCGNEAANNPLWFSGRENTLLCGNCVPFESSVPKTELCPQNRALSPKSSSVPAGGLLQLNPGCRRWLAAVSSVDPSLLYRYSMDNKSFNEVKVLTTAVIAAALGKRLASWEW

SEQ ID NO: 61663 - DNA, 1050 bp, Unknown
  Obtained from environmental sample
  misc_feature (1)..(1050): n is a, c, g, or t
gtggacaaaatatactccgattcgcttaaaaggatattagatttgggcatgataccaattctgccatgtataggctggagtccttcggggaagccgtacaatgtacaaagcgatgagattgcacttgctgtatcatcagcgcttggagcggagaaattattcatcctatctgcacatgacagattaaagatagataaactcaatataagaggaaaacattcatcattaatgcagcatttgcttaatatcgccgacgctccgttcattcagcaaaaaaaaccttcgttaatgtggcgatctatacatgttacaaataaatcacttgcccaaaagagtattttagaaaatctggaaaaaaggtcggacggcagtttggtgcgtatttctcctcaacagacagagctgataatttccattatcagtgaatttaaaaacgatgatggaagttatatcgaagaacgatatttacgtgaactcaaactagctttaatggcgagcaaggctggcattcaccgcgtacatattatggacggaagagaagagggcgctgttttaaaagaactgttctccaatcttggtgtaggaactatggtctatgtcgatgaatacgattctgtccgcgccattcattccagagatttgccggatattttacgtttaatggaaccgctaatgcagaaaggtatacttatcaggcgaaatcccgaaacaattcaggaaaaaaagaacgattactcagttttcgaaattgacggttccattcgcgcctgcggcgctctgcatgattggggtgaagctcagggggaaattgcggcaattgcaacagaccctcaatattcagacctcggtcttggcaggaaaattgtcggttattttatcgaaaaagcccgaagaaacaatatgcgccgtgtttttgtgttaaccactcaatcacaggactggtttgagtcactcggttttaaagaagcggcagtggaaaccctgcctgaacagaaacgcaggatttacgatcagaaccgcaagagcaaggttttcgcactggaactataa

SEQ ID NO: 61664 - protein, 349 aa, Unknown
  Obtained from environmental sample
  DOMAIN (246)...(321): Acetyltransferase (GNAT) family
  misc_feature (1)..(349): Xaa is any amino acid
MDKIYSDSLKRILDLGMIPILPCIGWSPSGKPYNVQSDEIALAVSSALGAEKLFILSAHDRLKIDKLNIRGKHSSLMQHLLNIADAPFIQQKKPSLMWRSIHVTNKSLAQKSILENLEKRSDGSLVRISPQQTELIISIISEFKNDDGSYIEERYLRELKLALMASKAGIHRVHIMDGREEGAVLKELFSNLGVGTMVYVDEYDSVRAIHSRDLPDILRLMEPLMQKGILIRRNPETIQEKKNDYSVFEIDGSIRACGALHDWGEAQGEIAAIATDPQYSDLGLGRKIVGYFIEKARRNNMRRVFVLTTQSQDWFESLGFKEAAVETLPEQKRRIYDQNRKSKVFALEL

SEQ ID NO: 61665 - DNA, 2877 bp, Unknown
  Obtained from environmental sample
  misc_feature (1)..(2877): n is a, c, g, or t
atgtacagggaaattgtgctgggcaattccggattgcagaatatcgactacttctcaaaccagacggagaaagaacatttttacgcccgccataaaatgcagacgataaatcatgatatcgcttcacacggcatacagagaggcgatactctgagggtatacctgggcattgacgcgggttcgacgacaaccaaatttgttctgattgacgaagatgaaaatgttattgacagtttttataaccctaacaaaggcgagccgctgaaggtaattaaacaggccctgctggatatgtacgaaaaatatcaggcagccggcgttaatctggagatcatcgccctgggaaccacgggttacggggaacttttgtttgataaagcgttaggcgctgattatcataccgtggaaaccgtagcccacgcggcggcggcccagaaatacattcccgacgtgagtttcatacttgacatcggcggtcaggacatgaaggctatcagcatttcaaacggtattgtaacgaatataaccgtaaacgaagcctgttcctccggctgcggatctttcctggaaacatttgcggatacgctgcatattcctgttaataaaattgcggaaacagcgtttaacgccaaaagtccggcgaaacttggcagccgctgtactgtctttatgaacagcacgattatcacggaacagaaaaacgggaagcaggcggatgacattatggccggcctttgccgcgcgattgtagaaaatgtttttacaaaagtcgtgcgcatagccaatccagcccgtctcggcgacaaaattgtcgttcagggcggaacgctcaggaacgacgcggtgctaagggcttttgagcaatacctgggtaaatttgttgtccgcgcgcccttccccggggaaatgggggccatcggcatagctcttcttacaaagcgggaaattaccgaaaacggatattcttcgcctcacggtcccagcgaccgtacgcgttttatgggttttgaagcgttaaaaacatttgagtataaacaggaagcaaatctactctgtcctttctgcgccaataactgcaaccgcaccctgctgcgtttttcaaacggtcagacatgggttatcggcaaccgctgcgagcggggagaggtggtaggcgatccgaaagatccggccatccgcgagcagataaaaaatattacagggctgatgaacgcagcccctgacatgattaaggtcaggaacgaactgctttttaaggattaccagtataaacagcttcttccctccaaagacattacaatcgggcttccgagggtgctggacttctggagaagtatgcctttctggaaagtgttttggtctgcgcttggttataaaacaatagtgtcacggaaaagctccagactgttatacgaaaaaggtttgcagtatatcgcttccgatacggtctgcttcccggcgaaactggttcatgggcatatacaggatcttattcaaagcaaagttgacaggattttctttccgcagattaacaggctgccggcggacaaccctgaaaaaaccggcacttttacatgtcccgtactgaaagggtatcctctttcgatacggtgctcggacaatcctgaggagaaacacagtatcccgcttgattcgcctgtatgtcactggttttcggacagggatatgcggttccagttgtgccgctatatgcaggagactttcaatatacccaaaaagatcacccttgccgcgattaagcaaggggaaaaggccatggatgaattttacggcgctatggtggaaaaagggaagaaagtccttgaggatgttgagagggagaaaaaaatcgccgtggttatagccggacgctattatcagtatgacgagcagataaatcacaatctgtcccattattttacaagcattggcatacccgttcttacgctggattcgcttcccaatcttggaaagattccgcttgccaaatcgcggatgaaaattacgaatgacaaccacgcgaggcttcttgccggcgctattttcgccgcgcagcatccctcgctggaatatgtcgatatctacagtttcggctgcggacatgacgccgtttattccgatgaaataatccgcgttatggacgaaatttcgggcaaggccccgttaatattaaaactggatgaaagtgatattgccggacccttaaggatcagggttcgctcattcattgaaactgtaatgatacgccgcaaaataaaaacgcataacgcaaagccgctgggagatccctacgctgtcaaatatacaaagaaagaaccaaagaaggttctgcttgttcccaacgtaagccgggcgttctgcgtggttttgagcggcgcccttgccaatgaaggctaccttgtggaaccgctgcctatgggcggtcttgaagctatagcgatgggaaaaaaatacgtgcataacgacatgtgcctgccagtgcagattgttgtgggggaggctcttcttgcgttaaaaagcgggaaatacgatccggacaagactttggtcggcatggcgaaagtgttatgcgattgccgcctttccaattatatgcctctcgccagaaaagcccttgacgaggcgggttatccgcaggtgcctattgttaccaccgacatgtcagattccaaaaacgcccatccgggactgcgctttacaaatataacctacagtaaatccatgtggggtataatccagacagacgctctcgaattcctgcggcgcaggatacggccttacgaactgcagaaaggagaaaccgataaagttgttgaaaacgccattgatgaaatttccgcagggctcgccagaaggggcattcctcggccgatctga

SEQ ID NO: 61666 - protein, 958 aa, Unknown
  Obtained from environmental sample
  DOMAIN (55)...(312): BadF/BadG/BcrA/BcrD ATPase family
  misc_feature (1)..(958): Xaa is any amino acid
MYREIVLGNSGLQNIDYFSNQTEKEHFYARHKMQTINHDIASHGIQRGDTLRVYLGIDAGSTTTKFVLIDEDENVIDSFYNPNKGEPLKVIKQALLDMYEKYQAAGVNLEIIALGTTGYGELLFDKALGADYHTVETVAHAAAAQKYIPDVSFILDIGGQDMKAISISNGIVTNITVNEACSSGCGSFLETFADTLHIPVNKIAETAFNAKSPAKLGSRCTVFMNSTIITEQKNGKQADDIMAGLCRAIVENVFTKVVRIANPARLGDKIVVQGGTLRNDAVLRAFEQYLGKFVVRAPFPGEMGAIGIALLTKREITENGYSSPHGPSDRTRFMGFEALKTFEYKQEANLLCPFCANNCNRTLLRFSNGQTWVIGNRCERGEVVGDPKDPAIREQIKNITGLMNAAPDMIKVRNELLFKDYQYKQLLPSKDITIGLPRVLDFWRSMPFWKVFWSALGYKTIVSRKSSRLLYEKGLQYIASDTVCFPAKLVHGHIQDLIQSKVDRIFFPQINRLPADNPEKTGTFTCPVLKGYPLSIRCSDNPEEKHSIPLDSPVCHWFSDRDMRFQLCRYMQETFNIPKKITLAAIKQGEKAMDEFYGAMVEKGKKVLEDVEREKKIAVVIAGRYYQYDEQINHNLSHYFTSIGIPVLTLDSLPNLGKIPLAKSRMKITNDNHARLLAGAIFAAQHPSLEYVDIYSFGCGHDAVYSDEIIRVMDEISGKAPLILKLDESDIAGPLRIRVRSFIETVMIRRKIKTHNAKPLGDPYAVKYTKKEPKKVLLVPNVSRAFCVVLSGALANEGYLVEPLPMGGLEAIAMGKKYVHNDMCLPVQIVVGEALLALKSGKYDPDKTLVGMAKVLCDCRLSNYMPLARKALDEAGYPQVPIVTTDMSDSKNAHPGLRFTNITYSKSMWGIIQTDALEFLRRRIRPYELQKGETDKVVENAIDEISAGLARRGIPRPI

SEQ ID NO: 61667 - DNA, 1929 bp, Unknown
  Obtained from environmental sample
  misc_feature (1)..(1929): n is a, c, g, or t
gtgttgaatatgattaatgaaaacgcattggccgtttataaaaacaagccggctctggtaaaggaattgaccaatgacaaaataaccatcgcccttcacagcggcgagaatatcaaggtcagggagaaagacattgagatgctccatccggggccggtaaaaaattttaacgaaattaaagacatcaacgacgcgaacttacaggaaacctgggaactgctacttgcagataatgcgtcttgcgacggcgctgtttccctgaaggaacttgcggaactcgcctttggcgaatacagtcccgcgtccgcctgggccgcctatggcctgctccttgacggcctttattttaccggaacaattaccgccatacggccccgaaagcagagcgaggttgaggcggataaaaagaagcgcgaagaaaaaaccgcggcaagcaacgaaaaggagcttttttttgagcgcatgagaaaacgcagtccgcagcatgatgacaggcgcttcatacaggatattgaggctcttgccctggggaagtcggcaaaaagccgcaccatgaaggaaatcggcctcggagaaactcccgaagaagcccacgctctgctccttgaatgtggtttctggaacgagaagaacaacccccaccccgccagattcggcgttgttctccagccggcggaacacaagcccgaagcgccgccgcccgaagaacgctgtgacctaacccgtttagccgcatacgcgattgacagcccatggagcagtgatcccgacgacgccatttctattgagcttgaacctcaaccgagcccgacgggcgtcgaaccagaggttcgcggttcccctcttgaagagaacaggaagattctctatgtccatgtcgccgatcccgcctcgtcaatcagggcggacagccccgttgaaaaagaagcccgcgaccgcggggcgacgctctatatccccgaaggcagtatccgcatgctcgccgacgatagtctgccgcttttcgccctcggccttgccgaaacgtcccccgcccttactttcaaaatgacgcttaacaaaacaggcgaaatagaaaaaaccgaaatatttccctcaacagtaaaggttaagcggttaacctacaaagaagcggatgaatatttaatcaatacggacgatggtatatccggggattttcgatcccttaaaatactggctgaacgcaacgtcaagcggcgcactgcgttaggagcaatcaatattgatatgccggaaacccatatcagcctgaacgatgggcaggtggaaattgagccgatagcgcggtacaaatcggcggacatggtacgggagtgcatgctccttgccggcgaaggcgcggggttatggtgtttgcaccgtaatctgcccgttccctacatcatgcaggaaaccggggaaatacccgatgaaatctttgatggcattgcgggttattaccagcttcgccgctgcatgaggccgcgaaccctttcgacaaggcccgggcaacattcgggccttggcctggatacctatatccaggtaaccagcccccttcgccggtataccgatcttcttgcccacttgcaaatccgcgcggttttaagaggcgaaaaacctttaagctccgatgaaatctccgccagaatgaacgtgggggaagcggcaatctccgctgtcaatcaggcggaacgcgcctcccgcgtccattggacaatggtataccttgccagtaaaaaggactctgtctgggacgcaatcgtccttgaaaaaaaaggcaatcgctggactgtaataatcccctctctcgccctggaaacccaggtttccctgcggaaagagctgtcgcctaacaggccggtgaaattgtctctgaaatcggtgaatattccggtcggagaagcggtgtttgccgccgttgaatga

SEQ ID NO: 61668 - protein, 642 aa, Unknown
  Obtained from environmental sample
  DOMAIN (238)...(470): RNB-like protein
  misc_feature (1)..(642): Xaa is any amino acid
MLNMINENALAVYKNKPALVKELTNDKITIALHSGENIKVREKDIEMLHPGPVKNFNEIKDINDANLQETWELLLADNASCDGAVSLKELAELAFGEYSPASAWAAYGLLLDGLYFTGTITAIRPRKQSEVEADKKKREEKTAASNEKELFFERMRKRSPQHDDRRFIQDIEALALGKSAKSRTMKEIGLGETPEEAHALLLECGFWNEKNNPHPARFGVVLQPAEHKPEAPPPEERCDLTRLAAYAIDSPWSSDPDDAISIELEPQPSPTGVEPEVRGSPLEENRKILYVHVADPASSIRADSPVEKEARDRGATLYIPEGSIRMLADDSLPLFALGLAETSPALTFKMTLNKTGEIEKTEIFPSTVKVKRLTYKEADEYLINTDDGISGDFRSLKILAERNVKRRTALGAINIDMPETHISLNDGQVEIEPIARYKSADMVRECMLLAGEGAGLWCLHRNLPVPYIMQETGEIPDEIFDGIAGYYQLRRCMRPRTLSTRPGQHSGLGLDTYIQVTSPLRRYTDLLAHLQIRAVLRGEKPLSSDEISARMNVGEAAISAVNQAERASRVHWTMVYLASKKDSVWDAIVLEKKGNRWTVIIPSLALETQVSLRKELSPNRPVKLSLKSVNIPVGEAVFAAVE

SEQ ID NO: 61669 - DNA, 1416 bp, Unknown
  Obtained from environmental sample
  misc_feature (1)..(1416): n is a, c, g, or t
atgctctccggcggtactccgcgcctcgccaagcaggcgcaaacctcatcctctccggagcggctcatttttcgtcacgacggctattatcctaaagatatcaacgtggacggtaacggtgctaacgccaatataagcgtttcactcaagcccgacgagagaagtattgttttcgatcaatcaaaagtacgcgaatatcgctttgttatcagcgccgccgattcggcaaagttggatagcgaggggtggaaggaagagtatgtgtcggcgaatatgacattcgaggatacctcatacgggcaaatcgggcttcgctataaggggtcggaatactcccttccgagatgctttagcatgggcgccaccggcaggacgtgtcccaaaatatcctataaggtgaagtttacggagtacaataaggataaacgtttttacggcatgaaaaaaattaatttgcacgcgttgaccagcgacggcacgaagatgcacgatatactcgcttacgagctgtatagggagatgggaatccacgctccgcggacatcgtacgccaatgtatatatcaataacaaccttattgggctttttttggcggtggaagaaattgacggcagatttaccaaatccagatggcccgactacggcgatggaaacctttacaaggaagtatggccgcgtaccaccgatacaaaatattatttagacggcctcaaaaccaatgacaagccggaagataatcctaacgtacaaaaaatggtggcgtattacaatgcgattaactcttcaagcgagcagagttttgagaaaaatctctcttcgtatatggattttgactacctcctgcgctacttggcggtggatgtggccattaagaattgggacggcatgcggtcgtggtattgggatagtaaaaagaatcagggcaataatcacaattatttcttttacgaagaagaagcaaaaaaagcaaacggaaaaacctggattattccatgggatatggatcaagcgttgacgtcaagagacaactactttgacgcggggggtatgggcggggggttccctggcggcgggtttggcggacaaccgctgccgcagtggaatgtgcctactaccaactgcggagcccaatccgtcgccggcaattcttttatgccgccgaattgcgacaaacttactaaacttatggcggccaatttttggaaccgttacgtgcaacttggagatttgtttttaaaagacctattcataagccagcgattaaatgaaaaaataaccaaacattcaaatttgatcacgtccgctgtgcaacaggatcctaatataaatcagagtacatggacgacggatgtcaatagccttaagaattatttgccgaataatatttcgtcgttcagaagctatttgcacccgtaa

SEQ ID NO: 61670 - protein, 471 aa, Unknown
  Obtained from environmental sample
  misc_feature (1)..(471): Xaa is any amino acid
MLSGGTPRLAKQAQTSSSPERLIFRHDGYYPKDINVDGNGANANISVSLKPDERSIVFDQSKVREYRFVISAADSAKLDSEGWKEEYVSANMTFEDTSYGQIGLRYKGSEYSLPRCFSMGATGRTCPKISYKVKFTEYNKDKRFYGMKKINLHALTSDGTKMHDILAYELYREMGIHAPRTSYANVYINNNLIGLFLAVEEIDGRFTKSRWPDYGDGNLYKEVWPRTTDTKYYLDGLKTNDKPEDNPNVQKMVAYYNAINSSSEQSFEKNLSSYMDFDYLLRYLAVDVAIKNWDGMRSWYWDSKKNQGNNHNYFFYEEEAKKANGKTWIIPWDMDQALTSRDNYFDAGGMGGGFPGGGFGGQPLPQWNVPTTNCGAQSVAGNSFMPPNCDKLTKLMAANFWNRYVQLGDLFLKDLFISQRLNEKITKHSNLITSAVQQDPNINQSTWTTDVNSLKNYLPNNISSFRSYLHP

SEQ ID NO: 61671 - DNA, 1188 bp, Unknown
  Obtained from environmental sample
  misc_feature (1)..(1188): n is a, c, g, or t
gtgggagttatgataagacgtgaggcttcgtgcctaatatcggcgatggctaagcgccatcgacaattggtaatcgccgggccgcgttacgccggaaagagcgcgcttgtcaggcggttgttgcctaagcatacctacgtagacctcgaatccccggacgacgccgagtttgccaaaagccgtccgacggaatttttcgagcgctatcagggagacatcataatcgacgagttccagcgcgcgccggaactcttcaagcacataaagagcgcggctaccaaaagacgcgttgtgctgatcacctcccgcaaaccattacagcgcgccgcgccgccggtcccgccgcggctccccgccgcgagcgccgccggcggcccggtcggcgtggtaaccttgctgccgccctccataagggagctcgattccaacaagatcaaccttgaacgggacgagtacatccacagggggttcatgcccggcgcgtacaagaaaaaagccaaccctcgggagacgcagctaaactacctaaccgctctattgcaacaggacatcgcgccgctggtgcgcgtggagaatagggaggccttcaagcgcttcttcaggctcttggcggaacgcgtggggctggctctaaatctccgcactttcgcggatactgtgggcgtacagcaatcggtagtcgttaggtggatacaggtgctggaggcgcacttcgtcattttcagagtgccggtatacacaagccgtttattcggcacgaggttgatcagagcccccaaattctacttcacagacgtgggcctcgccgcgtacctgctcaagatagagaccccggatcaagtccactaccaccacgccgtcggcaacctattcgagaatttagtggtggccgaagcgctgaaagcggcctgcaatcgcggccagaacacaaacttgttctactaccgcaaccgagacggattcgaggtcgatctcgtactgccgaggggacgctccatcctgcccatagaaataaaatccggctcaaccttcaactcctcgttcgcgaataacataaggcgctttcacaaattcgcggaaaatattctagacggatacgtagtgtacaacggggcggggagcgataggataaaggaggccaagtacgtcaattttcgggaggtgggcgggattgtggagggtgcgtaa

SEQ ID NO: 61672 - protein, 395 aa, Unknown
  Obtained from environmental sample
  misc_feature (1)..(395): Xaa is any amino acid
MGVMIRREASCLISAMAKRHRQLVIAGPRYAGKSALVRRLLPKHTYVDLESPDDAEFAKSRPTEFFERYQGDIIIDEFQRAPELFKHIKSAATKRRVVLITSRKPLQRAAPPVPPRLPAASAAGGPVGVVTLLPPSIRELDSNKINLERDEYIHRGFMPGAYKKKANPRETQLNYLTALLQQDIAPLVRVENREAFKRFFRLLAERVGLALNLRTFADTVGVQQSVVVRWIQVLEAHFVIFRVPVYTSRLFGTRLIRAPKFYFTDVGLAAYLLKIETPDQVHYHHAVGNLFENLVVAEALKAACNRGQNTNLFYYRNRDGFEVDLVLPRGRSILPIEIKSGSTFNSSFANNIRRFHKFAENILDGYVVYNGAGSDRIKEAKYVNFREVGGIVEGA

SEQ ID NO: 61673 - DNA, 798 bp, Unknown
  Obtained from environmental sample
  misc_feature (1)..(798): n is a, c, g, or t
ttggcaagcggactgataagttatatcatctctacctccgaaaaaggcagagacccggcgttagacgatgttaaactccgcagaaaagcctgctctctgggcgtgccgtgcctgacatcaattgatacagctgacgcgctggcggacggcctgctttcaggctacagtgaaatcaatacggaattggttgacatcaattgtctgcgaagcgagcgcatgaaacttgcttttacaaaaatgcaaagctgcggcaatgattatatttatttcaactgttttgatactgaaattaattcaccggaatctctttctgtatttttatccgaccggcataaaggaataggcggagacggcgttgtactgattttaccctccgctgttgctgatgccagaatgcggatgttcaaccttgacggcagcgaaggcggcatgagcggaaacgcgattcgctgtgtcgcaaaatatctttatgataacagaattgtaaataaacgtgatatgcgcattgagacaatgagcggcataaaggaactccgtctttctacaaggaacggggcggtatccttagttaaagttgatatggggcgcgccgaactgcaccctgaacgtatacctgtcaaacttacaggtgaaagcattatcgcgcgaaaagtaaaaatcggcggcgttgaatacgagattacgtgtgtttctatgggtaatcctcacgcggtagtgttctgcaataaccttgatgatcttgatctgaaagaaatagggcctctgtttgaaacgatccgctgtttcccgaccgcgtga

SEQ ID NO: 61674 - protein, 265 aa, Unknown
  Obtained from environmental sample
  DOMAIN (77)...(200): Diaminopimelate epimerase
  misc_feature (1)..(265): Xaa is any amino acid
MASGLISYIISTSEKGRDPALDDVKLRRKACSLGVPCLTSIDTADALADGLLSGYSEINTELVDINCLRSERMKLAFTKMQSCGNDYIYFNCFDTEINSPESLSVFLSDRHKGIGGDGVVLILPSAVADARMRMFNLDGSEGGMSGNAIRCVAKYLYDNRIVNKRDMRIETMSGIKELRLSTRNGAVSLVKVDMGRAELHPERIPVKLTGESIIARKVKIGGVEYEITCVSMGNPHAVVFCNNLDDLDLKEIGPLFETIRCFPTA

SEQ ID NO: 61675 - DNA, 561 bp, Unknown
  Obtained from environmental sample
  misc_feature (1)..(561): n is a, c, g, or t
gtgaacatacaagggatgaagttggaaccattaggcgattttttacatttgaccataattgaccagcttaccggtatttacaacaggcggtatcttgacggcagcttaaaaaagataattaaattactttcccgtaccagcagcagcctgagcgtattaatgatagacattgattatttcaaaaaatacaacgacgcttacgggcatgacgctggggatgaatgcctcagagcggttgcagatgctctttcccaatgtgtaataagggaagaagattttgtcgctaggtacggcggagaggaatttgtcgttgttttgccgaataccgatgaaaatggcgctaagttggttgcggaaagaatgttggggaaaatacgtgaatgtaatataccccacgaaaaaagtgatatagccagtcatgttactatctccattggcggtgcgaccaatgtcgttaatcattttcagcatggaaaagactacataaagcttgccgatgaaggcttatacgaatctaaagaaaatggccgtaacaggtatacatttttgaaaaccgtttga

SEQ ID NO: 61676 - protein, 186 aa, Unknown
  Obtained from environmental sample
  DOMAIN (14)...(179): GGDEF domain
  misc_feature (1)..(186): Xaa is any amino acid
MNIQGMKLEPLGDFLHLTIIDQLTGIYNRRYLDGSLKKIIKLLSRTSSSLSVLMIDIDYFKKYNDAYGHDAGDECLRAVADALSQCVIREEDFVARYGGEEFVVVLPNTDENGAKLVAERMLGKIRECNIPHEKSDIASHVTISIGGATNVVNHFQHGKDYIKLADEGLYESKENGRNRYTFLKTV

SEQ ID NO: 61677 - DNA, 798 bp, Unknown
  Obtained from environmental sample
  misc_feature (1)..(798): n is a, c, g, or t
atggctgattctcctttgataaggcggcacttccttaaccccacggacggcgaattgcaaaaaatcgcctttgaggaaataaacggataccgcagggcttttaagggcaattcggttttctggtgcagcgatattgataaagaattttattttaacggggataatcattatacggttgatgccgaaaaccccgataactattggtacaaaatgactctatacgaaacagaaaaatataatttcaacataaattacaatccggatatacagcgtactatgctgtggattaacgcgcctgtttttgacaattatcgaaaacctatcggtctggttggaaccggcgtaaatctgtctgatttcatcaatgcaatatatcaggattattcggaagatgaagaattgtatttttttaacgcagccggagaaataaccggagcaagaaacattgatcttgtcgcaaaaaaaataaatatagtcatggaactcggtcaaacaggcaataaaattttggacaatgcaaaacacttaaaaacccgtgaaataaaatattttaaaacaacggatcaaaaaggaataatcgtgtatagctcaattccggctttaaattggtatataaccgtcgtgcgtcccgttactataggagaatctcttcaaactgacatgactgttcttttcggcgtaatgatgacagtcatttttgccgtttttgtatttttcaatatatttatcgtcgtaatacttgaaccattaaatcaaatggtaagaataataaatcaaacatttaccgactgggattga

SEQ ID NO: 61678 - protein, 265 aa, Unknown
  Obtained from environmental sample
  misc_feature (1)..(265): Xaa is any amino acid
MADSPLIRRHFLNPTDGELQKIAFEEINGYRRAFKGNSVFWCSDIDKEFYFNGDNHYTVDAENPDNYWYKMTLYETEKYNFNINYNPDIQRTMLWINAPVFDNYRKPIGLVGTGVNLSDFINAIYQDYSEDEELYFFNAAGEITGARNIDLVAKKINIVMELGQTGNKILDNAKHLKTREIKYFKTTDQKGIIVYSSIPALNWYITVVRPVTIGESLQTDMTVLFGVMMTVIFAVFVFFNIFIVVILEPLNQMVRIINQTFTDWD

SEQ ID NO: 61679 - DNA, 954 bp, Unknown
  Obtained from environmental sample
  misc_feature (1)..(954): n is a, c, g, or t
gtgattatagagaacggcgttaccggtatcggagaaagagccttttccggttgtaaaaaccttaccaacgtaacaatacccaacagtattacaaatattggggagagcgctttttccggttgtaccggcctgaccagagtaacattacctgctaacgccggtttatccggcattgcgagtaacactttttacggttgcagcaaacttaccggcgtaacaataccgaataatgttaccaccattggaaagagcgcctttcacggctgtacaagccttgtcagcgtaataataccgaataatgttacaaatattggggagagcgcttttcaaggttgtaccagccttgtcagcgtaacaatagggagcagcgttaccagaattgaggagaatgctttttttgaaactaaactgagcagtattaccatccctaacagcgttatttacatcggtaaacatgcattttactgcgacagccttttcagcgtaaggtttgaaggaacaaatacatcaattaataacaatgcattcccctccgatagtttaccggatgcgtacaaatcaggaggcgtgggaatatatacgagaacaagcggcggtaacaattggacaacaacggcgccggcagccaaagaagaaaatgaatctaatgcaataactaaatattacaacttattgaataaagcgacagacctttcacagaaagtatcggaatacagaacaaatcgccccaaaacaaccgacattatcaaagacgcggcaaaagaatataccgctctattaacagaaatggcagagtttagaaaacaaaatccgccaatcactgttactgacatgaataatcttaacagccgtataaataatataaaggattattttaattggggagcggaaagctggtttaacaaaaatgaattagatgcttttcgcaaggaatttccggggatttttaattaa

SEQ ID NO: 61680 - protein, 317 aa, Unknown
  Obtained from environmental sample
  misc_feature (1)..(317): Xaa is any amino acid
MIIENGVTGIGERAFSGCKNLTNVTIPNSITNIGESAFSGCTGLTRVTLPANAGLSGIASNTFYGCSKLTGVTIPNNVTTIGKSAFHGCTSLVSVIIPNNVTNIGESAFQGCTSLVSVTIGSSVTRIEENAFFETKLSSITIPNSVIYIGKHAFYCDSLFSVRFEGTNTSINNNAFPSDSLPDAYKSGGVGIYTRTSGGNNWTTTAPAAKEENESNAITKYYNLLNKATDLSQKVSEYRTNRPKTTDIIKDAAKEYTALLTEMAEFRKQNPPITVTDMNNLNSRINNIKDYFNWGAESWFNKNELDAFRKEFPGIFN

SEQ ID NO: 61681 - DNA, 516 bp, Unknown
  Obtained from environmental sample
  misc_feature (1)..(516): n is a, c, g, or t
gtgattacgagggcgtcccttaactggctgacaaataccaatctgattcataaactataccgtgtaagtttgccgaatatgccgttgataggttataaagaaccggctgttttcaagctttatatgaacgacgtagggcttctttcaacgagagccggattagatatcaaactttatattgatgataacgacagaactttctcgcactacaagggaggccttgctgaacaatttgttttacaggaacttatagcgacaggagacaaactgccgatttattactgggctgctgaaaaaaataccgccgaagttgaatttattatacagtataccgataaaattattccgattgaggtaaagtccggcaagaatgtaaaatctcaaagcttaaatgtgtacagaaataagtatgccccatctcacgctgtccgcgcttcgctgaaaaaatacggaattatggatggattatattcagtacctctatatctaataggcaatttatccgcaattatctaa

SEQ ID NO: 61682 - protein, 171 aa, Unknown
  Obtained from environmental sample
  misc_feature (1)..(171): Xaa is any amino acid
MITRASLNWLTNTNLIHKLYRVSLPNMPLIGYKEPAVFKLYMNDVGLLSTRAGLDIKLYIDDNDRTFSHYKGGLAEQFVLQELIATGDKLPIYYWAAEKNTAEVEFIIQYTDKIIPIEVKSGKNVKSQSLNVYRNKYAPSHAVRASLKKYGIMDGLYSVPLYLIGNLSAII

SEQ ID NO: 61683 - DNA, 708 bp, Unknown
  Obtained from environmental sample
  misc_feature (1)..(708): n is a, c, g, or t
atgaaggaatttggagcgaaaaattacgactctaccgcctatatcacttttgatatagataacacatataaaaacatttttgaaaaagattttaatgttccgcgtattattcatgaactttccatagcgagcggtattaaaattacccctgataccctcatcatttttgatgaagttcaggaatgtccgcgcgcgcttacgtcgttaaaatattttaatgagaacgcgcccgagtaccggatcatcgccgccggcagcctgcttggagtgatgacgcttgaggggacaggttttcccgtcggcaaagttgatatgttaactatgtaccccatgtcgttttatgagtttttggaagcggtagagccgcgttatgtgcaaatcctgaaaacgcctgatttatccgcgatttccgcgttccatgacgcaattacagcgctgttaaagcaatatttctatacgggcggaatgcccgcggctgtgaagaaatactgcgaaacccgcgattttggcgaagtgcgtgatgtgcaaagaataattctcgattcttactatgccgattttgcaaaacacattccttccgccaatatcacgcggacaagggatatttgggattcagttccaactcagcttggcagagaaaacaaacgctttctgtattccggcatgaaagaaggttctcgcgggcgtgattacgagggcgtcccttaa

SEQ ID NO: 61684 - protein, 235 aa, Unknown
  Obtained from environmental sample
  misc_feature (1)..(235): Xaa is any amino acid
MKEFGAKNYDSTAYITFDIDNTYKNIFEKDFNVPRIIHELSIASGIKITPDTLIIFDEVQECPRALTSLKYFNENAPEYRIIAAGSLLGVMTLEGTGFPVGKVDMLTMYPMSFYEFLEAVEPRYVQILKTPDLSAISAFHDAITALLKQYFYTGGMPAAVKKYCETRDFGEVRDVQRIILDSYYADFAKHIPSANITRTRDIWDSVPTQLGRENKRFLYSGMKEGSRGRDYEGVP

SEQ ID NO: 61685 - DNA, 426 bp, Unknown
  Obtained from environmental sample
  misc_feature (1)..(426): n is a, c, g, or t
ttgttgccgtgccgtcccgccattttgtcgccttcacggagtttgcgtttggtagcgataagcactttgaccatttcgtcaacgccggggttaagatcatcgccttctgttcttttcagccgctgtatgtcaataacggttccttcaatgccatgcggaacccttaaggaagagtcccgcacttctttggccttttcaccgaaaatggaattgagcagtttgaattccggcgttgtctcggtctcgcttttgggcgttacctttccgaccagaatgtcaccggaacggactttcgcgccgatgcaaataatgccttccttgtccagattgtccaaacttttttcagacgtattgggaatttcatcggttattttttccggccccagctttgtctcgcgcacctcggttgcaaattcttttatatga

SEQ ID NO: 61686 - protein, 141 aa, Unknown
  Obtained from environmental sample
  misc_feature (1)..(141): Xaa is any amino acid
MLPCRPAILSPSRSLRLVAISTLTISSTPGLRSSPSVLFSRCMSITVPSMPCGTLKEESRTSLAFSPKMELSSLNSGVVSVSLLGVTFPTRMSPERTFAPMQIMPSLSRLSKLFSDVLGISSVIFSGPSFVSRTSVANSFI

SEQ ID NO: 61687 - DNA, 831 bp, Unknown
  Obtained from environmental sample
  misc_feature (1)..(831): n is a, c, g, or t
gtgcgcgagacaaagctggggccggaaaaaataaccgatgaaattcccaatacgtctgaaaaaagtttggacaatctggacaaggaaggcattatttgcatcggcgcgaaagtccgttccggtgacattctggtcggaaaggtaacgcccaaaagcgagaccgagacaacgccggaattcaaactgctcaattccattttcggtgaaaaggccaaagaagtgcgggactcttccttaagggttccgcatggcattgaaggaaccgttattgacatacagcggctgaaaagaacagaaggcgatgatcttaaccccggcgttgacgaaatggtcaaagtgcttatcgctaccaaacgcaaactccgtgaaggcgacaaaatggcgggacggcacggcaacaaaggcgtcgtggcgcggattcttcccgaagaagatatgccctacatggaagacggcactccgctggatctgtgcctgacgccgctgggcgttccttcgcgtatgaacatcggacagcttttggaaaccgaactgggctgggcgggatcgacccttgatgaatggtactccacgccggtattccagtctccctcaaccgatcagattgaagagaaactgaaagaggcgggcctgccggtaacgagcaaggcgatactccacgacggcagaaccggcgaagcttttgtgaatcccattttctgcggggtgatttactttctgaaactgcaccatttggtcgatgataaaatgcacgcccgttcacaggtccgtactcgcttgttacacagcagccgttgggcggaaaagcgcagttcggcggtcagcggttag

SEQ ID NO: 61688 - protein, 276 aa, Unknown
  Obtained from environmental sample
  DOMAIN (1)...(265): RNA polymerase Rpb2, domain 6
  misc_feature (1)..(276): Xaa is any amino acid
MRETKLGPEKITDEIPNTSEKSLDNLDKEGIICIGAKVRSGDILVGKVTPKSETETTPEFKLLNSIFGEKAKEVRDSSLRVPHGIEGTVIDIQRLKRTEGDDLNPGVDEMVKVLIATKRKLREGDKMAGRHGNKGVVARILPEEDMPYMEDGTPLDLCLTPLGVPSRMNIGQLLETELGWAGSTLDEWYSTPVFQSPSTDQIEEKLKEAGLPVTSKAILHDGRTGEAFVNPIFCGVIYFLKLHHLVDDKMHARSQVRTRLLHSSRWAEKRSSAVSG

SEQ ID NO: 61689 - DNA, 321 bp, Unknown
  Obtained from environmental sample
  misc_feature (1)..(321): n is a, c, g, or t
ttgggcggaaaagcgcagttcggcggtcagcggttaggtgaaatggaagtatgggcgcttgaagcgtacggcgctgcgaatacactgcaggaacttttaacgattaagtcggacgatatgacgggacgctccaagatttacgaggcgattgtaaaaggagaaccctcaacgaccgccggtattcccgaatcgtttaacgtactggttcaggaattgcggggtcttgcgctggacttgtcaatctttgacgtaaaaggaaaacaaataccgctcaccgaaaaagatgaggaattaataactaagtcgggaagtaatttctaa

SEQ ID NO: 61690 - protein, 106 aa, Unknown
  Obtained from environmental sample
  DOMAIN (8)...(84): RNA polymerase Rpb2, domain 7
  misc_feature (1)..(106): Xaa is any amino acid
MGGKAQFGGQRLGEMEVWALEAYGAANTLQELLTIKSDDMTGRSKIYEAIVKGEPSTTAGIPESFNVLVQELRGLALDLSIFDVKGKQIPLTEKDEELITKSGSNF

SEQ ID NO: 61691 - DNA, 3060 bp, Unknown
  Obtained from environmental sample
  misc_feature (1)..(3060): n is a, c, g, or t
atgcgagatatacaagattttgattcgataatgatacggctggcttcacctgatatgatcaggtcgtggtcttacggcgaagtaaaaaaacccgagacgattaactatcgtactctgcgcccggaaaaggaaggtcttttctgcgagcgtatctttggaactaccaaagaatgggaatgttactgcggaaaattcaaatcgatccgttataagggcgttatctgcgaccgctgcggcgtcgaagttacgcactttaaggtgcgccgtgaaagaatggggcacattgaattagccgctcccgtttcgcatatctggtactatcgttcagtccccagcagaatggggcttctcctcgaccttcccacaggtcagcttcgttccgttctttactatgaaaaatacatcgttatagattcaggcgacaccaacctgaaaaaaggtcagcttctttccgaagaggaatactacgaagcgcaggaacgtttcggcggcggctttacagccggaatgggcgctgaagcaatcagcaccctgcttgaaaacctcgaccttgatcaaatggcggcggatctccgcgccaagatgattgagaagggccccaagagcgacaagcgtcttttaaagcgcatcgacatcgtggaaaatttccgcaattcggaaaacaagccccactggatgatcctcaccgtgatacccgttatcccgccggaactgcgccctatggttcagcttgacggcggacgttttgccacaagcgatcttaatgatctttaccgcagggtaattaacaggaacaaccgccttaaaaggctgataggccttaacgcgcctgaaattattatacgcaacgaaaagcgcatgctgcaggaagcggtagacgcgttattcgacaattccaagaaaaagaaagtggtaaaaggctcctccaacaggccgcttaaatcgatcagcgatatgctcaaaggcaagcaggggcgtttccgccagaacctgctcggaaaacgcgttgactattcggggcgctctgtaattaccgtagggccggatctgcgaatgtggcagtgcggcattcccacaaagatggctcttgaattgtttaagccctttataatgaaaaaacttgtagacaaggacgttgtcttcaatattaaaaaagcgaagatgcttgtagaacaggaaacgcccgaagtcttcgccattcttgacgaggttgtaaaagaacaccccgtgcttctcaaccgcgccccaaccctccacaggcttggtattcaggcttttgaacccgtgctggtagaggggaaagcgataaaactgcacccgcttgtctgtcacgcttttaacgcggactttgacggcgaccagatggcggttcacgtcccgctcacgcaggcggcccagatggaatgttggacgctcatgctttccgcgcgcaaccttcttaaccccgccaacggcaagacaattgtgtttccgtctcaggatatggttttgggcatcaacttccttacaagatttaaacaaaacgcgaaaaggcccggctcctctaaaccggaaaccgccgacaagattcccttttattcatctgtcgaggaagtgctgatggcggtggaaaacaaggctttggattggggagcggcgattaaggttaaaacgccgcgtaagcttatttgggacaaggcaggccatgtcgtaccggcggacgcaaagggaataatcgtaacatccgcgggaaggcttgtttttaacggcgagatgcccgaggatcttccctatattaattatgagcttaaagacaaggaattacgcgctcttattgagcatgtgttcaaggaaaaaggctcctgggttacggtgcaaatgctggacgcgataaaagccaccggctaccgttatgcgacagtattcggcgcgactataggcgtggatgatattgtgattccgaaagaaaaaaccgaaatgatcaataaggcgaataaggacgttgagtcaatccagaagcagagaagagaaggatttattaccgaggaagaacgctacaaccgcgttgtggaaatctggacaaaggcaaatgaagagcttacaagtaaaacaatgcagactctggaattggacagggacggctttaactcaatctacatgatggcgaactcaggcgcgcgcggaagcagaaaccagatacgccagcttgcgggtatgcgcggtcttatggcaaagccgtcgggagaaattattgagcttccgattcgttcaaactttaaagaaggtctttctgttattgaattctttatttcaactaacggcgcgcgcaaaggtctagcggataccgctcttaaaacagcggaagcgggctaccttacccgccgccttgtagacatcgcgcaggatatggtcgtaaacgaagaagactgcggcaccatcaacggtattgcctactcggcggtaaagcagggcgaagaaattgtcgagccgttaagggatcgcatagtaggaaggtttactctggagcgtgttaaacatccgattaccggagagcttataatcgacgtaaatgaagagattaacgaagagattgccgcggcgatagaaaacgcgggcgttgagtccgtgcggataagaacggttttaacatgcgaagcaaaatacggcatatgccagaaatgctacggacgcaatcttgccacaaaccgcactgtggaaataggggaagcggttggaacaatcgccgcgcagtctatcggccagcccggcactcagcttaccatgcgcaccttccatacaggcggcaccgcgaacaaagtcagcgaggataaccgcattattctgaaatatccggtatatatcagagatgttgccggaacgcatttaacgcttgataacggtcatttgctttttacccgccgcgggcacgccattgttaacaagataatgaaagaatacaaaatcgagaaaggcgatacgcttgtcgctgcggacggaaagaaaattaacaggggcgatgtattaatccgccgcggcggtcacgacattgtttcatcggaaatcgcgtatgccatgttctaa

SEQ ID NO: 61692 - protein, 1019 aa, Unknown
  Obtained from environmental sample
  DOMAIN (755)...(1018): RNA polymerase Rpb1, domain 5
  misc_feature (1)..(1019): Xaa is any amino acid
MRDIQDFDSIMIRLASPDMIRSWSYGEVKKPETINYRTLRPEKEGLFCERIFGTTKEWECYCGKFKSIRYKGVICDRCGVEVTHFKVRRERMGHIELAAPVSHIWYYRSVPSRMGLLLDLPTGQLRSVLYYEKYIVIDSGDTNLKKGQLLSEEEYYEAQERFGGGFTAGMGAEAISTLLENLDLDQMAADLRAKMIEKGPKSDKRLLKRIDIVENFRNSENKPHWMILTVIPVIPPELRPMVQLDGGRFATSDLNDLYRRVINRNNRLKRLIGLNAPEIIIRNEKRMLQEAVDALFDNSKKKKVVKGSSNRPLKSISDMLKGKQGRFRQNLLGKRVDYSGRSVITVGPDLRMWQCGIPTKMALELFKPFIMKKLVDKDVVFNIKKAKMLVEQETPEVFAILDEVVKEHPVLLNRAPTLHRLGIQAFEPVLVEGKAIKLHPLVCHAFNADFDGDQMAVHVPLTQAAQMECWTLMLSARNLLNPANGKTIVFPSQDMVLGINFLTRFKQNAKRPGSSKPETADKIPFYSSVEEVLMAVENKALDWGAAIKVKTPRKLIWDKAGHVVPADAKGIIVTSAGRLVFNGEMPEDLPYINYELKDKELRALIEHVFKEKGSWVTVQMLDAIKATGYRYATVFGATIGVDDIVIPKEKTEMINKANKDVESIQKQRREGFITEEERYNRVVEIWTKANEELTSKTMQTLELDRDGFNSIYMMANSGARGSRNQIRQLAGMRGLMAKPSGEIIELPIRSNFKEGLSVIEFFISTNGARKGLADTALKTAEAGYLTRRLVDIAQDMVVNEEDCGTINGIAYSAVKQGEEIVEPLRDRIVGRFTLERVKHPITGELIIDVNEEINEEIAAAIENAGVESVRIRTVLTCEAKYGICQKCYGRNLATNRTVEIGEAVGTIAAQSIGQPGTQLTMRTFHTGGTANKVSEDNRIILKYPVYIRDVAGTHLTLDNGHLLFTRRGHAIVNKIMKEYKIEKGDTLVAADGKKINRGDVLIRRGGHDIVSSEIAYAMF

SEQ ID NO: 61693 - DNA, 1278 bp, Unknown
  Obtained from environmental sample
  misc_feature (1)..(1278): n is a, c, g, or t
atgaataaaaaacggtcattatttatttttcttttgcttttttttatttcttccgccctttttgcccaaggggaaaatcttactcttaaaatcgcggtaatgggcccgggcgacgagctttatttttggtgggggcatatcgcccttgttattgaagattccaacacgggatcaagccgtttttatgattacggtcttttttcttttgacaacgaaaactttttttacaattttgcttttggaaggcttttgtattgctgcggcgtatcatcaacaaatagaaatattgacgcttacaaggaatcaaaccgagatatagttttttacacattgaatattcctcccgaagacagggtaaaagtacgcgattacgcggagtttaacgttctcccggaaaacagggattattattatcatcattttaaggataattgttccacaaggattcgggatttaattgatcttgcggtagacgggcaatttaaggaacaatacgaaaacgcgcccggccgctatactttccgccagcatgtgcgccgccatacatggtataatcctcccatagactgggctcttaatttctggatggggcaggttattgacactccgactacaatttgggaagagatgtttcttccttccgaagtcggcaaacggatagaagatttttggtataccgataaaaacggcgaaagacaaaaacttgtaaccggcaaagagacggtttacaagtcacaaggccgtcccgctgttctggatgttccccgaaaacaatggccccgtgaattggctttaagtcttgtattagcaggtttatttggttttttctttttattacagaaaaaaaactaccgcgcgggaaaaattttggccggcatcagcatgagtttgtccggtcttgtttttggcattatgagccttcttctttattttttaaatctttttaccaaccatgattatacttttcaaaattacaatatgctctttggcaccccgcttcttcttgccgtaattccgcttggcatttgttacgcgtttacaaagaaaccggaaaagttaattttaaacaatttgttattaaggcttatctggcttattaccgctcttggcatatttatttccatgttaataaaaatcctgccgatgttttatcaacagaatcaaaccgaccagatgctgatgctcccattagccctgctttttgcttttcatcccgcgctcttgcctgaggtatgggaaaaatatttagctcgttttttccctaaaaacaaaggataa

SEQ ID NO: 61694 - protein, 425 aa, Unknown
  Obtained from environmental sample
  SIGNAL (1)...(22)
  misc_feature (1)..(425): Xaa is any amino acid
MNKKRSLFIFLLLFFISSALFAQGENLTLKIAVMGPGDELYFWWGHIALVIEDSNTGSSRFYDYGLFSFDNENFFYNFAFGRLLYCCGVSSTNRNIDAYKESNRDIVFYTLNIPPEDRVKVRDYAEFNVLPENRDYYYHHFKDNCSTRIRDLIDLAVDGQFKEQYENAPGRYTFRQHVRRHTWYNPPIDWALNFWMGQVIDTPTTIWEEMFLPSEVGKRIEDFWYTDKNGERQKLVTGKETVYKSQGRPAVLDVPRKQWPRELALSLVLAGLFGFFFLLQKKNYRAGKILAGISMSLSGLVFGIMSLLLYFLNLFTNHDYTFQNYNMLFGTPLLLAVIPLGICYAFTKKPEKLILNNLLLRLIWLITALGIFISMLIKILPMFYQQNQTDQMLMLPLALLFAFHPALLPEVWEKYLARFFPKNKG

SEQ ID NO: 61695 - DNA, 624 bp, Unknown
  Obtained from environmental sample
  misc_feature (1)..(624): n is a, c, g, or t
atgaatatatctctttttatttcaattttttgcctcgtgttctgtttgctttttttcttttatattaaatggtatataaaacgcaaagtttccgccacggaactcttggccgaatacagagccgaagtttacaggcttaacgcggatattaacgctgtcacagacagggattcaatgttagttgaagatcgaattaaaaaattaaaggaaattctggaagacacagacaagcgcatcaaggtttatgtgcaggaacttgatcgcagccgcacgggggaagcgctttatacaagcctgggcaaaggaatacgcgccgcttngaaaaccccggcggatattccgccgtcttccgatcacacgcctgaatttggtacgcaaacgccgaaacttacgcttgtccgtcaggaaaaggctccttctgatatttccgttcagccttcgccgcattcgtcgtcgcctgcggcggcgcagcatgagccaaaacaatattccaaatggcaaattcgcagtcaaattgaagaacttgtaaaggaaaatctttcaccgcaggaaatcgcgtcccgtcttaaaatcagtattactgaagttgagatcgcgatgagcatgatgaacattaagaagtag

SEQ ID NO: 61696 - protein, 207 aa, Unknown
  Obtained from environmental sample
  misc_feature (1)..(207): Xaa is any amino acid
MNISLFISIFCLVFCLLFFFYIKWYIKRKVSATELLAEYRAEVYRLNADINAVTDRDSMLVEDRIKKLKEILEDTDKRIKVYVQELDRSRTGEALYTSLGKGIRAAXKTPADIPPSSDHTPEFGTQTPKLTLVRQEKAPSDISVQPSPHSSSPAAAQHEPKQYSKWQIRSQIEELVKENLSPQEIASRLKISITEVEIAMSMMNIKK

SEQ ID NO: 61697 - DNA, 432 bp, Unknown
  Obtained from environmental sample
  misc_feature (1)..(432): n is a, c, g, or t
atgtccgtaccgattaccgcgctacgacttttattttggaagacggccttgtcagggtatcaccgtatgaagaacccaatgagatggcccagaagggacttgatggctttagcacccattgatcttcaaacattatttactcagttggacaaggttgccaaaacacaaacttcccagcgggaaagtcaggttattcaacaggccgtgcagagcgttcaacatcagcgtaaaacggaagaacaaattgagcaggtgaacgaagctcaaaatatgggagaaggcgtagaaaaagtcaacgataagagacaaggcgggcagggtggagataaaaagaagggcagagggcaaacgcaaaccggaagagaagacgaaaatcagccgtctgttttaagcgacccaagtttgggtaaaaagattgatataagcctatga

SEQ ID NO: 61698 - protein, 143 aa, Unknown
  Obtained from environmental sample
  misc_feature (1)..(143): Xaa is any amino acid
MSVPITALRLLFWKTALSGYHRMKNPMRWPRRDLMALAPIDLQTLFTQLDKVAKTQTSQRESQVIQQAVQSVQHQRKTEEQIEQVNEAQNMGEGVEKVNDKRQGGQGGDKKKGRGQTQTGREDENQPSVLSDPSLGKKIDISL

SEQ ID NO: 61699 - DNA, 600 bp, Unknown
  Obtained from environmental sample
  misc_feature (1)..(600): n is a, c, g, or t
ttgcttgctccttccctgctcctattaagccgtacgcatctgctctttcttgtcctgtatacgctgaacgttacggtgatacggatgatttacgtggtcttcccctttgttattttggacttatatcttgatgacgggaaatccggcgggcgcggctattgggcatatctgttggctgtttcaacccaactgatatattccaacgcttttgttcttgcgggcccgttcaaatcaatacagatagataactcctatgccgtggtactgctgtcgcttgccgccattgcatttttttttctgtctcgggcagtaatttcaccgaaagcacaaggaattacctctcctacagggcttacgccaaatataggcgatattttcaaagaatataatttaagtgaacgcgagatggaagttgctttacttttgacccaggaagggttaagtaatgaagaaatggggaagcgcctttttatttccgaaagaaccattaaatctcacatttatcagatttatcaaaaattcggcgttagaaggcgcgcagcgtttttggcaaaggtagcaaatgagaaattaaaagttaaaatatcgaatgaggaataa

SEQ ID NO: 61700 - protein, 199 aa, Unknown
  Obtained from environmental sample
  DOMAIN (128)...(186): Bacterial regulatory proteins, luxR family
  misc_feature (1)..(199): Xaa is any amino acid
MLAPSLLLLSRTHLLFLVLYTLNVTVIRMIYVVFPFVILDLYLDDGKSGGRGYWAYLLAVSTQLIYSNAFVLAGPFKSIQIDNSYAVVLLSLAAIAFFFLSRAVISPKAQGITSPTGLTPNIGDIFKEYNLSEREMEVALLLTQEGLSNEEMGKRLFISERTIKSHIYQIYQKFGVRRRAAFLAKVANEKLKVKISNEE

SEQ ID NO: 61701 - DNA, 801 bp, Unknown
  Obtained from environmental sample
  misc_feature (1)..(801): n is a, c, g, or t
ttggccttgttaaaattttttaaagtaagaggtacgaaaatgcgcgaagctcttggggatgagtctgtttttctgcgggttgcggaattcaaaaatgggttaatccagtttacggattccaccaacgctatgcggctcattaaggaacacggcagggatattaggtataatgtcgcctggaaaaaatgggttgtctggaacggcaaatactgggaaattgacgaaggcagcgttttagtccatgaaaaagggcttgaaatggtgcggaatatctacgatgagcttttgaaaaccgccgattacagggagcgtattgacattgaaaaagctgcgataatgagcgaaagcgtaagacggcgcaaggcttttgtggaggcggcgacatgggtttcggctttaagagtcaggactgacgaacttgaccataacccgtggcttctgaatgtgaagaacgggactgtggatatgtcaagcggcgaattcagggagcacaggcaggaggatatgattacgaaaatcgccaatgtggaatatgaccctaacgccgactgcccgatgtggaggcagtttgtccgtgaaattatggggtataaagcggatataataaagtttgtccaaacagcccgccggctggtctttgtccggcgatatttcggaaacaacaatgttcatcctgtttggaacaggggcgaacggaaaaagcacatttctcaataccattatgaatttattgggagattacgccatcgctacgcctaccgaaacctttatgaaaaaatctggagaccagataaccaatga

SEQ ID NO: 61702 - protein, 266 aa, Unknown
  Obtained from environmental sample
  misc_feature (1)..(266): Xaa is any amino acid
MALLKFFKVRGTKMREALGDESVFLRVAEFKNGLIQFTDSTNAMRLIKEHGRDIRYNVAWKKWVVWNGKYWEIDEGSVLVHEKGLEMVRNIYDELLKTADYRERIDIEKAAIMSESVRRRKAFVEAATWVSALRVRTDELDHNPWLLNVKNGTVDMSSGEFREHRQEDMITKIANVEYDPNADCPMWRQFVREIMGYKADIIKFVQTARRLVFVRRYFGNNNVHPVWNRGERKKHISQYHYEFIGRLRHRYAYRNLYEKIWRPDNQ

SEQ ID NO: 61703 - DNA, 777 bp, Unknown
  Obtained from environmental sample
  misc_feature (1)..(777): n is a, c, g, or t
ttgtccaaacagcccgccggctggtctttgtccggcgatatttcggaaacaacaatgttcatcctgtttggaacaggggcgaacggaaaaagcacatttctcaataccattatgaatttattgggagattacgccatcgctacgcctaccgaaacctttatgaaaaaatctggagaccagataaccaatgacatagcaaggctaaggggaacacgctttgtaaccactacggaagcggaatatgggaaacggctgtccgagcctttgataaagcagataacaggcaatgaccgtatgactgcaagatttttgtatggggagtttttcaattttgtaccaacgttcaagatttggatggctactaaccacaagcctgttataaagggaaccgaccacggcatatggcggcgtattaagctgataccattccttacccgcattgaggaagaaaaccaggacaaacaccttgaacagaagttgatgaaagaagggccggggattttgaactggcttgtcgaaggggcaaggcggtggcgaaatgaggggttaaaaacgccgtcaattattgtcagtgcaacggatgaataccgggcggagatggacgttatcgggaatttcctaaaggagcgttgtacccagggagaggaaggctgtatcaaggcaagggaactttttaagtgctatcaggaatggtgcgacgatcacaacgaacacgccgtaagcgagcgttttttcggtttgcggttaaaggaattggggcttgagcaaaacgcatga

SEQ ID NO: 61704 - protein, 258 aa, Unknown
  Obtained from environmental sample
  DOMAIN (3)...(255): Poxvirus D5 protein-like
  misc_feature (1)..(258): Xaa is any amino acid
MSKQPAGWSLSGDISETTMFILFGTGANGKSTFLNTIMNLLGDYAIATPTETFMKKSGDQITNDIARLRGTRFVTTTEAEYGKRLSEPLIKQITGNDRMTARFLYGEFFNFVPTFKIWMATNHKPVIKGTDHGIWRRIKLIPFLTRIEEENQDKHLEQKLMKEGPGILNWLVEGARRWRNEGLKTPSIIVSATDEYRAEMDVIGNFLKERCTQGEEGCIKARELFKCYQEWCDDHNEHAVSERFFGLRLKELGLEQNA

SEQ ID NO: 61705 - DNA, 2907 bp, Unknown
  Obtained from environmental sample
  misc_feature (1)..(2907): n is a, c, g, or t
atggacgagcatagcgcatttaacgaagcctgccgtgccgcggtcctgcgctacgtcaaagaatggcggcaaaccatcacccgcctgggccgctgggtagactttgacaacgactacaaaaccatgaactcggattacatggaatccatctggtgggttatgaagtccctctgggacaaaggcctcctctacgaaggccactacatactcccctactgcccccgctgttccaccgtcctttctaaccacgaactcaacctcggcggttaccaggacgtgcatgatccggcaatcacggtgcggtttaaaataaaggggactggggactggggactggggaatagggaggaagcgaaccccatcaacgcttatttcctcgcgtggacaactactccctggacactgccttcaaatctcgccctcaccctcggccccgatattatttatgtattaattgaggatcttcctgatccccgatccccagtccccagtccccaaggcggcaatgccgcccccccagtccctagtccctgctattacatattagcggaagcaagattgcccgcgtattacaaagacaactctcaatataaaataatctggcgcaagaaaggcgcggaactcaaaggcattcaatacgagccgctgtttccctacttcaaagacgcgcctgacgcctttcgtactttcctgggcgactttgttaccaccgaagacggcaccggcattgttcataccgcccccggtttcggcgaagatgacgctcgcgtacttaaaggaaccggcatacccgttatctgtccggtagacgccgagtgcaaatttacttcggaagtttccgattacgaaggggtattcgtcaaagacgccgacaaggcgattatggaaagactaaaggccgagggtaaacttgtaaaacgcgatcagatacttcacgcctatccgcactgctggcgctgttcaagccctttaatttaccgtgctgtaggttcgtggtttgtcagtgtggaaaaaattaaagaggatatgattaaagccaacagccaaatctactgggttccggaacatatcaaagagggcagattcggcaaatggctggaaggcgcgcgcgactgggcaatcagccgtaaccgctattgggggaatccgcttcccatctggagatgccccgattgcggtaaaacactctgtgtcggaagccgcgcggaattaaaaaatctttccggcgtgtatcctgatgatctccataaacattttgttgacggcattacaatcccatgttcctgcggcgctaatatgacgcgcgtttctgaggtattggactgctggtttgaatccggagccatgacttatgcccagaatcattatccctttgagaataaagaattttttgaaagccatttccccgctgactttatcagtgaaagccttgatcaaacaaggggttggttttacacactcacagtccttgctgcagctctgtttaaaaaaccggctttccgtaactgcattgtaagcggtatggttctggcatcggacggtaaaaagatggcaaagtcgcaaagaaattataccgatcctgtagatgtgattaactcttacggagcggatgctgtcaggctgtttcttgttcattcggcgcttattaaagccgacgatctgcgttacagcgatgatggtgtacgcgaagtgcttaaaagcatcattattccgctttggaatgcgtacagtttttttattacttacgccaatattgacaaaatcaccgctcaaggcgcgcctgaaaaacctgtcaatcctctggatcaatggatactgtcggaaacacaaacccttgtagaaaaagtaagcggcgcgcttgacgcttacgacctgagccgggcggtagacccaattctgcgcttcatagacctgttgaacaactggtacatacgccgctcacgccgccgtttctggcgcagtgaaaatgacagcgataagctcgaagcctacggcgcactctacgaagctctaaaaacattaataacagtcgcatcacccttcatgccgtttaccacagacgctatctggcaaaatctgcgcctgaaagacgatcccgaatcggtgcatttaacagattatccttcacctaacgcaaaacgccgtgacagcgaccttgaattccgcatggcggcggtaatgtcagctgtttcaatcggacgctcgcttcgttcccagtacaatatcaaaatgcgccagccgcttcgcaaagcggaacttgttacacgcaacgaggaagagaaaaaagctctgctcggcatggcggacataatccgcgaggaactgaacgtaaaagaagtagtattttcagataacgaagaagatttggtagagtacgaagtaaaagccaacttccgtgtattgggaaaagaacttggaaaagacatgaaagccgccgccgccaaaatagaagccttaacccacgcggaaattcaaaaaatcgtgcaaggcgcgccgctttccataaacgtcccctgcgaaggcggtgatagagcgcttgtaataacagccgacaaactcgacattcgccgaatagaaaaagcgaacctgcgtgttcttaacgaaggaacgctcacagtcggacttgatacggaaatcacccgagaactttcaatggaaggcgacatccgagacttgattcgcggtattcaaaacgcgcgaaaagagatgggcctgtctgttaccgaccgcatagaactttgtttacatggtgtggactcactaaaagaggcatgggacaattttaatgaaacagtcgccgctgaaactctngccgtcaaaacccaatgggcgaaaacagacgggcaaatccccatcgaagccggagacgatgtatggcaagtgaagatagcggtaagtgaacagtga

SEQ ID NO: 61706 - protein, 968 aa, Unknown
  Obtained from environmental sample
  DOMAIN (602)...(753): Anticodon-binding domain
  misc_feature (1)..(968): Xaa is any amino acid
MDEHSAFNEACRAAVLRYVKEWRQTITRLGRWVDFDNDYKTMNSDYMESIWWVMKSLWDKGLLYEGHYILPYCPRCSTVLSNHELNLGGYQDVHDPAITVRFKIKGTGDWGLGNREEANPINAYFLAWTTTPWTLPSNLALTLGPDIIYVLIEDLPDPRSPVPSPQGGNAAPPVPSPCYYILAEARLPAYYKDNSQYKIIWRKKGAELKGIQYEPLFPYFKDAPDAFRTFLGDFVTTEDGTGIVHTAPGFGEDDARVLKGTGIPVICPVDAECKFTSEVSDYEGVFVKDADKAIMERLKAEGKLVKRDQILHAYPHCWRCSSPLIYRAVGSWFVSVEKIKEDMIKANSQIYWVPEHIKEGRFGKWLEGARDWAISRNRYWGNPLPIWRCPDCGKTLCVGSRAELKNLSGVYPDDLHKHFVDGITIPCSCGANMTRVSEVLDCWFESGAMTYAQNHYPFENKEFFESHFPADFISESLDQTRGWFYTLTVLAAALFKKPAFRNCIVSGMVLASDGKKMAKSQRNYTDPVDVINSYGADAVRLFLVHSALIKADDLRYSDDGVREVLKSIIIPLWNAYSFFITYANIDKITAQGAPEKPVNPLDQWILSETQTLVEKVSGALDAYDLSRAVDPILRFIDLLNNWYIRRSRRRFWRSENDSDKLEAYGALYEALKTLITVASPFMPFTTDAIWQNLRLKDDPESVHLTDYPSPNAKRRDSDLEFRMAAVMSAVSIGRSLRSQYNIKMRQPLRKAELVTRNEEEKKALLGMADIIREELNVKEVVFSDNEEDLVEYEVKANFRVLGKELGKDMKAAAAKIEALTHAEIQKIVQGAPLSINVPCEGGDRALVITADKLDIRRIEKANLRVLNEGTLTVGLDTEITRELSMEGDIRDLIRGIQNARKEMGLSVTDRIELCLHGVDSLKEAWDNFNETVAAETLAVKTQWAKTDGQIPIEAGDDVWQVKIAVSEQ

SEQ ID NO: 61707 - DNA, 495 bp, Unknown
  Obtained from environmental sample
  misc_feature (1)..(495): n is a, c, g, or t
atgcaactttgcgccctgttaagactcggtttccctacggctccgggactgccatcccttagcctcgctgcacatcgcaactcgcaggctcattctacaaaaggcacgccatcacccagtttcccgggctttgacatgttgcgggtttgcggtttcaggttctctttcactcccctcgccggggttcttttcgcctttccctcacggtacttctgctctatcggtcgtatctcgtatttagccttggatcgtggtcgacccggattccggcagggtttctcgtgccccgccgtactcaggtaccgcccgggagtcctcgccatttcgcgtacggggatttcaccctctctgtcgggctttcccaatgcccttccgctatgcagaggttttctcctaactccccccctttcgggcgggcggccctacaaccccgccgtcgccggcggtttgggctcctccgatttcgctcgccgctactctcggaatctcttttga

SEQ ID NO: 61708 - protein, 164 aa, Unknown
  Obtained from environmental sample
  misc_feature (1)..(164): Xaa is any amino acid
MQLCALLRLGFPTAPGLPSLSLAAHRNSQAHSTKGTPSPSFPGFDMLRVCGFRFSFTPLAGVLFAFPSRYFCSIGRISYLALDRGRPGFRQGFSCPAVLRYRPGVLAISRTGISPSLSGFPNALPLCRGFLLTPPLSGGRPYNPAVAGGLGSSDFARRYSRNLF

SEQ ID NO: 61709 - DNA, 1647 bp, Unknown
  Obtained from environmental sample
  misc_feature (1)..(1647): n is a, c, g, or t
atgacctcggcaaacagcgtaccgttcaggatgtcattgactacatacaaaagtgcttggcgtggcagaaatgcagcgcctgcggcttcgtgtgccattagaaaaaggaggacaaaaatgttaaagaaaacgtcaaagaatgtcctaacggactacatagccaaagcagctccctccggcgtcgataccggcacggcggcgtacttggctaacctgtctttagtcgccgccgtcgcgccgaaagtcgccaaaggtatagtcaaggaactcgccgatcaacgcgcctacctcaaactgatcgcgagcgaaaactactgctccctcgccgtacaactcgctatgggaaatctcctcaccgacaagtacgcggagggcattcccgcccgtcgtttttacgccggttgcggcaacgttgacactatcgaatcctacgccgtcgataaagccaaaaaactcttcggagcgcaacacgcctacgtccaacctcacagcggagcggacgcaaaccttattgcttattgggcgatactctccgcgcggatctccgaacccgcgctcgccgaaataggagagaccaacccgtctaaactaagccgcgaggagtggaacaaaatacgggcaaaaaccggcaaccaacggctgctcggaatggactactactccggcggacacctaacccacggctaccgtcataacctctccgctcaaatgttcgacgcctacagttacggcgtaaataaagagaccggtctgctcgactacgacgaaatagagcgcatggccgccgagataaaaccgctgatactcttagccggttacagcgcctacccaagaaaggtcaatttcgcccgaatgagagaaattgccgacaaggcaggggcggtcttcatggtggacatggcgcacttcgccggattggtggccggtaaggtcttcaccggcgacttcgatcccgtggcgcacgcccacgtggtaaccaccacaacccacaagacgctgcgcggtccgcgaggcggcatagttctatgcacccgcgagttcgccgatagcgtggacaaaggctgtccgcttgtcatgggcggccctttggccaacgtcatggccgccaaagccgtaacgctcgccgaggcaagcctcccgtcgtttaggcgatacgccgcgtctgttgtgaaaaacgccgccgccttgagcaaatactgcgtggccgagggaatgacggtcgccacaggcggtacggaaaaccatctattgcttatagacgttacgcctttcggcttgacaggccgccaagccgagagcgctctgcgcgactgcggcataacgctgaaccgtaactccctgccctacgacaaaaacggcccgtggtatacaagcggcctgagaatcggagcggcggcggcggtaacgctcggcatgggcgacgccgaaatgaaagagatcgccgcagtaataaaattggtgctctcaaacacaaagccggagacggttgcggcgggagaaaacgccggaaacgcaagcaagtcaaagtacctaaccaacggcaaagcggccaaagaagcaaaggcgcgtataaaaacgcttttagacgaatttccggtatacccgaatttagacttggcggttttacagaaggcgttttatagatga

SEQ ID NO: 61710 - protein, 548 aa, Unknown
  Obtained from environmental sample
  DOMAIN (75)...(484): Serine hydroxymethyltransferase
  misc_feature (1)..(548): Xaa is any amino acid
MTSANSVPFRMSLTTYKSAWRGRNAAPAASCAIRKRRTKMLKKTSKNVLTDYIAKAAPSGVDTGTAAYLANLSLVAAVAPKVAKGIVKELADQRAYLKLIASENYCSLAVQLAMGNLLTDKYAEGIPARRFYAGCGNVDTIESYAVDKAKKLFGAQHAYVQPHSGADANLIAYWAILSARISEPALAEIGETNPSKLSREEWNKIRAKTGNQRLLGMDYYSGGHLTHGYRHNLSAQMFDAYSYGVNKETGLLDYDEIERMAAEIKPLILLAGYSAYPRKVNFARMREIADKAGAVFMVDMAHFAGLVAGKVFTGDFDPVAHAHVVTTTTHKTLRGPRGGIVLCTREFADSVDKGCPLVMGGPLANVMAAKAVTLAEASLPSFRRYAASVVKNAAALSKYCVAEGMTVATGGTENHLLLIDVTPFGLTGRQAESALRDCGITLNRNSLPYDKNGPWYTSGLRIGAAAAVTLGMGDAEMKEIAAVIKLVLSNTKPETVAAGENAGNASKSKYLTNGKAAKEAKARIKTLLDEFPVYPNLDLAVLQKAFYR

SEQ ID NO: 61711 - DNA, 495 bp, Unknown
  Obtained from environmental sample
  misc_feature (1)..(495): n is a, c, g, or t
atgccgcagtcgcgcagagcgctctcggcttggcggcctgtcaagccgaaaggcgtaacgtctataagcaatagatggttttccgtaccgcctgtggcgaccgtcattccctcggccacgcagtatttgctcaaggcggcggcgtttttcacaacagacgcggcgtatcgcctaaacgacgggaggcttgcctcggcgagcgttacggctttggcggccatgacgttggccaaagggccgcccatgacaagcggacagcctttgtccacgctatcggcgaactcgcgggtgcatagaactatgccgcctcgcggaccgcgcagcgtcttgtgggttgtggtggttaccacgtgggcgtgcgccacgggatcgaagtcgccggtgaagaccttaccggccaccaatccggcgaagtgcgccatgtccaccatgaagaccgcccctgccttgtcggcaatttctctcattcgggcgaaattgacctttcttgggtag

SEQ ID NO: 61712 - protein, 164 aa, Unknown
  Obtained from environmental sample
  misc_feature (1)..(164): Xaa is any amino acid
MPQSRRALSAWRPVKPKGVTSISNRWFSVPPVATVIPSATQYLLKAAAFFTTDAAYRLNDGRLASASVTALAAMTLAKGPPMTSGQPLSTLSANSRVHRTMPPRGPRSVLWVVVVTTWACATGSKSPVKTLPATNPAKCAMSTMKTAPALSAISLIRAKLTFLG

SEQ ID NO: 61713 - DNA, 552 bp, Unknown
  Obtained from environmental sample
  misc_feature (1)..(552): n is a, c, g, or t
atggtatttaaagaagaactttatcgaaacgataaacatttactcaatttcaataaaggcaaaataattttacgaaatgcagttagagcaataattttaaaggaaaatactattttaatggtatttttagaaaaaacaaatgaatataaattccctggtggtggaattgtagaaagtgagacaattaaagaggcattaaagagagaagtattggaagaagttggatacaatgttattaaaattggtgaaaaaataggaattatgacagaatatggaatagcattggaagacaaaaataaaatatttaaaatggtttctgaatattatgccgtaaatattgactataaccaaattagtcaaaaacttgacaattatggaaaagaactattatttaagccttgttggacaaaaatagaagaggcatataaaacaaataaaataataattgataataaatgtgattcaacgccctggataaaaagggaaacaagggtattggaaatattaaatgaagacattaaggtaaatggagtacggcactactgcgcataa

SEQ ID NO: 61714 - protein, 183 aa, Unknown
  Obtained from environmental sample
  DOMAIN (24)...(162): NUDIX domain
  misc_feature (1)..(183): Xaa is any amino acid
MVFKEELYRNDKHLLNFNKGKIILRNAVRAIILKENTILMVFLEKTNEYKFPGGGIVESETIKEALKREVLEEVGYNVIKIGEKIGIMTEYGIALEDKNKIFKMVSEYYAVNIDYNQISQKLDNYGKELLFKPCWTKIEEAYKTNKIIIDNKCDSTPWIKRETRVLEILNEDIKVNGVRHYCA

SEQ ID NO: 61715 - DNA, 426 bp, Unknown
  Obtained from environmental sample
  misc_feature (1)..(426): n is a, c, g, or t
atgtgttatggttgggaacctgatgatatagtccaaataattgttgagataaaaaaatataatgaagaagccttggaaacaattaataaagctttagaaaaaacagcaatagaattaggtaaaagatatagggataaggattatccaaatattaatttatcaaattttatatcacgtttttatacaaaagacaatgaagacataaaattaatacaaaatgaacataatgaaaaaacaatggaaacaagaaagtgtaaaatatttgaaatattcaaagaattgaaacatacagacattggattccaatataaatgtaggcaagattattttataatcaaaggatacagtaaatcatatagccttaaaatagaaaagtgtcttatgaaaggtgacaattgctgtattcatcattattttgaggaatga

SEQ ID NO: 61716 - protein, 141 aa, Unknown
  Obtained from environmental sample
  misc_feature (1)..(141): Xaa is any amino acid
MCYGWEPDDIVQIIVEIKKYNEEALETINKALEKTAIELGKRYRDKDYPNINLSNFISRFYTKDNEDIKLIQNEHNEKTMETRKCKIFEIFKELKHTDIGFQYKCRQDYFIIKGYSKSYSLKIEKCLMKGDNCCIHHYFEE

SEQ ID NO: 61717 - DNA, 738 bp, Unknown
  Obtained from environmental sample
  misc_feature (1)..(738): n is a, c, g, or t
atggctgtaactgacaaggaaaaccagataattatagacgcaaacgcggttgggaccgcaaacgaatgcgaacaccttccggagacgttagaccgtacattggaaaatatgaaaaaggcttccattaaaaaaccgaaagggaaaaaactgacgctgcttgccgacgcgaattattttagcgaaggtaatttgaaagcttgcaaggaacgggaagtggaagcgattatacccgacggccaatataagaagcggcttggagataaaaaaaacaaacagtacgggccggatgattttgcgtataataaaagaggtgattactataagtgcccggacggtaaaaaattaatttacaggaggagttctacccttcatgatacagatatgaaagaatacagggcaagcgtaaaagactgccgcggatgccctttaatcaaaaaccgcataaacacaaagaaagatccttccaaaatggaacacgggaggcgtctttctgtatcgcctaacagcctgtgtaatttgctgcgtaaaaaactaaatacggtggaatatcaggatcgatacgccagccggatacagataattgaacctgtgtttgcgaatattaaaaccggtaaggggcttgacaggtttatgcttagggggagaacaaaggtaaatagccaatggcagttatattgtataacgcataatttgggaaaatgcttaanagagtacaataaaagggaaaagattgcttaa

SEQ ID NO: 61718 - protein, 245 aa, Unknown
  Obtained from environmental sample
  misc_feature (1)..(245): Xaa is any amino acid
MAVTDKENQIIIDANAVGTANECEHLPETLDRTLENMKKASIKKPKGKKLTLLADANYFSEGNLKACKEREVEAIIPDGQYKKRLGDKKNKQYGPDDFAYNKRGDYYKCPDGKKLIYRRSSTLHDTDMKEYRASVKDCRGCPLIKNRINTKKDPSKMEHGRRLSVSPNSLCNLLRKKLNTVEYQDRYASRIQIIEPVFANIKTGKGLDRFMLRGRTKVNSQWQLYCITHNLGKCLXEYNKREKIA

SEQ ID NO: 61719 - DNA, 630 bp, Unknown
  Obtained from environmental sample
  misc_feature (1)..(630): n is a, c, g, or t
gtgaactctgccatagcatccgaccaggttgtagacatattcagcgcggcaggacttgaaaaaccggaactttcgattctttctgaagaattcttgaaagaaattgaagggatgaagtttaaaaatgttgccattgaactgttaaagaagctgttgtttgatgaaataaaaatacgttccaagcataacctcgctaagtcaaagtcgctgatggaaatgctcgacagtgcaataaagcgttatcagaacaatctattgaccactgctgaaattattgaggaacttatccgcatcgctaaagaaataaagacctcggataaacgcggtcaggaaatggggctttcagaagaagaacttgctttttatgacgcgctcgaaaccaatgacagcgcggttaaggttctgggtgacgatgtattacgttcaattgcgcgggaagtagcggataaagtcaggaagaacgccactatagatttcacaatcaaagaaacagcccgcgccagaataatggttattgtccgcagaatcctgactaaatacgggtatcctcctgataagcaacctgcggcgattgatttagtgatgaaacaggcagaaaatttagcggatgtttgggcagtaaatcaataa

SEQ ID NO: 61720 - protein, 209 aa, Unknown
  Obtained from environmental sample
  misc_feature (1)..(209): Xaa is any amino acid
MNSAIASDQVVDIFSAAGLEKPELSILSEEFLKEIEGMKFKNVAIELLKKLLFDEIKIRSKHNLAKSKSLMEMLDSAIKRYQNNLLTTAEIIEELIRIAKEIKTSDKRGQEMGLSEEELAFYDALETNDSAVKVLGDDVLRSIAREVADKVRKNATIDFTIKETARARIMVIVRRILTKYGYPPDKQPAAIDLVMKQAENLADVWAVNQ

SEQ ID NO: 61721 - DNA, 1464 bp, Unknown
  Obtained from environmental sample
  misc_feature (1)..(1464): n is a, c, g, or t
atggagaaaatcacgtcgctggcgaagcggcgggggtttgtttatcagtcatcggagatttacggagggcagaacggggcgtgggattacggtccgctcggcgttgaattaaagaaccgcatcgcgggcgcgtggtggaaggaaatgacccgtctccacgacaatatcgtggggctggacgcggctattttgatgcatccccgtacatgggaagcgtcgggccacgtcgagaattttacagatccgctggttgattgcaaaaagtgcaaatcgcgctttcgggcggatcaaattccgcaggaaaatcttgcagctaaaaaatgccccgactgcggcggcgaattaaccgatacccgcaagttcaacctgatgttcaaaactcacatagggcctgcggaagatacagccagtatcatttaccttcgtcccgaaaccgcccagggaatttacgtcaattataaaaatattattcagtccaatagaatgaaaataccgttcggcatcgctcagattggcaaggcgttccgcaacgagattgttaccaagaactttattttccgtacctgcgaatttgagcagatggaaatgcagtactttgtaaaaccggggacggacgaagaatggttttccgaatggcgcaaacagcgctgggcttattacgaaaaactcggcgttaaaatggaccacctgcgctggcatcagcacggaccggacgagcttgcgcattatgcgaaggacgcatacgatattgagtacctgttccctatgggctggcgcgagcttgagggtgttcacaacagaaccgattacgatctcggtcggcacactcaattctccggcaaagatttacaatacatcgatcaggacaacaacaacgagcgctacattccatacattatcgaaacttccgcgggacttacccgtaacctgttgatggttttctgcgacgcttacgacgaagaaaaagtcgccgacaagggtaacgaggacgattggagaactgtcctgcgcttccaccccgatctcgcgcctattaccgtcgccattcttccgttgatgaaaaaagacgggcttgctgaacttgcgcaggacattcgcgcggaattgaaagatgattacgctgccgattacgatcaggcgggagcgattggcaggcgctaccgcagacaagatgaagcgggcactcccttctgcgttccgtggattatcagtccaaagaagacggcactgttaccctgcgcttccgcgattccatggagcaggttcgtgttccgaaggcggaacttgccgctcgtattcgtcaggaaattaaggtgtataaaagaattaaataattcgagaagagttcacacaaagaacacggaggtacaaagatcacaaagaaagggatcaggggtttttgtacgttatcttgtcgtgaaactcaatcatagatttcggacaataatatctgatccctcttag

SEQ ID NO: 61722 - protein, 487 aa, Unknown
  Obtained from environmental sample
  DOMAIN (37)...(257): tRNA synthetase class II core domain (G, H, P, S and T)
  misc_feature (1)..(487): Xaa is any amino acid
MEKITSLAKRRGFVYQSSEIYGGQNGAWDYGPLGVELKNRIAGAWWKEMTRLHDNIVGLDAAILMHPRTWEASGHVENFTDPLVDCKKCKSRFRADQIPQENLAAKKCPDCGGELTDTRKFNLMFKTHIGPAEDTASIIYLRPETAQGIYVNYKNIIQSNRMKIPFGIAQIGKAFRNEIVTKNFIFRTCEFEQMEMQYFVKPGTDEEWFSEWRKQRWAYYEKLGVKMDHLRWHQHGPDELAHYAKDAYDIEYLFPMGWRELEGVHNRTDYDLGRHTQFSGKDLQYIDQDNNNERYIPYIIETSAGLTRNLLMVFCDAYDEEKVADKGNEDDWRTVLRFHPDLAPITVAILPLMKKDGLAELAQDIRAELKDDYAADYDQAGAIGRRYRRQDEAGTPFCVPWIISPKKTALLPCASAIPWSRFVFRRRNLPLVFVRKLRCIKELNNSRRVHTKNTEVQRSQRKGSGVFVRYLVVKLNHRFRTIISDPS

SEQ ID NO: 61723 - DNA, 1113 bp, Unknown
  Obtained from environmental sample
  misc_feature (1)..(1113): n is a, c, g, or t
atgtcatcattatcgatccctgccgccaatggaatggcgcatgatttgctggcgcttggcgcattagtaacaagacttgacccgggaattattcccttcgcggaggcaagtgaatatcttttgcatgtttcaggcggcgagtataatgtggcgacaaatttgtctacctgtttcggcatgaagaccgctatcgcaagcgcaatggtaaattatccaatcgggcgcagaatagagtacgccgtacaaaaagcgggagttactccctactttaaacgttttgaacatgacggagtgcgcggtcctaacatggctatcgtgtggagcgaccgagggcagggagtgcgcgcgcctgtagtcttttataaccgttccaatgaagccgcccagcagttaaaaccgggaagttttgactgggacgcaatttttaaaaagggcgttcgctggtttcactcaggcggaattttcagcgcgctttctcccacgacaagcgaattggtaatagaggcaatgcaggcggcaaaaaaagccggcgcgattgtgtcttttgacttaaattaccgcgcaaaactttgggcggttgccgcagcggagcaagggcttagcgcggcgcaggcaagcgagggtgcggcaaagacgttgcgcaaaatagcgggctatgttgacgtgcttgtaggtaacgaggaagatttgcaaaaagggcttgggttgaaagggcaggatgttgaaaccaaaggacagcttgatccgtccgcatttttcggcatgatggaaagcgtaacaaaagatttcccgaacataaaagcggtggcgactacattacgcgaagttcatttcaccaaccgccattcatggagcgcggtcctgtggctggacggcaaaagctaccaggcccccaccgcggaactggatgtgtatgaccgcgtaggcggcggcgacggctttgccgctgggctgttctacggcctgttgtccggcaaaagcccggaagaagccctcaggctgggatgggcccacggcgcgctggttaccactacgccgggagacacctccatgttcaaccttgagcaggtccaggctttcgcaaagggcggctcggcgcggatacagaggtag

SEQ ID NO: 61724 - protein, 370 aa, Unknown
  Obtained from environmental sample
  DOMAIN (13)...(356): pfkB family carbohydrate kinase
  misc_feature (1)..(370): Xaa is any amino acid
MSSLSIPAANGMAHDLLALGALVTRLDPGIIPFAEASEYLLHVSGGEYNVATNLSTCFGMKTAIASAMVNYPIGRRIEYAVQKAGVTPYFKRFEHDGVRGPNMAIVWSDRGQGVRAPVVFYNRSNEAAQQLKPGSFDWDAIFKKGVRWFHSGGIFSALSPTTSELVIEAMQAAKKAGAIVSFDLNYRAKLWAVAAAEQGLSAAQASEGAAKTLRKIAGYVDVLVGNEEDLQKGLGLKGQDVETKGQLDPSAFFGMMESVTKDFPNIKAVATTLREVHFTNRHSWSAVLWLDGKSYQAPTAELDVYDRVGGGDGFAAGLFYGLLSGKSPEEALRLGWAHGALVTTTPGDTSMFNLEQVQAFAKGGSARIQR

SEQ ID NO: 61725 - DNA, 840 bp, Unknown
  Obtained from environmental sample
  misc_feature (1)..(840): n is a, c, g, or t
ttgatcggcgagaaacggtatttaccggaaacgctccttattaaaaccagggatgaaggattgaaactcattacagattacacccacattgtgattctttcggcgcttgggccgggctggatagattttcttgcggggtttttctgcggttcgcatcttcctattcttgtattcggggaaaaagctatcgaaagcattccggctgtatttgccttttgcttcaaattttttgatactgaagcaaaattacatgactatctcgtcaacgaatatgaaattgtcaaaaaaaatgaagccgcgtcggaagtaaaccatatcaggcaagccctgcttgacaagggcattcccacgacgcctgacgctcttgcccagtgtgttgccgaaaataaagtagacgaagtttctctctttttagccgcgggttttttgcccaatataaaagacaaaaaaggaattcccttgctttgtatttccgccagaaacgggcatgtaagcacagttgagtttctgctccgttctggggcccaggtggatatcattgccgaggatagaggttctaccgctcttattgacagctctatggggaaacataaagatgtgataaaaacccttattgaagccggagcaaatgttaattttaaaagcagggacggacagaccgcgctgattatcgttgtaggcgagggtgatgaggaaattgtcgaaatgttgtttaaagccggggctgaccctgacattaaagacgctcttggcgttagcgcaagaaagtatgcgaccatctttaataatagaaaaatgatagccgtttttgatggcaatgcgttagacaaagcgtcctga

SEQ ID NO: 61726 - protein, 279 aa, Unknown
  Obtained from environmental sample
  DOMAIN (184)...(216): Ankyrin repeat
  misc_feature (1)..(279): Xaa is any amino acid
MIGEKRYLPETLLIKTRDEGLKLITDYTHIVILSALGPGWIDFLAGFFCGSHLPILVFGEKAIESIPAVFAFCFKFFDTEAKLHDYLVNEYEIVKKNEAASEVNHIRQALLDKGIPTTPDALAQCVAENKVDEVSLFLAAGFLPNIKDKKGIPLLCISARNGHVSTVEFLLRSGAQVDIIAEDRGSTALIDSSMGKHKDVIKTLIEAGANVNFKSRDGQTALIIVVGEGDEEIVEMLFKAGADPDIKDALGVSARKYATIFNNRKMIAVFDGNALDKAS

SEQ ID NO: 61727 - DNA, 327 bp, Unknown
  Obtained from environmental sample
  misc_feature (1)..(327): n is a, c, g, or t
atgctgttagttagagcgattatccgccccgaaaagtcggggatcgttatgcgtgaactggccgccgccggctttcccgccgttaccaagctcgatgtttacgggcgcggcaagcagaagggcatcaccgtaggcgatgtgcactacgacgagatacccaaggacatgctcgtcatcgtctgcaacgacgaggacaaggaagatctcgtgaagatcatcatccgtacggccaagaccgaagcgaaaggcgctttcggcgacgggcgcattttcgtgtcgcccgtggaatcggcatacaccatcagttccggcgcagccggcctgtaa

SEQ ID NO: 61728 - protein, 108 aa, Unknown; identical to SEQ ID NO: 6534
  Obtained from environmental sample
  DOMAIN (4)...(104): Nitrogen regulatory protein P-II
  misc_feature (1)..(108): Xaa is any amino acid

SEQ ID NO: 61729 - DNA, 396 bp, Unknown
  Obtained from environmental sample
  misc_feature (1)..(396): n is a, c, g, or t
atgcgggaaataatgtgttttatcangatgaacaaggtcaacgacacccagagagcgctggctgaacacggcttccccgcgttcacctgccgcaagtgcttggggcgcggaaagaagagcatagacccagaactgctcaacgccgtgatcgcgacgggcgagatgcccatgtcgcccgtcggcgagaaccttacggagtcggcgcggctcatcgccaagcgcttcttcacgctcgttgttgacgacaaggacgtgaagaaggcggtcgacgtgattatcgccgctaatcagacgggcaatccgggcgacgggaaaatctttgtcttgccgattacggagacgttctccgtaaggacgggcgagggccacactgaaatatcaaaggggggggcatga

SEQ ID NO: 61730 - protein, 131 aa, Unknown
  Obtained from environmental sample
  DOMAIN (4)...(120): Nitrogen regulatory protein P-II
  misc_feature (1)..(131): Xaa is any amino acid
MREIMCFIXMNKVNDTQRALAEHGFPAFTCRKCLGRGKKSIDPELLNAVIATGEMPMSPVGENLTESARLIAKRFFTLVVDDKDVKKAVDVIIAANQTGNPGDGKIFVLPITETFSVRTGEGHTEISKGGA

SEQ ID NO: 61731 - DNA, 1656 bp, Unknown
  Obtained from environmental sample
  misc_feature (1)..(1656): n is a, c, g, or t
atgagcgcggacgatataaagagcgcggcgaaagggccggttcctcatataaaagataaggtgctggataagtactccgcgaaggtttacaagaaccgcaaagagcacgtcattcagcttgaagagggcgtcgagaatcagagtatcgccgccaacacacgcaccatccccggcattatgacggcccgcgggtgctgctacgccggttgcaaaggcgtcgtagtcggccccctgaaggacgtgtgcgttatcactcacgggcctatcggctgcggattctacagttggggcacgcggcgcaatagggccaagccggacgaacacaccgacaagaacttcgtcacttactgcttctccacggatatgcaggagcctgacgtggttttcggcggcgagaagaagttggagaaggccatcgaagaggctatggagcttttcagccccaagtgcataatgatatgctccacctgccccgtaggcctcattggcgacgacgtacaggctgtggcgcggcgcaccgaggagaagtacggcataaaggctataggctactcgtgcgaaggctacaagggcgtgtcgcagtcgggcggccaccacatagccaataacgggcttatgcgctacgttataggcacgggcgacaaaaagcccaaaaccaaattcgcggtcaacatcttgggcgagtacaatatcggcggcgacggttgggaagaggtccgcatcctaaagcgctgcggcatagaggtgctcaacctattcaccggcgacgcgtcggtcgagtcgctcaagagcgcccatttggcgcacctgaacttggtgatgtgccaccgctccatcaactacattgccgagatgatgaagactaagtacggcttggattggctgaaggtgaacttcatcggagtggaggctacgtgcaattcgctacgtgagatcgccaagtacttcgacgacccggatttaacgaaaaaggtggaagaggtgatcgcggacgagctggcggccatcaaagacgatatggatcactaccgcgccaagttgaacggcaagactgccggtatattctccggcggctcgcggtcgcaccactatcaggcgctgcttaaggacttggggatgaggacggtgatcgccgggtacgagttcgcccaccgcgacgactacgaggggcgcgatgtcatcccgaatatcaaggaggacgccgacaacaagaacattgagagcattacggtaaagcccgatgagaaacactatcgcgagaagtataacgcgcagcagatcgccgccctcaaatcaggcgatgagggcatagagctcgacacgtacgacggcatgattccggagatgtgcgccggagacgtggtggtggacgactacaaccactttgagaccgacgctctcataaagaccgtgaagccggacatttttctgtcgggcatcaaggacaaacactccatacagaaggcgggcgtatcgtcgcgtcagatacactcctacgactattccggcccctattcgggttttcacggcgccgtgaatttcggcagggacgtggcgatggccatatacacaaacgcgtggcagctggtcacgccgccgtggaagcacgaacctatgcttaccggcaaaatcgcggaggagggaaaaaatgcttga

SEQ ID NO: 61732 - protein, 551 aa, Unknown
  Obtained from environmental sample
  DOMAIN (57)...(524): Nitrogenase component 1 type Oxidoreductase
  misc_feature (1)..(551): Xaa is any amino acid
MSADDIKSAAKGPVPHIKDKVLDKYSAKVYKNRKEHVIQLEEGVENQSIAANTRTIPGIMTARGCCYAGCKGVVVGPLKDVCVITHGPIGCGFYSWGTRRNRAKPDEHTDKNFVTYCFSTDMQEPDVVFGGEKKLEKAIEEAMELFSPKCIMICSTCPVGLIGDDVQAVARRTEEKYGIKAIGYSCEGYKGVSQSGGHHIANNGLMRYVIGTGDKKPKTKFAVNILGEYNIGGDGWEEVRILKRCGIEVLNLFTGDASVESLKSAHLAHLNLVMCHRSINYIAEMMKTKYGLDWLKVNFIGVEATCNSLREIAKYFDDPDLTKKVEEVIADELAAIKDDMDHYRAKLNGKTAGIFSGGSRSHHYQALLKDLGMRTVIAGYEFAHRDDYEGRDVIPNIKEDADNKNIESITVKPDEKHYREKYNAQQIAALKSGDEGIELDTYDGMIPEMCAGDVVVDDYNHFETDALIKTVKPDIFLSGIKDKHSIQKAGVSSRQIHSYDYSGPYSGFHGAVNFGRDVAMAIYTNAWQLVTPPWKHEPMLTGKIAEEGKNA

SEQ ID NO: 61733 - DNA, 456 bp, Unknown
  Obtained from environmental sample
  misc_feature (1)..(456): n is a, c, g, or t
atgcgatccgacataactcggcgtgtttgtgtgcacaacgagtttgccttccggcacttccaagtccatgatgaacgacgtcagatcgtcgccgattgtctcagacaggcaggtggtatgcaccgcgataacgtcggggttgtacatatcgaatatgttcttcgccgacgtggtaaggttgctcttgccgccgaacaccgacgcgccctctgtaaacgacgacgacgacgcgatagccggctctttaaagtgacgcgacagcaccgttctgtgatacgagcagcaaccctgcgaaccgtggctgtgcggcatgcatttagccacgccgagcgcggcatacatagcgcccacgggctggcaagtcttacacgggttcacgcgcagagcttcgcgcacctttacatcctttgtagtcatatcaagcattttttccctcctccgcgattttgccggtaa

SEQ ID NO: 61734 - protein, 151 aa, Unknown
  Obtained from environmental sample
  misc_feature (1)..(151): Xaa is any amino acid
MRSDITRRVCVHNEFAFRHFQVHDERRQIVADCLRQAGGMHRDNVGVVHIEYVLRRRGKVALAAEHRRALCKRRRRRDSRLFKVTRQHRSVIRAATLRTVAVRHAFSHAERGIHSAHGLASLTRVHAQSFAHLYILCSHIKHFFPPPRFCR

SEQ ID NO: 61735 - DNA, 1140 bp, Unknown
  Obtained from environmental sample
  misc_feature (1)..(1140): n is a, c, g, or t
atgcttgatatgactacaaaggatgtaaaggtgcgcgaagctctgcgcgtgaacccgtgtaagacttgccagcccgtgggcgctatgtatgccgcgctcggcgtggctaaatgcatgccgcacagccacggttcgcagggttgctgctcgtatcacagaacggtgctgtcgcgtcactttaaagagccggctatcgcgtcgtcgtcgtcgtttacagagggcgcgtcggtgttcggcggcaagagcaaccttaccacgtcggcgaagaacatattcgatatgtacaaccccgacgttatcgcggtgcataccacctgcctgtctgagacaatcggcgacgatctgacgtcgttcatcatggacttggaagtgccggaaggcaaactcgttgtgcacacaaacacgccgagttatgtcggatcgcatataaatggcttcttcaacatgatgatcggtttcatgaactacttgacaaagaagacgggtacgtccaccggcaagacggcgattttccccggatgggtgaaccccggcgatatacgcgaactcaagcgcatagccgctttgatgaacgtgccgacggtcttcttccccgatcagagcggcgtcctagacgcgcccatgaccggcaggtacgagttctaccccgaaggcggtacgacgctcgacgaaatacgtactctcggcgacagcgacggtctgattgcgcttggggaaataatcggtgtggaacccgccgaggtactgaacaaaaagtttaaagtgccgtatacgctgttgccgttgcctgtcggcgtggcgtacaccgaccaatacgttctcgcgttgcggaggcagtcgcgcacggaagttcccgccgcgcttgaggaagagcgcggtaggttggttgacttgttgttggattcctctcaatacacaagcggaaaaaaggtcgcgatattcggcgatcccgatattgtcataggcctaacgtcgctcacgcttgaaatgggcatggttcccaagtacgtcattaccggaacgcccaaagaggagtttacgcgcagggttacggaactcttcgacaagtacggcgtaacggattgcaaggccaaagcgaatgccgacctcttcgagtgcaccagtctcggccgatcctga

SEQ ID NO: 61736 - protein, 379 aa, Unknown
  Obtained from environmental sample
  DOMAIN (15)...(379): Nitrogenase component 1 type Oxidoreductase
  misc_feature (1)..(379): Xaa is any amino acid
MLDMTTKDVKVREALRVNPCKTCQPVGAMYAALGVAKCMPHSHGSQGCCSYHRTVLSRHFKEPAIASSSSFTEGASVFGGKSNLTTSAKNIFDMYNPDVIAVHTTCLSETIGDDLTSFIMDLEVPEGKLVVHTNTPSYVGSHINGFFNMMIGFMNYLTKKTGTSTGKTAIFPGWVNPGDIRELKRIAALMNVPTVFFPDQSGVLDAPMTGRYEFYPEGGTTLDEIRTLGDSDGLIALGEIIGVEPAEVLNKKFKVPYTLLPLPVGVAYTDQYVLALRRQSRTEVPAALEEERGRLVDLLLDSSQYTSGKKVAIFGDPDIVIGLTSLTLEMGMVPKYVITGTPKEEFTRRVTELFDKYGVTDCKAKANADLFECTSLGRS

SEQ ID NO: 61737 - DNA, 1023 bp, Unknown
  Obtained from environmental sample
  misc_feature (1)..(1023): n is a, c, g, or t
atgcaaaagacaactttcggtaaaacctcgttaaccgtaagccgcacaggtttcggctgtatcccaatccagcgcatcccctacgaagaaagtaccgctctcttgcaacacgcctacgaaaatggcgtaaccttgtacgacaccgccaacggatacacaaccagcgaagacaggattggcgtagcgcttcatcatgtgcgcgacaaaattgttttatgcacaaagtcgggcgcgcagacgccggacagtttaatggaacatatagaaaacagcctgaaaaagctgcgaacggattatatcgacgttttccagcttcataacccgtcctttgtgccgcgccccgaaggagacgacggtctttacgccgccgccttaaaagcgaaagagcagggtaaaatccgctgcataggaattaccgctcacagcaaggataacgcgaaaacggcggttctctccggtttgtacgacaccctgcagtaccctctctcttacctgtccacaggtgaagaattggcgcttatcgatctttgccgcgagcataacatcggagtgcttgccatgaagagtttgtgcggcggattgattagcaacgcaaaagccgcattcgcttttctgcggcagtttgagaatgtaatccccatttggggaatgcagaanatgaacgaattaaatgaatttttgttatatgaaaacgagccgcctttgttggatggcaatctattaagcgccattgaaaccgacaaagcggagctttcaggcagtttctgccgctgctgcggttactgtctgccatgttccgtcggcattcccattaacaacgcggcgcgtataacttttttagttaaaagggcagtcaaagaacactggctgtcagaggagtggcaaaaaaatatgcgcctcattgacgattgtactaattgcggtcattgcaaacagacctgtccttatgggttggatgtgcctgccttgcttaaggcacaacagacggagtattttaagttggcggcggggaatgtaggttaa

SEQ ID NO: 61738 - protein, 340 aa, Unknown
  Obtained from environmental sample
  DOMAIN (7)...(303): Aldo/keto reductase family
  misc_feature (1)..(340): Xaa is any amino acid
MQKTTFGKTSLTVSRTGFGCIPIQRIPYEESTALLQHAYENGVTLYDTANGYTTSEDRIGVALHHVRDKIVLCTKSGAQTPDSLMEHIENSLKKLRTDYIDVFQLHNPSFVPRPEGDDGLYAAALKAKEQGKIRCIGITAHSKDNAKTAVLSGLYDTLQYPLSYLSTGEELALIDLCREHNIGVLAMKSLCGGLISNAKAAFAFLRQFENVIPIWGMQXMNELNEFLLYENEPPLLDGNLLSAIETDKAELSGSFCRCCGYCLPCSVGIPINNAARITFLVKRAVKEHWLSEEWQKNMRLIDDCTNCGHCKQTCPYGLDVPALLKAQQTEYFKLAAGNVG

SEQ ID NO: 61739 - DNA, 507 bp, Unknown
  Obtained from environmental sample
  misc_feature (1)..(507): n is a, c, g, or t
atgaaaaaaattatcgcccttgttataggtttatcaatttcctcgatatgctttgcccaaagtgatcctgttgaaggatactggctaagtattgatgaaaaaaccaataaagtcacagccggttggcaaatttaccagcagaacggcgttctttacggaaaaattttatcgttatcagaagacccaaaaggcacaattgctgacaaagttaaggaaagttataaagacttcccccttcccggaaaggtaaacaaaatggaagttgcaggtcccccgtggattttcgggcttaccaagaaaaaaacaggcgaatggacaggcggcaaaataattgaccccgcggacggaaatatttacaactgcaagatcactttccataaggccgacggcaagaagtatgcaaacgacacccttgaaatgcgcggcgaaatagggcttggcataggacgcagtcaatactggcgcaaaaccgatgcggttacagcggaaaatttgtggcctaagtga

SEQ ID NO: 61740 - protein, 168 aa, Unknown
  Obtained from environmental sample
  SIGNAL (1)...(19)
  misc_feature (1)..(168): Xaa is any amino acid
MKKIIALVIGLSISSICFAQSDPVEGYWLSIDEKTNKVTAGWQIYQQNGVLYGKILSLSEDPKGTIADKVKESYKDFPLPGKVNKMEVAGPPWIFGLTKKKTGEWTGGKIIDPADGNIYNCKITFHKADGKKYANDTLEMRGEIGLGIGRSQYWRKTDAVTAENLWPK

SEQ ID NO: 61741 - DNA, 645 bp, Unknown
  Obtained from environmental sample
  misc_feature (1)..(645): n is a, c, g, or t
ttgcgcacaaaaaaagccaaaggagtgaatatgataatcaatcacaacttaagcgcgatgtttgccgacaggtcccttaaagttacccaggtaagtctggataaaaacatggaaaagctgtcgagcggcatacgcattaaccgagccggtgatgacgcttcgggactcgctgtttccgagaagatgcgcgctcaaatccgcggcctgaatatggcggcattcaatgcccagaatggaatttcattcattcaggtaacggagggctatcttcaggaatccgaggatattgtccagcgcctccgtgagttggcagtgcaggccgccaacggtatctataccgacgaggatcgcacgtacatccaaatcgaagtctcagccctggtcgccgaggtagacagagttgcatcgcatgcccagtttaacggaatgaatctgttaaccggacgcttcgcccggcctgtgggtgaaaatttggttaccgcctctatgtggctccatatcggcgccaacatggatcagcggacacaggtgtacatcggcactatgaccgcgaagggtcttggaatccggaatgtcggcgatgatacatttatttcgttgtccgcgccggacagcgcaaaccgcgccattggaaccctgatgtag

SEQ ID NO: 61742 - protein, 214 aa, Unknown
  Obtained from environmental sample
  DOMAIN (37)...(173): Bacterial flagellin N-terminus
  misc_feature (1)..(214): Xaa is any amino acid
MRTKKAKGVNMIINHNLSAMFADRSLKVTQVSLDKNMEKLSSGIRINRAGDDASGLAVSEKMRAQIRGLNMAAFNAQNGISFIQVTEGYLQESEDIVQRLRELAVQAANGIYTDEDRTYIQIEVSALVAEVDRVASHAQFNGMNLLTGRFARPVGENLVTASMWLHIGANMDQRTQVYIGTMTAKGLGIRNVGDDTFISLSAPDSANRAIGTLM

SEQ ID NO: 61743 - DNA, 1281 bp, Unknown
  Obtained from environmental sample
  misc_feature (1)..(1281): n is a, c, g, or t
atgagttttatttccacggaaatttgtttttgcgtctttctgtttgcgcctttcccaatcctgaaacaattcgccgttttttccatggccggcctgttaagttcttttctcacctgtttctgtatctacccccgtctgaaaataccggaggataataaaagacgttttcttctttttgaaagcaaaattnttcttcgtcttaaaagcctgtctttaccgcgtttcgcgagacccgctcttgccgccgctttactggctgccgctctggggcttcttgtttttaatttttcggcggtaaaaatagaaaataacctttcttcactttacaccatgtccgctcccctgctggaatctgaaaagcaagcggcgcaggttttgaattacgattcttcgggttggtattttattattgcgggatcaagcgccgaagaaacgctggaaaacgaggaaacttttgttgcgcgtttggaagaagaaattacccgtggaaatcttggctcttttctgggaacttcggtttttgttccttcaataaaaaagcagaaagaaacatataacgctatgaaagccctgctccccctggctcccgcccagtttgaatatctcggtttcccgccggagtacgcgcatgactttgaaaacgaattcgccgccgcgcaatattgtcttcccacagacacaaacgcgctttccattaccgatatttcaaaactgtggataggggagaagaatggaaaatactactcccgcgttctgcccctcaagccaaaagatgaggcggtcttcagggccattgccgaagaattagaccatgtttattttgtaaacaaagcaaaggatataggccgagacctggatacccttaccaggactatgctgttgttctttcttgccgcttatattgtcatatctgttttagtctgtgcggcatatccgcggcgtgacagcataaaaatctgcgcggttccgattctactggttgtatccgtcctggccgtactggctgccagcaaaattcctcttggttttttttcagcagcggctcttgttctggtttttggtttgggcctggattatattttctacatgacagggaaaaaacagggggaagaaaaaccgcttacatcccttgcggtagttttatcgtttctgacaactcttctttcttttggcgctttggttttaagcaattttacgccgactcatatttttggacttaccgtttccgccggactgggcgcggcgtttgtttttgctatgcttttgcaggaagggaaatga

SEQ ID NO: 61744 - protein, 426 aa, Unknown
  Obtained from environmental sample
  misc_feature (1)..(426): Xaa is any amino acid
MSFISTEICFCVFLFAPFPILKQFAVFSMAGLLSSFLTCFCIYPRLKIPEDNKRRFLLFESKIXLRLKSLSLPRFARPALAAALLAAALGLLVFNFSAVKIENNLSSLYTMSAPLLESEKQAAQVLNYDSSGWYFIIAGSSAEETLENEETFVARLEEEITRGNLGSFLGTSVFVPSIKKQKETYNAMKALLPLAPAQFEYLGFPPEYAHDFENEFAAAQYCLPTDTNALSITDISKLWIGEKNGKYYSRVLPLKPKDEAVFRAIAEELDHVYFVNKAKDIGRDLDTLTRTMLLFFLAAYIVISVLVCAAYPRRDSIKICAVPILLVVSVLAVLAASKIPLGFFSAAALVLVFGLGLDYIFYMTGKKQGEEKPLTSLAVVLSFLTTLLSFGALVLSNFTPTHIFGLTVSAGLGAAFVFAMLLQEGK

SEQ ID NO: 61745 - DNA, 945 bp, Unknown
  Obtained from environmental sample
  misc_feature (1)..(945): n is a, c, g, or t
atgaaaaatcaaactgttgtaattgaccaaactacggttccaattgaaggggaacgcaatttattggaactctgccggaaggcggggattgaactgcccacattctgctatcattcggaaatcagcgtctacggggcgtgccgtatgtgcatggtggaagttgaagggaagggagtacttcccgcctgctccacaaaaggggaagacggcatggtagtacacaccaacacaaagcagatcagaaacatccgcaaagtgataatcgaacttttacttgccagccactgtcaggactgtactacctgccctaagagcggggactgccgtcttcaggcaatcgcgaaacaactggacatatccgaagtgcggtttaaaaagatggggcgcgatgagactaaagatttttcatcgcttgccatactgcgcgatccaagcaagtgcatactctgcggcgactgtgtgcgcgtgtgcgaagaaattcaaacggttggcgcgttaggcttctcatacaggggagcgaaagcgcacgttggaacctgttttaacaagggaatcggcgaaattgaatgcgttggctgcggtcagtgcgtaaaggtctgtcccgtcggggcgattactcccaaataccaaatcaaccaagtttgggacgccatttacgacaagagcaaaacggtcgtggtgcaaatcgcccccgccgtgcgcgtggctcttggcgaatactttggaaaagaccccggcacgatccagctaggacgggtcatcaccgcccttcgcagaataggttttgatcgggtttatgacacctgtttcggcgcggactttaccgtaaccgaggaaggaaaagaattcctgaacgcaagaaagagcggtgaaattctgccgatgttcacctcgtgctgtcccgcgtgggttaatttgccgagcagtactatcccgactttttaa

SEQ ID NO: 61746 - protein, 314 aa, Unknown
  Obtained from environmental sample
  DOMAIN (6)...(69): 2Fe-2S iron-sulfur cluster binding domain
  misc_feature (1)..(314): Xaa is any amino acid
MKNQTVVIDQTTVPIEGERNLLELCRKAGIELPTFCYHSEISVYGACRMCMVEVEGKGVLPACSTKGEDGMVVHTNTKQIRNIRKVIIELLLASHCQDCTTCPKSGDCRLQAIAKQLDISEVRFKKMGRDETKDFSSLAILRDPSKCILCGDCVRVCEEIQTVGALGFSYRGAKAHVGTCFNKGIGEIECVGCGQCVKVCPVGAITPKYQINQVWDAIYDKSKTVVVQIAPAVRVALGEYFGKDPGTIQLGRVITALRRIGFDRVYDTCFGADFTVTEEGKEFLNARKSGEILPMFTSCCPAWVNLPSSTIPTF

SEQ ID NO: 61747 - DNA, 876 bp, Unknown
  Obtained from environmental sample
  misc_feature (1)..(876): n is a, c, g, or t
ttgttcggtaagcctaccgccgtcaataacgttgagactttagcgacggttccgctgattcttcgcatgggagcggatgaatacgccaagttgggtactgcgaccgccaaaggaacaaaaactttcgcgctcacaggccatgtggctaacaccggattaatcgaagtgccgtttggcgcgacattgcgggaaataatcggccacatcggcggcggcgtaactaacgacgacggctcactgtgcggctgtgattttaaagcggtgcagattggcggaccgtcgggcggatgcctcacccaagaacatttggacatgcccctcgattatgacaacctgaaaaaagtcggagcgatggtaggttcaggcggtcttgtcgtaatgaaccaaagcacatgtatggttaagatcgcaaggtactttatgcaatttacgcagaatgaatcttgcggtaaatgcgtagtgtgtcgcgaaggaacccgtcagatgctggtacttctcgatgaaattatcgaaggccgtgcgacaaaggaaaccctcgacttgcttgaagatttatcacaggtggttcaagtcggctcactgtgcgctctcggtaaatcggcgcctaacccggtgttgtcaaccataaaatatttcagggacgaatataacgcccacgtatttgacaaaaagtgcccgaccggaaactgcgaggctcttgccgactacaaaattcttcccgataaatgcaaaggttgttctctttgctctaagaaatgcccggttgaggcaattagcggcgaattaaagaaaccgtataccattgatacaaagaaatgtatcaagtgcggcgcatgtatacagaactgcaaatttgcagccattgtaaaaggatag

SEQ ID NO: 61748 - protein, 291 aa, Unknown
  Obtained from environmental sample
  DOMAIN (1)...(93): Respiratory-chain NADH dehydrogenase 51 Kd subunit
  misc_feature (1)..(291): Xaa is any amino acid
MFGKPTAVNNVETLATVPLILRMGADEYAKLGTATAKGTKTFALTGHVANTGLIEVPFGATLREIIGHIGGGVTNDDGSLCGCDFKAVQIGGPSGGCLTQEHLDMPLDYDNLKKVGAMVGSGGLVVMNQSTCMVKIARYFMQFTQNESCGKCVVCREGTRQMLVLLDEIIEGRATKETLDLLEDLSQVVQVGSLCALGKSAPNPVLSTIKYFRDEYNAHVFDKKCPTGNCEALADYKILPDKCKGCSLCSKKCPVEAISGELKKPYTIDTKKCIKCGACIQNCKFAAIVKG

SEQ ID NO: 61749 - DNA, 846 bp, Unknown
  Obtained from environmental sample
  misc_feature (1)..(846): n is a, c, g, or t
atgagaacactcaaatacaacgacataataaccgccgtccgctcaatgtgcatagaagccgcctacgtcctccccgacgacgtattggctcgtatcaaggaggcccgcgccgccgagacgttctctcgggcgcagtggatcctcgacaacataatcgagaacgcccgcatagcttcaagccggcgtattcccatctgtcaagacaccggcaccgccgtattcttcgtgaaactgggcgacggcgtgcgcgtcgacgacgggaggctgatcgacgccataaacgagggggtgcgccgcggatataccgacggataccttcgctcgtcaatagtggacgacccgattttcgacagaatcaacaccggcggcaacactccggccgcggtgcacgtcgatcttgtgcccggcgacgggctcggaatcacgcttttgccaaagggcgccggttgcgaaaacatgagcgccctggcgatgcttaagccgtcggacggttccgccggcgtggcgaaattcgtctgcgacgccgtgataagcgccggcggcaacccgtgcccgccgcttatcgtgggcgtcggggtgggggggacggcggacgcggtatgcgcgttggccaagaaagcgctcttacgcccggtaggcgttcacaacgacgacggcagatacgctcagatcgagcgctacctgataaaggagataaacgccagcggcgtgggcccgcagggcttgggcggaatgcacacggcgctgtgggtggccgtggagtacatgccgtgccacatagcgtccatgccggtggcggtatgcataaattgccacgccgcccgaagggcgtcgatagagctttag

SEQ ID NO: 61750 - protein, 281 aa, Unknown
  Obtained from environmental sample
  DOMAIN (9)...(281): Fumarate hydratase (Fumerase)
  misc_feature (1)..(281): Xaa is any amino acid
MRTLKYNDIITAVRSMCIEAAYVLPDDVLARIKEARAAETFSRAQWILDNIIENARIASSRRIPICQDTGTAVFFVKLGDGVRVDDGRLIDAINEGVRRGYTDGYLRSSIVDDPIFDRINTGGNTPAAVHVDLVPGDGLGITLLPKGAGCENMSALAMLKPSDGSAGVAKFVCDAVISAGGNPCPPLIVGVGVGGTADAVCALAKKALLRPVGVHNDDGRYAQIERYLIKEINASGVGPQGLGGMHTALWVAVEYMPCHIASMPVAVCINCHAARRASIEL

SEQ ID NO: 61751 - DNA, 417 bp, Unknown
  Obtained from environmental sample
  misc_feature (1)..(417): n is a, c, g, or t
ttggccaacgcgcataccgcgtccgccgtcccccccaccccgacgcccacgataagcggcgggcacgggttgccgccggcgcttatcacggcgtcgcagacgaatttcgccacgccggcggaaccgtccgacggcttaagcatcgccagggcgctcatgttttcgcaaccggcgccctttggcaaaagcgtgattccgagcccgtcgccgggcacaagatcgacgtgcaccgcggccggagtgttgccgccggtgttgattctgtcgaaaatcgggtcgtccactattgacgagcgaaggtatccgtcggtatatccgcggcgcaccccctcgtttatggcgtcgatcagcctcccgtcgtcgacgcgcacgccgtcgcccagtttcacgaagaatacggcggtgccggtgtcttga

SEQ ID NO: 61752 - protein, 138 aa, Unknown
  Obtained from environmental sample
  misc_feature (1)..(138): Xaa is any amino acid
MANAHTASAVPPTPTPTISGGHGLPPALITASQTNFATPAEPSDGLSIARALMFSQPAPFGKSVIPSPSPGTRSTCTAAGVLPPVLILSKIGSSTIDERRYPSVYPRRTPSFMASISLPSSTRTPSPSFTKNTAVPVS

SEQ ID NO: 61753 - DNA, 570 bp, Unknown
  Obtained from environmental sample
  misc_feature (1)..(570): n is a, c, g, or t
atgccgaaaaaaacgccgataaacctaacgttcccgataaccgacaagagcgtcttggcgccgttgcgcgccggcgaccagatactcctatccggcgccgtctacaccgcacgcgacgccgcccacaagcgcttcattaagctcttagacaagggcaagccgctaccggtttccctggagaatcaggccctctactactgcggcccgacgcctccgacgaagacgtcggtgataggcagcgccggccccaccacaagctcccgcatggacggctacaccccgaccatcctgcgaaaaacaggcctggccgccatgatcggcaaaggcggtagaaacgccgccgtaatagaagccataaaagagtgcggcgcaatctacatagcggccataggaggagcgggagccttgatatcctcaaaaataaaatcgtcgcaaataatctgctacgaagagttaggcccggaagcggtatacaaattcgaaatagagtcgctgtctcttatcgtggcgattgacagtaagggaaatgatttgtatgagttggggccgaaagagtatttgtggtcgtaa

SEQ ID NO: 61754 - protein, 189 aa, Unknown
  Obtained from environmental sample
  DOMAIN (1)...(185): Fumarase C-terminus
  misc_feature (1)..(189): Xaa is any amino acid
MPKKTPINLTFPITDKSVLAPLRAGDQILLSGAVYTARDAAHKRFIKLLDKGKPLPVSLENQALYYCGPTPPTKTSVIGSAGPTTSSRMDGYTPTILRKTGLAAMIGKGGRNAAVIEAIKECGAIYIAAIGGAGALISSKIKSSQIICYEELGPEAVYKFEIESLSLIVAIDSKGNDLYELGPKEYLWS

SEQ ID NO: 61755 - DNA, 678 bp, Unknown
  Obtained from environmental sample
  misc_feature (1)..(678): n is a, c, g, or t
gtgctcaaagacatcagtttcgagataaaaaaaggcagcgtagccgctctggtcggcgcaagcggcagcggcaagagcacgacgctggacctgctgccgcgcttctacgacataacaagcggaaagatcgccatcgacggcgccgatatccgagggatgaacctgcccggtctgcggaaactcttcggcatagtcgcccaagagaccttcctatttaacgacacgatatccgccaacatcgcctacggcctgcaaaacgccgacagagagtccatagttacggccgccaaagccgccaacgcctgggagttcatagagaaactcccgaacggcttagacaccgccgtaggagaacgcggggtaatgctctccggaggccagcgccagcgtctgtcgatagcgagagcgttgctgctaaacccgccgatattgatattagacgaggcgacgtccagtttagacacggaatcggagcgtctggtgcaatccgccataaacaacgtaatggagaaccgcacggtactagtggtagcgcacagactgtcaacaatacggcacgcggaccagatattagtattagaggcaggaaggattgcggaacgcgggacgcacgaggagcttttggcccaaaataaaagatataagtatttctatgatattcagttcgcggggggttga

SEQ ID NO: 61756 - protein, 225 aa, Unknown
  Obtained from environmental sample
  SIGNAL (1)...(26)
  DOMAIN (12)...(196): ABC transporter
  misc_feature (1)..(225): Xaa is any amino acid
MLKDISFEIKKGSVAALVGASGSGKSTTLDLLPRFYDITSGKIAIDGADIRGMNLPGLRKLFGIVAQETFLFNDTISANIAYGLQNADRESIVTAAKAANAWEFIEKLPNGLDTAVGERGVMLSGGQRQRLSIARALLLNPPILILDEATSSLDTESERLVQSAINNVMENRTVLVVAHRLSTIRHADQILVLEAGRIAERGTHEELLAQNKRYKYFYDIQFAGG

SEQ ID NO: 61757 - DNA, 513 bp, Unknown
  Obtained from environmental sample
  misc_feature (1)..(513): n is a, c, g, or t
atgtactactcgataagcgaggtgtgcgccatgaccggcatcggtcagcatgttctgcgctattgggagaaggagttctctctgctgcggcccaagaaaaacagcgggggaaagcgggcgtacaaggataaggacattgaggctattattaagataaagcatatgttggaggaggagaagtatacgctgcaaggcgccaagagcaaactgttggacgagcggcgggaacggcgggtaagcgagaacactacatccatgaggcgcaggagggttgatgttgaggggggcggggaagggtcggaatcgacagattcgtctgcgttagagccggaagcgtcttcaacatcatcaacgcaaacacaggcggataccccggccaaattgactaggcggagatctgttcctaagaataacaatggtcgcgacattaataatgataatggcaacgatagggcgctgcttttgagtgtccgggacgaacttctagaggtacttgggttgctggagttgtaa

SEQ ID NO: 61758 - protein, 170 aa, Unknown
  Obtained from environmental sample
  DOMAIN (4)...(41): MerR family regulatory protein
  misc_feature (1)..(170): Xaa is any amino acid
MYYSISEVCAMTGIGQHVLRYWEKEFSLLRPKKNSGGKRAYKDKDIEAIIKIKHMLEEEKYTLQGAKSKLLDERRERRVSENTTSMRRRRVDVEGGGEGSESTDSSALEPEASSTSSTQTQADTPAKLTRRRSVPKNNNGRDINNDNGNDRALLLSVRDELLEVLGLLEL

SEQ ID NO: 61759 - DNA, 1017 bp, Unknown
  Obtained from environmental sample
  misc_feature (1)..(1017): n is a, c, g, or t
ttgcggttttgccgggcggttcctacgaccctgtggacgatttgggcggcggatactatgacgcgggcaatttcggcgcttggtggacggccgcggaaaaagacgccctcctccgggtaccttctttaccgcgacaattccgtgcccaaacgctctttaaacaagagtttcggtttctccgtgcgttgcgtaagcgaccgagaggggagcgttccgccgccagccgcgttaacactgaaattaaccgcaacgaccggcggaacggtgtcggccgatccaagcaaggcgtcatatatcgccggagaacgggttacgattacagccgtcccgaacagagggtacacgttcgtaaaatggacgggcgggaaagtcgcggacacaggctccgctattactatcgttacggtgagttcaaatatggcgatcaccgccgatttcaacaagagcaaagcgccgcccgtcgtatacggttcgcttaccgacgcgcgggacggcaagaaatacgagacggtgtctataggcggcaaggcgtggatggcgcagaatctgaattacgagacgccggacagttcttggtgctacggcgacagcgccgttaattgcgttaaatacggcagactctacgcttggaacgcggcgcggacggcttgccccgccggttggcatctgccgacagttcaggagtgggacgccttagttaaagcggccggcggcgaaaaaacggcgggcgcaaagttgaaagcggcttccggttggaattttttcggcaacggttggatacgtaccggcaacggtacggacgattacggtttctcggccctgcccggcggtaaccgccaccactccgcaggcgacttcagttacgccggcagcataggcttctggtggacagccaccgagtacgaaagcggcggcaacgcgtactgtctaaccatgaactacagcgacaacgacgtgagcgaaaactacagcggcaaagacggcggattgtcggtacgctgcatacaagataactga

SEQ ID NO: 61760 - protein, 338 aa, Unknown
  Obtained from environmental sample
  misc_feature (1)..(338): Xaa is any amino acid
MRFCRAVPTTLWTIWAADTMTRAISALGGRPRKKTPSSGYLLYRDNSVPKRSLNKSFGFSVRCVSDREGSVPPPAALTLKLTATTGGTVSADPSKASYIAGERVTITAVPNRGYTFVKWTGGKVADTGSAITIVTVSSNMAITADFNKSKAPPVVYGSLTDARDGKKYETVSIGGKAWMAQNLNYETPDSSWCYGDSAVNCVKYGRLYAWNAARTACPAGWHLPTVQEWDALVKAAGGEKTAGAKLKAASGWNFFGNGWIRTGNGTDDYGFSALPGGNRHHSAGDFSYAGSIGFWWTATEYESGGNAYCLTMNYSDNDVSENYSGKDGGLSVRCIQDN

SEQ ID NO: 61761 - DNA, 1074 bp, Unknown
  Obtained from environmental sample
  misc_feature (1)..(1074): n is a, c, g, or t
atggatgttgtttatttcttttgcgggcctaccgctattcggattccgtattatcactatgacaggaaattgtattgtctgctcatagctcagggagcgagctgggatgctttgcggcacgagtttgttatcaagtataattcgagtacagagcaatttaacaaactgagtagaggtcttccctctggtgttcccggcgtgtgggttaaggaaaattcagatgagataagaactaccggcttttttgggcggccctgggaggatgaggaagaggagaagccgcgcacttccgccaaagaagacgcgtcaaaagagcttagcttaattgagcggccattgcctgaaaaattaagcgaatactggcagaaaaaactcgaaaccgagcttcgctccagaaagtacagcccctgtactttgcgtagttacatttattacaaccgcctgctttgccgcacgcttcagaaaccccctgaagaaattcgcactgaagacgttaatgtatttcttgcggaattggacaaagaatactccgcttcgtcaatgaatcttgcgatcagcgcgattaagtttttttacaaagaggttttgaagaatgatattattggagagaagcatcgtccccgccatgacaaacgctttccaatggtgctttcgaagcaggaaattatcgaagttttgaagcaagagaaaaatcctaaacaccgtctgctgttgatgctggtgtattcatccggtttacgggtcagcgaagtagtcgccctcaaaagggagcatatcgatttgtcccgcaaggttatatatattaagcgcggcaaaggccgcaaagaccgctgcacgcttctgtccgaaaaggccgcccgttttctcaatgaatactatactttttatggaatacaaacctggctttttcccggccagcctaccaccagttcgctgacaatccgttccgcccagcacatctttgacaacgccgtccgtcgcgctgaaatctccagaaaactctcaattcacagcctccgccacacctttgccacccacctcctcgaaagtggtactgacatccgttacatctaa

SEQ ID NO: 61762 - protein, 357 aa, Unknown
  Obtained from environmental sample
  DOMAIN (122)...(195): Phage integrase, N-terminal SAM-like domain
  misc_feature (1)..(357): Xaa is any amino acid
MDVVYFFCGPTAIRIPYYHYDRKLYCLLIAQGASWDALRHEFVIKYNSSTEQFNKLSRGLPSGVPGVWVKENSDEIRTTGFFGRPWEDEEEEKPRTSAKEDASKELSLIERPLPEKLSEYWQKKLETELRSRKYSPCTLRSYIYYNRLLCRTLQKPPEEIRTEDVNVFLAELDKEYSASSMNLAISAIKFFYKEVLKNDIIGEKHRPRHDKRFPMVLSKQEIIEVLKQEKNPKHRLLLMLVYSSGLRVSEVVALKREHIDLSRKVIYIKRGKGRKDRCTLLSEKAARFLNEYYTFYGIQTWLFPGQPTTSSLTIRSAQHIFDNAVRRAEISRKLSIHSLRHTFATHLLESGTDIRYI

SEQ ID NO: 61763 - DNA, 1446 bp, Unknown
  Obtained from environmental sample
  misc_feature (1)..(1446): n is a, c, g, or t
atgaaacggctgccaacggtgcgcttcctcgccatcattatcggggggatgacttcgctgatgataccttcctttgtggcagctttaattttaagagaatatgatattgtcagggcatttcttatcccgctttcaataggattgatcctgactttgtccgctgttttatttattcgcaaagccccgttgcgccttaggcctcgggatgggtttctccttgtgtttctggtttgggttttttcaagtcttatcggaagcctgccttattatttttctaaattaggtatgtctgtttgcgattcaatttttgaaagtacctgcggctttgctaccaccggtgcgacgacattacctgacattgaagttatgccaaagcccctgcttctctggcggagcatgagccactggtcggggggcatggggataattctcctcacggtcgccctgatgccgcttttgggggtcggtggctttcagctcgtcaaggccgaagctccggggccggaaaaggacaagcttacccctcgcattaacaacgcagcgaaagtcctctggcttttctattgcgcttttaccgcgattctcgctgtgctttataaattgggaggcatggagtggtttgacgcggtttgccacagttttgcgataatggctacaggcggggttagtacaaaaaacgcaggcttcgctttttataactctgcatttatcgactgggttacggtgatttttatgatccttgcagctttgaatttcaatttatactaccgcattgtacataaaaaattttctgattttgcgcataacacagaaactaaagtatttttccttatctttattgttgccgctttggcggtaagccttagccttgttccccaatacggctcgtttgccgatgctctgcgcttcggttcttttcagaccgctgcctttttgactaccaccggaaacgccagagcggactatacggtttggcccagcctggcgcaggctgtccttttgtgccttatgtttatagggggttgctcaggttccaccgccggaggtataaaggttatacgacacacggtacttttcaaacaggcattgaacgagctcaggcgcattatttatccgcagggggtgtttagtatccagctcaaccaaaaagttggccgcaaggatgtggtttacggggtcgcgggttttgtttttctttactttttggttgtgggcattactgcccttgttactgcggcgggaggcttcgatattccttcgtcttttagcgccgcgctttccatgaccggcaacataggcattggttttggctcggcgggtccgttcaaaaattatagcatgtttccggattatctaaagctgttttattcgctggtgatgatcgcgggccgtctggaactctggactgttcttgttctgtttacacccgattactggaaaggttga

SEQ ID NO: 61764 - protein, 481 aa, Unknown
  Obtained from environmental sample
  SIGNAL (1)...(26)
  DOMAIN (152)...(479): Cation transport protein
  misc_feature (1)..(481): Xaa is any amino acid
MKRLPTVRFLAIIIGGMTSLMIPSFVAALILREYDIVRAFLIPLSIGLILTLSAVLFIRKAPLRLRPRDGFLLVFLVWVFSSLIGSLPYYFSKLGMSVCDSIFESTCGFATTGATTLPDIEVMPKPLLLWRSMSHWSGGMGIILLTVALMPLLGVGGFQLVKAEAPGPEKDKLTPRINNAAKVLWLFYCAFTAILAVLYKLGGMEWFDAVCHSFAIMATGGVSTKNAGFAFYNSAFIDWVTVIFMILAALNFNLYYRIVHKKFSDFAHNTETKVFFLIFIVAALAVSLSLVPQYGSFADALRFGSFQTAAFLTTTGNARADYTVWPSLAQAVLLCLMFIGGCSGSTAGGIKVIRHTVLFKQALNELRRIIYPQGVFSIQLNQKVGRKDVVYGVAGFVFLYFLVVGITALVTAAGGFDIPSSFSAALSMTGNIGIGFGSAGPFKNYSMFPDYLKLFYSLVMIAGRLELWTVLVLFTPDYWKG

SEQ ID NO: 61765 - DNA, 1404 bp, Unknown
  Obtained from environmental sample
  misc_feature (1)..(1404): n is a, c, g, or t
ttgcgaataattattgttggtgccggcaggacaggaacgcagctggccaagtacctgatacaggaaaagcacgatgtttctctgattgaatcaaacgaggaacgtgccaggcacgcttccaaccggttggattgccttgttctccacgatgagggtaacagcctttccaccctggaagaggcgggggtcaaaaaagctgacgctctggtctgcgttaccgattcggatgaagtaaacatgctcatctgtggtcttgcggcttcacggcatcctgagatgctaaaaatagcccgcgtaagaaacgatgagtatgtcagactcaaccaaaatactatgcagcaacccgctattctgggcattgactgctttgttcaccctgacgtggaagctgcccgtgcgattttaagggctatctcccacggagctcttggaaacattcttagcttcgcgggtacatcttacgagctgggttccattaacatagcggagggaagcgtttttgacgggctctgcctcaaggattaccgttccattatcaaggaagacagtcttgtaacactgctggaaagggaaagcgatttttcgcgggaatgtatactgcctgaaggatctactgtaataaaaaaaggggaccggattcatattctggctaatgaagagaaaatagagcaaattttccagcttgcggggagccatgaaaaaccactgcaccgaattgggattgtcggcggtgggcgtatctgttccctcattgccgaaagtgttttaaaaaataatgatgatgatgttcaggcatctgaacatgtggaagaaaagcataatcttttttctattttccattcatttgttccaaagagtagccgccgtgtggtgattgttgagcaggattataacgcatgcaaagagatgtccgcccgtttccctgaagcccttgttttaaatgaggatatttccgatgaaaattttgttgctgaagaacgccttggcaacctcgacctaattatttccacaacggcagatcaggaattgaatattgtcagcgccatttttttaaagtaccgcggagtaaggagggctattgccatagtaggtggtcccagccatgaagtcattgcccgccagcttggcgtggatgtcgcgatttcgatggagtccgtggtggtgaattcaattctttccaatttaatgggaaaggggatgaaggaggttcaacgttttggggatggcaccctggagattcttgaaacggcgattggcgacgattctcctgcgctggagaaatctattgtcgattttaagcttgccgatggcgggttaatcattttggtcaaccgtggggaggcttcttttattccccgtggagattatgttttaaaaaaggcgataaggttatttttattgtaa

SEQ ID NO: 61766 - protein, 467 aa, Unknown
  Obtained from environmental sample
  DOMAIN (156)...(230): TrkA-C domain
  misc_feature (1)..(467): Xaa is any amino acid
MRIIIVGAGRTGTQLAKYLIQEKHDVSLIESNEERARHASNRLDCLVLHDEGNSLSTLEEAGVKKADALVCVTDSDEVNMLICGLAASRHPEMLKIARVRNDEYVRLNQNTMQQPAILGIDCFVHPDVEAARAILRAISHGALGNILSFAGTSYELGSINIAEGSVFDGLCLKDYRSIIKEDSLVTLLERESDFSRECILPEGSTVIKKGDRIHILANEEKIEQIFQLAGSHEKPLHRIGIVGGGRICSLIAESVLKNNDDDVQASEHVEEKHNLFSIFHSFVPKSSRRVVIVEQDYNACKEMSARFPEALVLNEDISDENFVAEERLGNLDLIISTTADQELNIVSAIFLKYRGVRRAIAIVGGPSHEVIARQLGVDVAISMESVVVNSILSNLMGKGMKEVQRFGDGTLEILETAIGDDSPALEKSIVDFKLADGGLIILVNRGEASFIPRGDYVLKKAIRLFLL

SEQ ID NO: 61767 - DNA, 1281 bp, Unknown
  Obtained from environmental sample
  misc_feature (1)..(1281): n is a, c, g, or t
ttgttcggattcgatttccaaaaccgcgataattccctcttgcgcgattttgttttgtatttcttcgggcatagccaatttcatattatttatctccctgtatcagtcttaacattcgttattatatatgatatttttaaaaaatacatgtggcgagtacaactccataaaattaattacgatgaaagagagtatcaggctgttaaagaggtgcttgattccggctggttaagtatcagcgagaaaactcatttctttgaatccaaattttccgaatttttgggtcacgatacaaaatgccttgccctttcaaattgtaccgccgctctgcacatggcgcttcttgccctcgatataaaagaaggcgatgaaataatcaccccttctttaacctttatcgccgatcaaaatgttacccaaatgacgggcgcaaaaaacgtactcgctgatatttcgtcaatggaagactggtcggtcgatcctgacgacatttcagcgaagattacaccgaaaacaaaagcggtgatgatagtccactacgccggttttgcctgcgatatggagcgaataaccgccctgtgcaaaaaacacggactgccgcttattgaagactgcgcccactcaccgggagccgattacaaaggacagccccttgggactttcggcgatattgccgctttcagtttttttgccaataaaaacatagcgattggcgaaggcggcatggttgttacgcgcaatgcggacttgtatgaaaaactgcgtcttttgcgctctcacggaatgtccgtcgcctcgtttgaccgctacaagggcagagcaatctcctacgacgtacaatcgcccggactgaattaccgtattcacgaaataagttccgcccttggacttgtccaacttgaaaaacttgcggacgcaaatgaaaaaagaaaaaaactcgtggaacactactatagccgtcttgataaaatcccgtccgtctcaatccctttcaagaatttttcgcgcggaaagccaaactaccacataatgccgattttgctttcagaaaaaacagacagggcggcggttatagaatcgatgaaacaggacggagttcaaacaagcatacattaccccgcaattcagaatttcagcgcatacaagaacaaagtaaactccacgccgaaagccgaatatgtctgcgcccacgaattgactttgcctttgtatccgactatgacgacggaagaggttgatattgtgtgcgatgcgctggttagcgggattgaaaaaaaatga

SEQ ID NO: 61768 - protein, 426 aa, Unknown
  Obtained from environmental sample
  DOMAIN (73)...(322): Cys/Met metabolism PLP-dependent enzyme
  misc_feature (1)..(426): Xaa is any amino acid
MFGFDFQNRDNSLLRDFVLYFFGHSQFHIIYLPVSVLTFVIIYDIFKKYMWRVQLHKINYDEREYQAVKEVLDSGWLSISEKTHFFESKFSEFLGHDTKCLALSNCTAALHMALLALDIKEGDEIITPSLTFIADQNVTQMTGAKNVLADISSMEDWSVDPDDISAKITPKTKAVMIVHYAGFACDMERITALCKKHGLPLIEDCAHSPGADYKGQPLGTFGDIAAFSFFANKNIAIGEGGMVVTRNADLYEKLRLLRSHGMSVASFDRYKGRAISYDVQSPGLNYRIHEISSALGLVQLEKLADANEKRKKLVEHYYSRLDKIPSVSIPFKNFSRGKPNYHIMPILLSEKTDRAAVIESMKQDGVQTSIHYPAIQNFSAYKNKVNSTPKAEYVCAHELTLPLYPTMTTEEVDIVCDALVSGIEKK

SEQ ID NO: 61769 - DNA, 675 bp, Unknown
  Obtained from environmental sample
  misc_feature (1)..(675): n is a, c, g, or t
atgaaattggctatgcccgaagaaatacaaaacaaaatcgcgcaagagggaattatcgcggttttggaaatcgaatccgaacaaaacgccgtaccgctggcaaaggcgcttcttgaaggaggaattaccgttatcgagcttgccctgcgcacacccgcggctatcccctcaatttcgctgattgctaaagaagttccgcaaatgtttatcggggtcggcactattatcgaggcgggacaggcggcggcggtgcaaaaaaagccgggcgtacatttcggcgtttctccgggaattaatcctgaaattgtcaaggaagctgcgaaagcaaaacttccctttgcgcccggaattgccacaccaagcgaattggaacaggcaatttccctcggatgccgtgtcgtcaaatttttccccgcggagggcatgggcggtttgagttatttaaaaaatattaacgctccatacaaccatttggggattaagtacattcctctgggtggcgtatctgtaaacaatctcaccgattacgcaaagttcagccctgtgcttgccgtcggcggcagttggatagcgagcaaagaactgataaaagcgcaggattgggatgaaattaccgaaagagcgtgtgaagcaaaagagatttggaaaaccgcgcgctcaggggtggttggctaa

SEQ ID NO: 61770 - protein, 224 aa, Unknown
  Obtained from environmental sample
  DOMAIN (9)...(207): KDPG and KHG aldolase
  misc_feature (1)..(224): Xaa is any amino acid
MKLAMPEEIQNKIAQEGIIAVLEIESEQNAVPLAKALLEGGITVIELALRTPAAIPSISLIAKEVPQMFIGVGTIIEAGQAAAVQKKPGVHFGVSPGINPEIVKEAAKAKLPFAPGIATPSELEQAISLGCRVVKFFPAEGMGGLSYLKNINAPYNHLGIKYIPLGGVSVNNLTDYAKFSPVLAVGGSWIASKELIKAQDWDEITERACEAKEIWKTARSGVVG

SEQ ID NO: 61771 - DNA, 624 bp, Unknown
  Obtained from environmental sample
  misc_feature (1)..(624): n is a, c, g, or t
gtgaaaaacacaatgaaacatctgggtagaatttttgtcaacggcatttttcaggagaatcccctgctaatattgatgatagggctttgttcttcccttgcggttactacggaagtcgcgaacgggattggcatggggctttcgatgacctttgtgctgcttatgtcggaagtggtcatcagcgttttcaggaaactgattccggattcaatccgcatcccgatttttattattgttatcgcggcatttacaacggttattgattatgtacttaaagcgtggttccccgatctttccaaagcgatgggggtgttcatcccgcttattgtggtcaattgcatcatcatggggcgggtagagggctttgcgtccaaagcaccgctccctgacgccattgccgattcctttggcatggggctgggctacacctgggtactccttggcatttcctttattcgcgagctgcttggttcaggcacaattctcggtgcccaggttctgcccgacagttatgtgcctatcctcttttttattatgcccccgggggggtttttggtgtttgccttgtttatcagccttaacctctttattaagtcaaagctaaagggtgaagggggcgtataa

SEQ ID NO: 61772 - protein, 207 aa, Unknown
  Obtained from environmental sample
  DOMAIN (5)...(192): Rnf-Nqr subunit, membrane protein
  misc_feature (1)..(207): Xaa is any amino acid
MKNTMKHLGRIFVNGIFQENPLLILMIGLCSSLAVTTEVANGIGMGLSMTFVLLMSEVVISVFRKLIPDSIRIPIFIIVIAAFTTVIDYVLKAWFPDLSKAMGVFIPLIVVNCIIMGRVEGFASKAPLPDAIADSFGMGLGYTWVLLGISFIRELLGSGTILGAQVLPDSYVPILFFIMPPGGFLVFALFISLNLFIKSKLKGEGGV

SEQ ID NO: 61773 - DNA, 597 bp, Unknown
  Obtained from environmental sample
  misc_feature (1)..(597): n is a, c, g, or t
atgaaccttttcaaaatattcatcagcgcttttttaattgacaacgtggttttgatgcgctttatcgccctttgcccctttatcgggatgagtaccgacgaggacaaatcagtcggcatggggcttgccgttgtgtttgtgacggtaatagccacggccgtaacctggccgatttacaagttcatccttgaaccgctgggactggtattccttcaattactggtttttatattggtaatcgcctcgctcgttcagcttgttgagtattttctcaaaaaatccatacccggcctgtacaagggcatggggatttatctcgccctgattacgactaactgcggcattctcgcggttaccctggacgttataaacaatacctgcgtttttaccggcaaaccctataccttcatcgagtccattgtttacgccatcggcgtagcccttggttttctgctttccatgctgttattggcgggaataaggaaccggatcaggacgagccctgttccggcctttcttaaaggtacgcccgtgctttttgtggccacggcgcttctttccatcgcctttatgggctttaaggggctggtgcaataa

SEQ ID NO: 61774 - protein, 198 aa, Unknown
  Obtained from environmental sample
  DOMAIN (2)...(198): Rnf-Nqr subunit, membrane protein
  misc_feature (1)..(198): Xaa is any amino acid
MNLFKIFISAFLIDNVVLMRFIALCPFIGMSTDEDKSVGMGLAVVFVTVIATAVTWPIYKFILEPLGLVFLQLLVFILVIASLVQLVEYFLKKSIPGLYKGMGIYLALITTNCGILAVTLDVINNTCVFTGKPYTFIESIVYAIGVALGFLLSMLLLAGIRNRIRTSPVPAFLKGTPVLFVATALLSIAFMGFKGLVQ

SEQ ID NO: 61775 - DNA, 864 bp, Unknown
  Obtained from environmental sample
  misc_feature (1)..(864): n is a, c, g, or t
atgcccgaaacaaatgtaaaaatgccggaagcccatcatactgacgcggcaagccgtcttggaaccgaacctataagcaggcttctgctcaaattctcaatccccgccataacggggatgttgctcaatgcgctttacaacgtggttgaccgtatctttgtcgggcagggggtgaatgaaatagccctgggcggcctttcgctggtgcttccgctgatgactatttcgctcgccttcgcgatgcttttcggcataggcactgcgaatatgatctccatgcgcctcgggcagggcagaaagaaggaagcggaaaacgccctgaaccactgctttttcctgcttttgggtatcgggctgttgatgtcggctgccggtttgatttttctggagcctatcctctcccttttgggggcgcaggaaggaagcgagtccatacattacgcccgcgactacttaaggattattttattcgggacgactttttccatggtaggcttcggcctttcccactgcaccagggcgcagggttttccggccattaccatgatcgccatgatcctgggcgcgggtttgaatatagtccttgacccgattttcatttttattttcaaatggggcgtccagggcgcggcgtgggcgactatcatatcgcaggccgcttcaatgatatggatactgagtttcagcctggggaagaaagctgtggttaaactaagcccaggacattcaaaccttcgtttaccattgtttttcagattatgtctttcggctcggcccagttcctgctccagtttatcatgtcgggagtgcagcttctgtacaataccagtatgggatggtatggcgcgtccgcgctgggcgtag

SEQ ID NO: 61776 - protein, 287 aa, Unknown
  Obtained from environmental sample
  DOMAIN (35)...(198): MatE
  misc_feature (1)..(287): Xaa is any amino acid
MPETNVKMPEAHHTDAASRLGTEPISRLLLKFSIPAITGMLLNALYNVVDRIFVGQGVNEIALGGLSLVLPLMTISLAFAMLFGIGTANMISMRLGQGRKKEAENALNHCFFLLLGIGLLMSAAGLIFLEPILSLLGAQEGSESIHYARDYLRIILFGTTFSMVGFGLSHCTRAQGFPAITMIAMILGAGLNIVLDPIFIFIFKWGVQGAAWATIISQAASMIWILSFSLGKKAVVKLSPGHSNLRLPLFFRLCLSARPSSCSSLSCRECSFCTIPVWDGMARPRWA

SEQ ID NO: 61777 - DNA, 675 bp, Unknown
  Obtained from environmental sample
  misc_feature (1)..(675): n is a, c, g, or t
atgtctttcggctcggcccagttcctgctccagtttatcatgtcgggagtgcagcttctgtacaataccagtatgggatggtatggcgcgtccgcgctgggcgtagcgaacggcggcgatatcgccctctccggaatgaacatcggtggggccattttcatgcttatactcatgccgatattcgggatcaaccagggagcgcagcccatactgggttacaattacggggcgaaacaatttaaccgcgtgctacgcgcctaccttggggctgtcgttgccgctactttgatatgtacaacagggtttgccgttgtccaactgttctccgcgcagttggtcagggtcttcgcgccgaagggaagcggcgagctgatgcaatttgccccgcgagccatgcggactatgatgctccttttgcctacggccggatttcaggtaatttcaacaaatctttttgtggtgacaggccgtccaaaaatttcgatattcctctccatgctgcgccagtgcctggcccttattccctgtatactgatattcggccgtatttggggcttgtggggagtggtcaccgccgcgcccgtggccgacggtttctcgttattcgtcaccggcactatgatattttttgagcttcgaaaattgcgcggtgccaccacaggcggcggaggatga

SEQ ID NO: 61778 - protein, 224 aa, Unknown
  Obtained from environmental sample
  DOMAIN (6)...(178): MatE
  misc_feature (1)..(224): Xaa is any amino acid
MSFGSAQFLLQFIMSGVQLLYNTSMGWYGASALGVANGGDIALSGMNIGGAIFMLILMPIFGINQGAQPILGYNYGAKQFNRVLRAYLGAVVAATLICTTGFAVVQLFSAQLVRVFAPKGSGELMQFAPRAMRTMMLLLPTAGFQVISTNLFVVTGRPKISIFLSMLRQCLALIPCILIFGRIWGLWGVVTAAPVADGFSLFVTGTMIFFELRKLRGATTGGGG

SEQ ID NO: 61779 - DNA, 1950 bp, Unknown
  Obtained from environmental sample
  misc_feature (1)..(1950): n is a, c, g, or t
atgtcggcaatttatgaacttttcaaaaaaattaaaatggggcgttctctatttttacagttgctctttgttgcgctggcatttatcctaatgattttatcaagcagtctctatgtcaataaaatgctgcaaaagcaaataaacagagacgccctagatatgcttacccaaaccaaacttaaaattgaagccgaactatccgtaaataaaaatactctggcggtaatctcggaaaccatacgtgaaatgattatacgaggctataatgagcaagtaatactgaactatatgcgggagatcgttaatgaagtacatcaaaaaaacagcaaaataatatttaatgacttttccggttatttttatgtattcaaaggaaaatacctttccgcttttgacagagaaataccgaacgactataatcctacggaacaactgtggtataaaactgcggtttcagcgggcaataaaatagctattatgccgacatatccgaatccgcagacaaaagaacaaagtgttgattatatatgccggatttttgatgaaaaaggcgttccgttagccgcattacgcatgaatataccttttgacaacattaaaaattttgtaaccagtatgcacattacaaaaaacagttacggtatttttatggatgaaaatgtgaatgtattttattacccggagtcggatatcataggcaaaaacgccaaggaaataaaaggcgggttttcgctgtttgcggatgaagttttgatgggaatcgacatttctgaacgcgaagctataaattataaagatgaattaatgattttctttacatctcggcttgaaaacggatgggttttatgctttacgatacccaaagccgagtattacagcgaattacacacgatgacgctgatgcttatcgttcttggtacaattctggcggcgattttgattatcattttaatacgcgttgataaaacgaaaaacaaactggatgatgaaaaccggcacaagaatacattgctggcaaccatagaagcggaacgagaggcggataaagttacacagcttatgcttgacgctatgcctctatgttgtatgttatgggacgagaattgcaatcttatatcatgcaataaagaagcgataagactgtttcagttatcaagcaaacaggaatttatagacagattttacgaactttctcccgaataccaacccaacggaaggttaaccaaagagttggcggatgagtatatcaaaaaaacgtttgaaataggacatctgcgttttgagtggacgcaccaatctttgacctgcgaacccattccggtggatatgactctggtacgcataaaacaccgggaaaaatacatcgtcgcgggatacgcaaaagatttaagaaaagataacgcaatgtttgatgaaatgcaaaaagcgcaagatgatttgcgcgaagcgcgtgacgcctcggaagccgctaatcacgccaaaacggttttccttgccaacatgagccatgaaatacgaacgcccatgaacagcatcatcggattctccgaactggcaatggacgacgatatagcgcccaacacaagagaatacctttataaaatcatggaaagcgcggaagggcttttacagattatcaatgacattcttgacatatccaaagttgaatcggggaaaatggaacttgagcatatcccgtttgacctgcacgagatacttggctactgccagacggttatcgtttccaaagccgtagaaaaaggcattcatgtatatttctacgccgagccttcaatcgagaaaaaactgctgggagacccgacaagactgcgcccagtattgattaatctgcttaccaacgctgtaaagttcaccaacactggaaacgtcaaactttcatcgactgtcaaagatcgaccgaggacagcgttactttatattttgaaataa

SEQ ID NO: 61780 - protein, 649 aa, Unknown
  Obtained from environmental sample
  DOMAIN (493)...(558): His Kinase A (phosphoacceptor) domain
  misc_feature (1)..(649): Xaa is any amino acid
MSAIYELFKKIKMGRSLFLQLLFVALAFILMILSSSLYVNKMLQKQINRDALDMLTQTKLKIEAELSVNKNTLAVISETIREMIIRGYNEQVILNYMREIVNEVHQKNSKIIFNDFSGYFYVFKGKYLSAFDREIPNDYNPTEQLWYKTAVSAGNKIAIMPTYPNPQTKEQSVDYICRIFDEKGVPLAALRMNIPFDNIKNFVTSMHITKNSYGIFMDENVNVFYYPESDIIGKNAKEIKGGFSLFADEVLMGIDISEREAINYKDELMIFFTSRLENGWVLCFTIPKAEYYSELHTMTLMLIVLGTILAAILIIILIRVDKTKNKLDDENRHKNTLLATIEAEREADKVTQLMLDAMPLCCMLWDENCNLISCNKEAIRLFQLSSKQEFIDRFYELSPEYQPNGRLTKELADEYIKKTFEIGHLRFEWTHQSLTCEPIPVDMTLVRIKHREKYIVAGYAKDLRKDNAMFDEMQKAQDDLREARDASEAANHAKTVFLANMSHEIRTPMNSIIGFSELAMDDDIAPNTREYLYKIMESAEGLLQIINDILDISKVESGKMELEHIPFDLHEILGYCQTVIVSKAVEKGIHVYFYAEPSIEKKLLGDPTRLRPVLINLLTNAVKFTNTGNVKLSSTVKDRPRTALLYILK

SEQ ID NO: 61781 - DNA, 1944 bp, Unknown
  Obtained from environmental sample
  misc_feature (1)..(1944): n is a, c, g, or t
ttgttctgcgagatgacaaaacttttaggtataagcgaggtggaaacaaatgcggcgtttgatacggcatgggcaaaacagaaaagttattttgaagccgcggaaaaaatgggtcttcaagcgctggaagacgcgcgtaagtcggatcggcccgttatcgcggtgttaggcaggccgtacaacgccttcacgcctgaagcgaatatgggtattccgcgcaagtttacaacacgcggctattcaatcgttccgtttgacatcttgcctttccgcgacgaagttatctttccgaatatgtactggttctacggacagcaggatttaaaagcgacaaaacttcttaaaaaagaagataatatttaccttacgtttgtttcaaatttttcatgcgctcccgattcatttattctccattatgtgaagtggatgatgggacaaaaaccgttcctcgtgcttgagttggattcccattccgccgacgcgggcatagatacgcgcgttgaggcgttcctcgatataattgacggttaccgcgcgaagagaaatcaatttgaagaagaacgctatgacaacggaatgagatttgtctgcgaaaaaatgaattcaggcgaatacgatttacgcatagacaatataaaaacaggagaaaagattccggttgtaaacaataagagagtaaaagtgctcctgtccaacatggggaatatttctaccgagtacatgggggccgcgatacgcggtttgggcattaatgccgaggcgatgcccgtcgctaccgcgaagacgattcaggcggcacgcgcccacgcgtcggggaaggaatgcgtgccaagccatttggtcctgggaagcgcgctggaatttttcttcagcgacaaataccgtaaggacgaactttatcttctttttgtgccgattacgaccggtccttgccgtacgggccagtattatatcttctacgaaaaccttttccgcgatttacgccttgaaaacgtagtggtctttatcctttccgctgataattcgtacacggagcttggtccgagtttcgccaaagaaatgtggaaaggaatagtgttatccgactatttaaaagacattcaatgttccctattggcggcggctgttgatcccgtaaaagcggagaaagattttgaacattcatggcgcaaagttatgcacgccgtagaacacaaccccanagcgctgtggaaagaattaaaacatgtcgcaacggatgtaaaaaagataccgctaaaacgaaaaataacggattgtccgcgcgtattaattgtaggcgagatttatgtgcgccgcgacgatttcgccgtgggcgaattaatcgaacttatgagcgagaggggcattgttgtaaaagtagcgggcataagcgagtggattcactaccttgattttgtccgtgagtacgctcttaaaaaacttattaaactgcaaaaaccgggtacaagacttttctccaaaccttctaaagaccttaaaaaacttcagattgaagaatggtggaaacatcatatcgagaaaaaagtcctcgctattttggagccgacaggtttaattcccgaaactccgcacgatatgcgccatataatgaagtacacgcaggagcattttgtcaaccttgaactcaattcggaaatcgccgtttcttccggttccgcggcggcggcgatggacgaaggatactcaggtatcgtgaacataagtccgtttgcctgtcttatcgggcgtgtaattgaggggctgttcactccgtgggcgagagaacgcaactacccgatactttccgtggaagtggacggcaaccttctgccgccgaatatcgtcaacaagttaaatattttcatggttaacgtattgcgattcaaaggcggcaatgatctttcaacgttagttgacaaagcggggaatggagagtctgcgtga

SEQ ID NO: 61782 - protein, 647 aa, Unknown
  Obtained from environmental sample
  misc_feature (1)..(647): Xaa is any amino acid
MFCEMTKLLGISEVETNAAFDTAWAKQKSYFEAAEKMGLQALEDARKSDRPVIAVLGRPYNAFTPEANMGIPRKFTTRGYSIVPFDILPFRDEVIFPNMYWFYGQQDLKATKLLKKEDNIYLTFVSNFSCAPDSFILHYVKWMMGQKPFLVLELDSHSADAGIDTRVEAFLDIIDGYRAKRNQFEEERYDNGMRFVCEKMNSGEYDLRIDNIKTGEKIPVVNNKRVKVLLSNMGNISTEYMGAAIRGLGINAEAMPVATAKTIQAARAHASGKECVPSHLVLGSALEFFFSDKYRKDELYLLFVPITTGPCRTGQYYIFYENLFRDLRLENVVVFILSADNSYTELGPSFAKEMWKGIVLSDYLKDIQCSLLAAAVDPVKAEKDFEHSWRKVMHAVEHNPXALWKELKHVATDVKKIPLKRKITDCPRVLIVGEIYVRRDDFAVGELIELMSERGIVVKVAGISEWIHYLDFVREYALKKLIKLQKPGTRLFSKPSKDLKKLQIEEWWKHHIEKKVLAILEPTGLIPETPHDMRHIMKYTQEHFVNLELNSEIAVSSGSAAAAMDEGYSGIVNISPFACLIGRVIEGLFTPWARERNYPILSVEVDGNLLPPNIVNKLNIFMVNVLRFKGGNDLSTLVDKAGNGESA

SEQ ID NO: 61783 - DNA, 1329 bp, Unknown
  Obtained from environmental sample
  misc_feature (1)..(1329): n is a, c, g, or t
ttggttgttatttttcagaggcttcttaccgaggatatgcttgccgggaagaaggcgatcatcatggcgcctaccagggagcttgcggttcagattgaagaagaggcaaaactaatcggcaaatacctgcctgtaaaaatcgggagtttttacggcggggtggggtatacccagcagacggctatgctcaaggacaatgtgcagatcatggttggcactcctggtcgcgtgcttgatctgaatcagagtgggcagatgaacctaatggacattgcgttcctgattctggacgaagcggatcggatgttcgatatggggttttacccagaccttagaaagctcatccgcagggttcccccggcggacaggcgtcaaacaatgctgttcagcgcgaccctcaatgcctgggtgaaaaacctcgcatgggaatacaccaggaaccctttcgagatcgccatcgagccggagacggtaacagtggaggaagttgagcagattctttaccatgtttcttctaatgacaagatgaagcttcttctgggaatcttaaaaaacgaggatcctgagagcgctgttattttctgcaatacaaagcgttacgcggagattgtggcaaagcgtctaaggctaaacggatttgattgtgagtttattatgggggatctgcctcagaaaaagcgcttaaaaataattgacgatataaaagcgggaaagcttcacctgcttgtcgctactgatgttgcggctcgcggcctggacatcgaaggcctcgcaatggtggtgaactatgatcttccgaatgaaacagaaaattacgttcaccgtataggccgtactgccagggcgggaaaaaccggtaaagccgtaacccttgccagtgagcaggacgtttacgcgctgccggggattgagcgttacataggccggaaaatcccttccgagaccgttgcatcggaactttttgccgaagacaaaagcgaaggcaagcacatccacacggagttttacgaagagcgtggcagtcatagaaccgaaggtcatagaaccgaaggtaggactggcgatcattcgcggcgcaaggctggcggaggcaaaaatgccggaggtataaatgccaacagcaaaaagcatgacgcaagccaccatgtcaggaaagatcatcacagccccatggaacaaaaacggggtgaaaagaaaaacaggactgatttcccaaaaggcataaagctttcggaactttcacttgaagaacgaatggcttattacaagcagaagtatgacaagagcgtaaaaaaaccgatgctcgggcaccgagcctgctggtattga

SEQ ID NO: 61784 - protein, 442 aa, Unknown
  Obtained from environmental sample
  DOMAIN (207)...(283): Helicase conserved C-terminal domain
  misc_feature (1)..(442): Xaa is any amino acid
MVVIFQRLLTEDMLAGKKAIIMAPTRELAVQIEEEAKLIGKYLPVKIGSFYGGVGYTQQTAMLKDNVQIMVGTPGRVLDLNQSGQMNLMDIAFLILDEADRMFDMGFYPDLRKLIRRVPPADRRQTMLFSATLNAWVKNLAWEYTRNPFEIAIEPETVTVEEVEQILYHVSSNDKMKLLLGILKNEDPESAVIFCNTKRYAEIVAKRLRLNGFDCEFIMGDLPQKKRLKIIDDIKAGKLHLLVATDVAARGLDIEGLAMVVNYDLPNETENYVHRIGRTARAGKTGKAVTLASEQDVYALPGIERYIGRKIPSETVASELFAEDKSEGKHIHTEFYEERGSHRTEGHRTEGRTGDHSRRKAGGGKNAGGINANSKKHDASHHVRKDHHSPMEQKRGEKKNRTDFPKGIKLSELSLEERMAYYKQKYDKSVKKPMLGHRACWY

SEQ ID NO: 61785 - DNA, 1653 bp, Unknown
  Obtained from environmental sample
  misc_feature (1)..(1653): n is a, c, g, or t
atgataaccgttcaggatctcagccttggttttggggggcgaaaccttttcaaagatgtaaatttgaaattcacccccggcaactgttacggaattatcggcgctaacggcgcgggcaagtccactttcctgaaaatcctcgctggagaaacggagcatgacaaaggcgaggtttccataagcaaaggggaaaggattgccgtgctaaggcaggaccattttgcttttgacagcaactcagtgcttgaaactgtggtaatgggtttcgacaggctttacaagattcaaaaagaaagggaagagatttacgccaaggaagatttttcggaagcggacgggctcagggcaagcgagcttgaagcggacttcgctgaacttggcggttgggaggcggaagcccaggcggggcagctcctttctggcctgggcattgacgaagcggatcatggaaagctcatggcggagcttgacgaaaaccgcaaggtgcgcgtgcttttggcgcaggctcttttcggcaatcctgaaatactgcttttggacgagccgacgaacggcctcgatcttgaatcgatctcctggcttgaagattttctgatggactttccaaatacagtaattgtggtttcacacgaccgccattttcttaattcggtttgcacccatatttgcgatattgattttgggcggattaccctttattcggggaattacgatttctggtaccagatgagccagatgctccaaaggcaggcaagggatcagcaaaagaaaaacgaagagaaggcaagagagcttagggagtttatccagcgctttgccagcaacgccagcaagagcagacaggccacgagccgtaaaaaagttctggaaaagctcgatctggaaaatgtgcatgtcacaagccggaaattcccttacgcgggttttaagccaggcagggaaataggcaacaacgtgcttcgagtcgaaaaactctgctacaattttgaaggcactcaggttctgaaagacttcagcctgactgtaggccgaaaagacaaaatcgcttttgtgggaatcgagcatgtttcaaagtccgctgtttttgatattatcgccggtgcaaaaaaagccgattcgggggattgctactggggccaaactataagtttttcctactttccaaaagagaactcctcattttttgattccactctttcgataaccgactggctaaggcggttctcccaggacgaggacgaaacgtacatccgcagctttcttgggcgtatgctgttttctggtgacgaggcgctaaagccggtcaacgtcctttcaggcggcgagaaagtccgctgcatgctggccaaaatgatgctttcaggcgcgaacgtgcttatccttgacgagccgaccaaccacctggatctcgaagccatcaccgcccttaaccaggggctggaagcgttccccggcgtgatcctctttaactcccacgatcacgagtttatcaattctatcgcgaaccggatcgtcgaaataatccccggaagcgagaacacccccggcgcgatcatagatcggatgatgctattcgatgattatctgaaagatgattcagtaaaacagatgcgcgctgccgcctatcaccatgtggaaaggttaagaatttag

SEQ ID NO: 61786 - protein, 550 aa, Unknown
  Obtained from environmental sample
  DOMAIN (345)...(510): ABC transporter
  misc_feature (1)..(550): Xaa is any amino acid
MITVQDLSLGFGGRNLFKDVNLKFTPGNCYGIIGANGAGKSTFLKILAGETEHDKGEVSISKGERIAVLRQDHFAFDSNSVLETVVMGFDRLYKIQKEREEIYAKEDFSEADGLRASELEADFAELGGWEAEAQAGQLLSGLGIDEADHGKLMAELDENRKVRVLLAQALFGNPEILLLDEPTNGLDLESISWLEDFLMDFPNTVIVVSHDRHFLNSVCTHICDIDFGRITLYSGNYDFWYQMSQMLQRQARDQQKKNEEKARELREFIQRFASNASKSRQATSRKKVLEKLDLENVHVTSRKFPYAGFKPGREIGNNVLRVEKLCYNFEGTQVLKDFSLTVGRKDKIAFVGIEHVSKSAVFDIIAGAKKADSGDCYWGQTISFSYFPKENSSFFDSTLSITDWLRRFSQDEDETYIRSFLGRMLFSGDEALKPVNVLSGGEKVRCMLAKMMLSGANVLILDEPTNHLDLEAITALNQGLEAFPGVILFNSHDHEFINSIANRIVEIIPGSENTPGAIIDRMMLFDDYLKDDSVKQMRAAAYHHVERLRI

SEQ ID NO: 61787 - DNA, 1062 bp, Unknown
  Obtained from environmental sample
  misc_feature (1)..(1062): n is a, c, g, or t
atgaaagatgttttcattaaaatcggagttcctcctgaggacgctgcgatttgcgccgatgtgctgatcgagtccgacaaaaggggtattgattcgcacgggataggccgattcaagcctatatatatcgaccgcattaaagacggaatccaaaaccccgttaccaattttgaagttgtcaaggatcatctggctaccgctgtagttgacggtcatgacggaatgggtcaggtgattgcgaaaagatcgatgcaaatggccattgacaaagcaagacagcacggcctgggtatggttgttgtgcggaattccacccactacggcatcgccggatattacgtcggcatggcggcaaaagccgggatgatcggtatcaccggcacaaatgcgcggccttccatcgcgcctacctttgggatcgaaaatatgctggggacaaatcctttaactgtaggaatgccgaccgacgaggattttccttttatgctggactgtgccacttcggtttcgcagcggggaaaaatcgagcattaccaaaggataggaaaggctatgccttccggctgggttattaaccgggacggcagcacggagacggatcctgcgaaggcccttgaagggctgacaaaaggtacttccgcccttacgcctctgggcggccttggggaagatactgccggctacaaggggtatggttacgcgactgtagtggagatactttcagccgcgttacagcaggggcagttcctgaaatccctgaatggcattgaccccaacggcaaaaaaattcccttccatcttgggcatttttttattgctatcgacataagcgcctttgtggaattggataacttcaaaaagacaaccggcgacatactgcgtgagctgcgctcttcggctaaagctcccggccaggagaggatatttaccgctggtgaaaaggaatacctggcctggatttccaggaaggaaaccggcgttcccctgaacgacagtttaaagaagaccatcaaagccctgaaagaggaatacaggctggactcatacgaatttaatttttag

SEQ ID NO: 61788 - protein, 353 aa, Unknown
  Obtained from environmental sample
  DOMAIN (1)...(340): Malate/L-lactate dehydrogenase
  misc_feature (1)..(353): Xaa is any amino acid
MKDVFIKIGVPPEDAAICADVLIESDKRGIDSHGIGRFKPIYIDRIKDGIQNPVTNFEVVKDHLATAVVDGHDGMGQVIAKRSMQMAIDKARQHGLGMVVVRNSTHYGIAGYYVGMAAKAGMIGITGTNARPSIAPTFGIENMLGTNPLTVGMPTDEDFPFMLDCATSVSQRGKIEHYQRIGKAMPSGWVINRDGSTETDPAKALEGLTKGTSALTPLGGLGEDTAGYKGYGYATVVEILSAALQQGQFLKSLNGIDPNGKKIPFHLGHFFIAIDISAFVELDNFKKTTGDILRELRSSAKAPGQERIFTAGEKEYLAWISRKETGVPLNDSLKKTIKALKEEYRLDSYEFNF

SEQ ID NO: 61789 - DNA, 528 bp, Unknown
  Obtained from environmental sample
  misc_feature (1)..(528): n is a, c, g, or t
atgctaacgagaatagggcagatagccaatgtattcaggcttagaaatgtatttttcaaacacagcggactggaagatataactacaaagatagtggattccgttttggaattgcaaagaaaaggctacggagcattgattgtgctggaaaaaagggttggtttaaaatcttatattgattcgggagaactgataaatggcgatttttccaaaaaacttttatgtaccattttttatcccggaaccgctttgcacgatggcgcggtgatagttttgggaaataaaattatagcagcaggttgtgtgctacctatgccaaccggaaccgccgccgccgagcaatcaggcggaatgcggcacagggcagcaaaagccctagctctggaaacagatgcttttgtgatagttgtgtctgaggaaacgggctacatctcaatagcttaccgcgatagcttccgcacaaggcagagcaaaagagaattggaagaagaaataaaacgccattggaaagaactttatgaagactga

SEQ ID NO: 61790 - protein, 175 aa, Unknown
  Obtained from environmental sample
  DOMAIN (31)...(153): Domain of unknown function DUF147
  misc_feature (1)..(175): Xaa is any amino acid
MLTRIGQIANVFRLRNVFFKHSGLEDITTKIVDSVLELQRKGYGALIVLEKRVGLKSYIDSGELINGDFSKKLLCTIFYPGTALHDGAVIVLGNKIIAAGCVLPMPTGTAAAEQSGGMRHRAAKALALETDAFVIVVSEETGYISIAYRDSFRTRQSKRELEEEIKRHWKELYED

SEQ ID NO: 61791 - DNA, 1137 bp, Unknown
  Obtained from environmental sample
  misc_feature (1)..(1137): n is a, c, g, or t
atgaagactgaaaaagaaaagaaagaggatgaaaagaaaaaagaccgccgccgttttattgctttgctcataatattacttttgctattgctgttgtttttgctatttcaatggaaaataaaaaagagaaacgaaacgctatttgaagaacagaaacagcagcagttgttgatggcaatagagaaagctcaaagaattgcagattcaataatcagggcagattcaattagaaaagcggattcaatagctggattggctagtgaggagttggaagtggctggtggtgattctagcttgattaagaagcaacaacgtaaagttcagggtgaaaaaacagaggaaattcagcagcccgaaagttctggaagttttagcagttctgattctggcgataaggattccattcccccaacaccgtctattttgccgcctactgggcgttattacaagcctgtgaatttgcgcgttgaatgcggagaacccaaatgcgaaacggagatttccgtaggggattctttgaatgccattaagggtggcaaaattgagaattacaataaaactggcaatgtttatttcagggcaatagattctgcaaaaaatgcgagcagttgggaacttgccgtttatgatatggcgagcgataattcttgcacagaaaattcatatcccgttctgattaagggaaaaaccatttgcgtggatgcttatgaatttccaaacaaacacggcgaaaagccgcacaatatggttagccaagatgcggcaagccgcctctgtgtgagcgttggaaaaaggctgtgttccatagacgagtggcaagccgcttgcaaaggcaattcaaatgcccgctatccttatggcagctcctataatcaaactaaatgcgcaaccgatttgaaatctgcaaaagagcctggccgctccggttataaggagcattgccgcagttggtatggcatgtacgatatgagcggcaacctttgggaatggacaagcacgcccgcacagcgagaaggattgtttttggttgcgggcggtgcgtggaacacgcaaaacaaaagttcctgcaccgaaacatcatacagcttttatccgcaaaacgaatacccattcgtagggtttaggtgctgcaaatga

SEQ ID NO: 61792 - protein, 378 aa, Unknown
  Obtained from environmental sample
  DOMAIN (169)...(378): Domain of unknown function (DUF323)
  misc_feature (1)..(378): Xaa is any amino acid
MKTEKEKKEDEKKKDRRRFIALLIILLLLLLLFLLFQWKIKKRNETLFEEQKQQQLLMAIEKAQRIADSIIRADSIRKADSIAGLASEELEVAGGDSSLIKKQQRKVQGEKTEEIQQPESSGSFSSSDSGDKDSIPPTPSILPPTGRYYKPVNLRVECGEPKCETEISVGDSLNAIKGGKIENYNKTGNVYFRAIDSAKNASSWELAVYDMASDNSCTENSYPVLIKGKTICVDAYEFPNKHGEKPHNMVSQDAASRLCVSVGKRLCSIDEWQAACKGNSNARYPYGSSYNQTKCATDLKSAKEPGRSGYKEHCRSWYGMYDMSGNLWEWTSTPAQREGLFLVAGGAWNTQNKSSCTETSYSFYPQNEYPFVGFRCCK

SEQ ID NO: 61793 - DNA, 552 bp, Unknown
  Obtained from environmental sample
  misc_feature (1)..(552): n is a, c, g, or t
gtgctgcaaatgaaaaccattgcagttttaaccgctatgcagcaagaactagatgccgttcttgaattattcgcttctgcaaatccaagcaaaaccgagctttacggaatgcctgtgtatatttttgagcataacgaaattaaatttatcctagcattatctggagttggcagaacaaatacagcgttaaacacagctttaatagcaaaagaatttaaaccgagtgaaataataaatgttggcacagcaggtggtttgcaaacagaacaaaaaattttggatatagttattcccaaagaggttgtagctgttgatgttgacttaaccgctctgggttgcgaatacgggcaagtgcttggcgagccaaaatcttattataccgatgaggaattgcaaagtaaacttgttaaggctgcggcagctttgacaaacgtgcatacaggcacagttggttcttcggaggcttttatttgccaaagcgagcaagtgcgcgaaattcacaggcgttttaacaatagggttgtatgtgtggaaatggaggctttttcatag

SEQ ID NO: 61794 - protein, 183 aa, Unknown
  Obtained from environmental sample
  DOMAIN (6)...(182): Phosphorylase family
  misc_feature (1)..(183): Xaa is any amino acid
MLQMKTIAVLTAMQQELDAVLELFASANPSKTELYGMPVYIFEHNEIKFILALSGVGRTNTALNTALIAKEFKPSEIINVGTAGGLQTEQKILDIVIPKEVVAVDVDLTALGCEYGQVLGEPKSYYTDEELQSKLVKAAAALTNVHTGTVGSSEAFICQSEQVREIHRRFNNRVVCVEMEAFS

SEQ ID NO: 61795 - DNA, 459 bp, Unknown
  Obtained from environmental sample
  misc_feature (1)..(459): n is a, c, g, or t
gtgcttttcgggttctttcgcagaaagaacccttttttgtctttaaacgttgatattgattccgaccgcgttatggataataacaaagacatattaaaatactgtccgcgctgctccgcccccgcgctcttggcggactcccgcaagatcgtctgcgctacgtgcggtttcagtatttacctgaacacggccgccgccgtggccggcctgctctttgacgccgaaggacgcctgatggccgtccgcagaaaccacgcccccagggtcggctttttagatctgcccggcggcttcgtggatttcgacgaaacggcggaagaggcgctgtcgcgcgaggtgcgcgaggaattgggcataacgattaacagcattgaatactaccgttcaatccccaacacgtacctattcggcgacgtcctgtaccacacgctggacatctttcttaaatgccgcttttga

SEQ ID NO: 61796 - protein, 152 aa, Unknown
  Obtained from environmental sample
  DOMAIN (63)...(151): NUDIX domain
  misc_feature (1)..(152): Xaa is any amino acid
MLFGFFRRKNPFLSLNVDIDSDRVMDNNKDILKYCPRCSAPALLADSRKIVCATCGFSIYLNTAAAVAGLLFDAEGRLMAVRRNHAPRVGFLDLPGGFVDFDETAEEALSREVREELGITINSIEYYRSIPNTYLFGDVLYHTLDIFLKCRF

SEQ ID NO: 61797 - DNA, 1569 bp, Unknown
  Obtained from environmental sample
  misc_feature (1)..(1569): n is a, c, g, or t
gtggacgccctaaccgccctagcgagctgtcaagccgccaacggcgatatcaaagctgcgatcatctcctacgaacaagttgtgatgatgaacgcctccgccgcccgcgaatacaaggatctcggcgacctctacgcgaagcagaaaaaagatgatgaggcgttgcgttgctacgctaagtatttggataaggttcccacagacaaagccacctccgtgagcgtgggcaagatatactacgatcagaagaagtacgccgaagccgccaaatacatatcgcaggcgcagtcgaacgatcccgccacgctgattatgtacgcggacgcgagtatccagtccggcaaccccaagaacgcccaggttgcgcttgaggagctgcgcagcaggaagccgcaaatccatgaaataggccgcgtgcttgctatgcttggcgagatgtatgagaaggacgggaagcagagttcggcggcgtctgcctacgccgattacgtcgccctgccgggcgtgaaggaccgcgaggcctcctacaaggccgcgttcctgcaggagaagagcagtccggccgccgccataaagatctacgagtctaacctgaaggctttcccggacgacgtgaggaacgctctgcgtttgggcctcttatactcgcagaacaaggatacgagggagaaggccgtgccgcttttgcagaagtcgacagcggccgccgacaaggatccaaagctgtggctagatatagctaccgtctacggctccatgaaccgcgacgccgacgagttggcggcgtaccagaagtatctgcgcaaagatccccagcacgttgcggccaacaagagggtcggcgctctgcttatgaggaaaggcgactacagcaacgcgatgatttcccttgaactcgccaatacgatgtcgccgaacgatccggaggtcatgtcgcttttggctaagggatacctaagcaaaaagcgcaacaaagaggccttggagatgctcctgaaagccaagaccgccaagccgagcgatccggatatccgctaccagctctacgaggtatactcgtcggaaaagcggaaccaagaggcgtttgcggagatgcaggagctagtgaagataagcaaagagccgcgctatctgcagctctacggagacgcgctggtagccttaggcaacgcgagcgaggccgaaggcgttattaacgagctattggccaaggatcccggcgatccgaacgcgttgatgctgcgggccagattcttgcgttccaaaaaggagtacgacgaggctatagaggtgtacaaggagataacggaggtccagccggactacgcgcttgcccactacgagcgcgccgagacgtatgtgcttgcgtctaagcccacatgggcggagaccttctacaatagggcgcttagggccgacccgaaattcgcgttggcggagctggggttggccaagctctacaaggcgcgcaagcagatggacttgtacaaggagcacttggaggcggccaaaagattggcgccggataacgatttggtggcggaggaggtcaagaaaggggggaattaa

SEQ ID NO: 61798 - protein, 522 aa, Unknown
  Obtained from environmental sample
  DOMAIN (35)...(68): Tetratricopeptide repeat
  misc_feature (1)..(522): Xaa is any amino acid
MDALTALASCQAANGDIKAAIISYEQVVMMNASAAREYKDLGDLYAKQKKDDEALRCYAKYLDKVPTDKATSVSVGKIYYDQKKYAEAAKYISQAQSNDPATLIMYADASIQSGNPKNAQVALEELRSRKPQIHEIGRVLAMLGEMYEKDGKQSSAASAYADYVALPGVKDREASYKAAFLQEKSSPAAAIKIYESNLKAFPDDVRNALRLGLLYSQNKDTREKAVPLLQKSTAAADKDPKLWLDIATVYGSMNRDADELAAYQKYLRKDPQHVAANKRVGALLMRKGDYSNAMISLELANTMSPNDPEVMSLLAKGYLSKKRNKEALEMLLKAKTAKPSDPDIRYQLYEVYSSEKRNQEAFAEMQELVKISKEPRYLQLYGDALVALGNASEAEGVINELLAKDPGDPNALMLRARFLRSKKEYDEAIEVYKEITEVQPDYALAHYERAETYVLASKPTWAETFYNRALRADPKFALAELGLAKLYKARKQMDLYKEHLEAAKRLAPDNDLVAEEVKKGGN

SEQ ID NO: 61799 - DNA, 1401 bp, Unknown
  Obtained from environmental sample
  misc_feature (1)..(1401): n is a, c, g, or t
atgagttttgaacaatacttagtctcccccgccgtcgccgagatatcctccgacgataagaccggcgccctcaaggagcttgccgccgcgctctgcaaagcgctcgacatcaacaagcagaagtacatagtagaggagatactcaagcgcgaggagagcgcctccacgttcatcggccaaggcgtcgcgctgccccacgcccgcggctgccccataaaggaggagttcgctatcatcgtcggcaggagcctctcggggatcaactacgacgcggcgcgcggcgcgtcggctcacatactcgtgctgctcgtctcgcgtgaggacgccgacaacgcccgccagatagagatgctctccgagatcgccgcgtttttcaagtcggaggaggtgcgcgacaacatcctgtcgcgggacgccgtggccgacctgcgggttctcagcgccgccgtgaagaaagggctcttcgagaaacgccaccgccgccgcacgcccgcaaaaatcaccggctccccggtgcttaactccgcgagacagctcgcccaaaacctaaaggcgcgcgccgtcatcgtattcgccgacgtcgtcaaggacaacgacttcttagaccaactcggcgacaagcacaaactaatcatcgtcaccaacaacaaaacgcggttcgaccttgccaaggacaaacgtgtgctcggcctggtgcaggccccgcccatccccgtctccagaaccggccaactcaaaatcggcatcctcttggccctgtcacggggtttcatcagcaaagaggacagggtgatatgcgtctccggcggcagcaacgggtcgattttcgacacggtagtttgcgtagacatcgccagagagtacgagttcttcttcctgacggcgcaaaacctgctgccgcccgatattaaacccgaagtattcgagcgggtgataggccttgccggagagatatccgtggagggcagggagggcaaggccgtgggcaccatatttgtaataggcgacacaaactccgtaaacgccaacgtccgccaactgataataaaccccttccgcggctacagcgaggcggagcgaaacgtgctcgacccgggccttgtggagacgataaaagagttcgcggccatagacggagcgttcataataaccggcgacggcgtaatcctatcggccggcagctacctgcgcccgcaaccgatggagatgtcggacgccttacccggcggctttggaaccagacacgcggcggcggccggaataaccggctgtacgcacgccctggccataacaatatccgaatcaaccggcatggtaaacgtctttaagaacggggctataatgctgtctttatcaaaaccggttgttcacgagaaagagacgattaagcatttgggttga

SEQ ID NO: 61800 - protein, 466 aa, Unknown
  Obtained from environmental sample
  DOMAIN (1)...(149): Phosphoenolpyruvate-dependent sugar phosphotransferase system, EIIA 2
  misc_feature (1)..(466): Xaa is any amino acid
MSFEQYLVSPAVAEISSDDKTGALKELAAALCKALDINKQKYIVEEILKREESASTFIGQGVALPHARGCPIKEEFAIIVGRSLSGINYDAARGASAHILVLLVSREDADNARQIEMLSEIAAFFKSEEVRDNILSRDAVADLRVLSAAVKKGLFEKRHRRRTPAKITGSPVLNSARQLAQNLKARAVIVFADVVKDNDFLDQLGDKHKLIIVTNNKTRFDLAKDKRVLGLVQAPPIPVSRTGQLKIGILLALSRGFISKEDRVICVSGGSNGSIFDTVVCVDIAREYEFFFLTAQNLLPPDIKPEVFERVIGLAGEISVEGREGKAVGTIFVIGDTNSVNANVRQLIINPFRGYSEAERNVLDPGLVETIKEFAAIDGAFIITGDGVILSAGSYLRPQPMEMSDALPGGFGTRHAAAAGITGCTHALAITISESTGMVNVFKNGAIMLSLSKPVVHEKETIKHLG

SEQ ID NO: 61801 - DNA, 993 bp, Unknown
  Obtained from environmental sample
  misc_feature (1)..(993): n is a, c, g, or t
atgatacttttaccccccagcacggggattaaagtgaacgttaaactggtgcccccggacgcggttatgccggcggtagtagccggaacggggccggacgccgcgctgaccgtgcctcagaccgacccggtgaattatgccgtccgccacgccgcgcttgatctttcaaaattaccgggctttgaggaacttacgcgggagtttgataaaagcgtccttattccgttccgttacgcgggcgggattttcgggcttccggaaacccagtacttccatgttatgttttaccgcaaggatatcttcgcggaacttggcattgagattccggaaacttgggacgatttgataggcattttacccattattcaaaagaacaatatgaacgttggaatcccctcggtggctacgaccgaacagatcaacattgacttttccaatttcctcgcccatctgtaccagcgtaacggcagcctgtacaacgaggacggctcccgcactatgctggccggcgagattgccattgaggcctttgatgtttacacaaaattttttacccattataaaactccaatagtgtataattttttaaaccgtttccgcaccggtgagatgccgctcgcttttgccgattacaccaactttaacacgctggaagttttcgcgccggaactgcgcggcctgtggggtttcgcccgtatgcccggccttcccaaggctgacggcagcattgaccgctcggtgcctacgggaacccttgcctcgatgattttttccaacgcgaaaaaaccggaacttgcctgggaattccttaagtggtgggtcagctccgatacccagctccgtttcggccgcgagcttgaaagcgttatgggagccgcggcgcgttatcccacggcgaattatgacgcttttacgcggctttcctggggctcggatcaaatggccgtgctgagggaacagcgctccggacgggggcccccctcggccatctga

SEQ ID NO: 61802 - protein, 330 aa, Unknown
  Obtained from environmental sample
  DOMAIN (16)...(280): Bacterial extracellular solute-binding protein
  misc_feature (1)..(330): Xaa is any amino acid
MILLPPSTGIKVNVKLVPPDAVMPAVVAGTGPDAALTVPQTDPVNYAVRHAALDLSKLPGFEELTREFDKSVLIPFRYAGGIFGLPETQYFHVMFYRKDIFAELGIEIPETWDDLIGILPIIQKNNMNVGIPSVATTEQINIDFSNFLAHLYQRNGSLYNEDGSRTMLAGEIAIEAFDVYTKFFTHYKTPIVYNFLNRFRTGEMPLAFADYTNFNTLEVFAPELRGLWGFARMPGLPKADGSIDRSVPTGTLASMIFSNAKKPELAWEFLKWWVSSDTQLRFGRELESVMGAAARYPTANYDAFTRLSWGSDQMAVLREQRSGRGPPSAI

SEQ ID NO: 61803 - DNA, 1437 bp, Unknown
  Obtained from environmental sample
  misc_feature (1)..(1437): n is a, c, g, or t
atgtataatgtttatatagaatattatcccctgccgtcgcggggtatcgctattgaacgttcctttaaaataaacggtgaaacgccttttctgggagccgaccggctgatgtttcaacgggtctggggcgacgccgactccgtgcgaaaggataatcagggcaacgagattcgtcctgcccaggtggaaaaaccccgatgggaaagttcttttttcagcgattatctgggttacactacagagccttatgaattttatctgggcgcgggggataacgtcatacggcttgagggaataaacgagcctgtggcaatccgcgcgatcctccttaaagcccctgttccggttcaaacctatgagcagtttgcgcgggagattgatgcgggcaagtaccgcaatatgaatcccaattatatgctgaaggtacagggcgaacacgcaaagcgccgttcagacccttcgttatacgctatttacgaccgttcttccggcgcgacggatccgtccagcgtggcaagaataaaactcaacatgataggcggacagaactggcgcgttgcggggcagtggatcgagtgggaattctatgtgccggaagacggtctgtacaggtttaccgtcaagggccgccagaattacaacaggggttttgtttcaaaccgcatggtgctgatagacgggcagacgccctgtatggaactttccgccgttccttttacctacaacaataaatggaagctgacgacattccgcgacaacgagggggatatgctgtttcccctggaatacggccagcatagcttgcgcctgcaggtggctatgggcggtatgggcgcgatgttaagcgtcatggaggaaagcgtataccgcctgaactggatttaccgcaaaatactggtgctgaccggcacggaaccggacatttaccgcgattaccgcgtggatgtggtataccccgaagttattgaggcaatggatctggaaagcaaaatcctgtataaactcgttgatgatttaaccgcctattcgggcgaacgcagcgcccagaccgcggctacgctgacgctggcccgccaactggaactttttgtcaggcggcccgataaaatcccccggactatggttaattttaagttcaatatcagcgctctgggcgacagtcttcttgccctttcccagtcccagcttgatgttgattacattgtggtaagcgccccgaacgcgaaactgccgccggtaagggagaatttttttgttgccgcttcccacgagatacggactttccttgcttcgttttttgtggattacaacagcctcggcgacgtgtaccgtataagcgccgatgttgtcgaagtgtggatgcttgccggtcgcgatcagagcactattctgaaagggatgatcgatgatacttttaccccccagcacggggattaa

SEQ ID NO: 61804 - protein, 478 aa, Unknown
  Obtained from environmental sample
  misc_feature (1)..(478): Xaa is any amino acid
MYNVYIEYYPLPSRGIAIERSFKINGETPFLGADRLMFQRVWGDADSVRKDNQGNEIRPAQVEKPRWESSFFSDYLGYTTEPYEFYLGAGDNVIRLEGINEPVAIRAILLKAPVPVQTYEQFAREIDAGKYRNMNPNYMLKVQGEHAKRRSDPSLYAIYDRSSGATDPSSVARIKLNMIGGQNWRVAGQWIEWEFYVPEDGLYRFTVKGRQNYNRGFVSNRMVLIDGQTPCMELSAVPFTYNNKWKLTTFRDNEGDMLFPLEYGQHSLRLQVAMGGMGAMLSVMEESVYRLNWIYRKILVLTGTEPDIYRDYRVDVVYPEVIEAMDLESKILYKLVDDLTAYSGERSAQTAATLTLARQLELFVRRPDKIPRTMVNFKFNISALGDSLLALSQSQLDVDYIVVSAPNAKLPPVRENFFVAASHEIRTFLASFFVDYNSLGDVYRISADVVEVWMLAGRDQSTILKGMIDDTFTPQHGD

SEQ ID NO: 61805 - DNA, 486 bp, Unknown
  Obtained from environmental sample
  misc_feature (1)..(486): n is a, c, g, or t
gtgatgagagggttcgtgccgtcccggcacacgctggcgccttatttctggctgccgccggacagcgcccccgaccggcagattgtaacctttcactattacgatccttatgaatttggaatcgctgcgacacgttgggaatggggttcagacggggataaaaacagggtggtaaatgattttgcctcctttaagacaaagtatatcgacaaaaaaatcccggtgatcatcggcgaatgcggcgcggtgcggcagttgtatccgaatgataaagccaaagaagacaaagcgcggcagaaccggcttgcttacctttcctgggtgtttggcaaagccaaagaaaacgggctggttcccatttattgggacaacggggctgtcgacggcaatggcgaaaaattcggcctttttgatcgcagtaccggccagccgaattcagcggaaagcgaggcctgtattaaggcgatgatacaagcggttaaatag

SEQ ID NO: 61806 - protein, 161 aa, Unknown
  Obtained from environmental sample
  misc_feature (1)..(161): Xaa is any amino acid
MMRGFVPSRHTLAPYFWLPPDSAPDRQIVTFHYYDPYEFGIAATRWEWGSDGDKNRVVNDFASFKTKYIDKKIPVIIGECGAVRQLYPNDKAKEDKARQNRLAYLSWVFGKAKENGLVPIYWDNGAVDGNGEKFGLFDRSTGQPNSAESEACIKAMIQAVK

SEQ ID NO: 61807 - DNA, 573 bp, Unknown
  Obtained from environmental sample
  misc_feature (1)..(573): n is a, c, g, or t
atgaaaattcatcaacccacagaagtcattactgatccggaagtggcattgcaaatgcttaaagaggggaatgagcgctatctgacaggaaaacttacggcgaaaacggactataaggaggagcgggacgtcctcgacgatgaacaggatccttttgcggtaatccttacctgttccgactcacgggtagcgccggaaatcttttttgacctgaaattgggagacattttcgtcatccgcaacgcgggcaatgtcgtcgacacggaagctcttggcagtattgaatacgcggttgagcatcttaagaccaaactggttgtcgtatgcgggcacaggcattgcggcgcggttacggcggcatactcaagcggagaatttccgaaaaacatcaagcgtattgtagaacttatcagccccgcggtgaaaaaaggcggcgatctggacaaagtcatccataacaacgtggaagtaatggttgaaaaagtcaaatctgacgaaataatcaggcatttgggagttaaagtcgtcggcgcctactacgacatacactcaggcaaggtcgaatggctttaa

SEQ ID NO: 61808 - protein, 190 aa, Unknown
  Obtained from environmental sample
  DOMAIN (46)...(190): Carbonic anhydrase
  misc_feature (1)..(190): Xaa is any amino acid
MKIHQPTEVITDPEVALQMLKEGNERYLTGKLTAKTDYKEERDVLDDEQDPFAVILTCSDSRVAPEIFFDLKLGDIFVIRNAGNVVDTEALGSIEYAVEHLKTKLVVVCGHRHCGAVTAAYSSGEFPKNIKRIVELISPAVKKGGDLDKVIHNNVEVMVEKVKSDEIIRHLGVKVVGAYYDIHSGKVEWL

SEQ ID NO: 61809 - DNA, 1293 bp, Unknown
  Obtained from environmental sample
  misc_feature (1)..(1293): n is a, c, g, or t
ttgattaaagttctcattccctacgcgctcagggcatttacggagcgcaacgccgaggtggaagtaaatggcggtacggcgggcgatgcggttaacgctcttgcaaacgcctatcccgcccttaaaacccacctgttcactgaagatggtcagcttcgcgacttcatcaacttgtttgtaggcggcgtaaacatcaacagtctgcagggactgaacacgcccgttgcggataacagcgaagtgatgattgttcccgccatcgcaggtggcagtgatggcgataaaatcggcgataaaatcggcgcggagcttaccaatgaagaaatcgcgcgttatagccgccatttgcttctgccggagataggagttgaagggcaaaaaaaattaaaagccgctaaagtcctcattgtcggtacgggcgggcttggggcgccgcttgccttgtaccttgctgcggcaggcgtggggacaatcggccttgtggattttgacgtggtggatgaatcaaatcttcagcggcagataattcacagtacgcgcgacgtgggcaggccaaaagtagcttccgcaaaggacagaatcaaggggataaaccccctggtgaatgttgtgacgcataacgcaatgcttacaagccggaacgcgctggagctttttgccgattatgacattatcgcggacggaacagataattttcagacgcgctaccttgtaaatgacgcctgcgtattttcgggcaaaatcaacgtgtacggttccgtgtttcagttcgacgggcaggcgactgttttcggcgcgaaagacggcccctgttaccgctgcttgtacccttccccgccgccgccgggacttgtcccttcatgcgcggaaggcggggttatgggcgtactgcccggcattatcggaaccattcaggcggctgagacgattaagctcatagtaggcggggcaaaaccgctgatcggccgcctgcttttatttgacgcatggcgcatggcgttccgcgaattaaaattggaaaaaaaccccgactgccccgtatgcgggaaaaacccttccatccatgaacttattgattatgaacaattctgcggtttgaaaaaaaaccaggacagcaaaccgatagatacgatcaccgccattgatttaaagaaacgccttgataacggagacaaaattcaattcatagacatacgcgagccgcacgaacgcgccattgtaaaattccccaacgccatagtaatgccccttggccagctggaaagacgcatggacgaactgacccgtccgtag

SEQ ID NO: 61810 - protein, 430 aa, Unknown
  Obtained from environmental sample
  DOMAIN (4)...(90): ThiS family
  misc_feature (1)..(430): Xaa is any amino acid
MIKVLIPYALRAFTERNAEVEVNGGTAGDAVNALANAYPALKTHLFTEDGQLRDFINLFVGGVNINSLQGLNTPVADNSEVMIVPAIAGGSDGDKIGDKIGAELTNEEIARYSRHLLLPEIGVEGQKKLKAAKVLIVGTGGLGAPLALYLAAAGVGTIGLVDFDVVDESNLQRQIIHSTRDVGRPKVASAKDRIKGINPLVNVVTHNAMLTSRNALELFADYDIIADGTDNFQTRYLVNDACVFSGKINVYGSVFQFDGQATVFGAKDGPCYRCLYPSPPPPGLVPSCAEGGVMGVLPGIIGTIQAAETIKLIVGGAKPLIGRLLLFDAWRMAFRELKLEKNPDCPVCGKNPSIHELIDYEQFCGLKKNQDSKPIDTITAIDLKKRLDNGDKIQFIDIREPHERAIVKFPNAIVMPLGQLERRMDELTRP

SEQ ID NO: 61811 - DNA, 504 bp, Unknown
  Obtained from environmental sample
  misc_feature (1)..(504): n is a, c, g, or t
atggagagatatttaacgctatgtatttttcgcaaggacttcacacaaagagcacaaaggtacaaagatcacaaagagggatttatgttacggctcaatcctgaactggaaaaaaatataagagtggacggcgagaccgcatatcccaacgagtgttgcggcgttctcatcggcgaggttgataatgcgggaattaaaacggtcaagagtacgctaactattaacaacgcaagtgaaaacggtgaacaataccaccgttttttgataactccagaagatatgcttcgcgccgaacaatccgcaagagcgatgaaacttgatattatcggtttttatcactctcaccccgaccatccgtccgcgccgtcaggttatgataaagatcacgcgttgcctttttactcctatgtgattgtgtctgtggatagcggcaaggcgcaggttttaacaagctgggagttagcggacgatagaagtaattttatacaggaggttataaattga

SEQ ID NO: 61812 - protein, 167 aa, Unknown
  Obtained from environmental sample
  misc_feature (1)..(167): Xaa is any amino acid
MERYLTLCIFRKDFTQRAQRYKDHKEGFMLRLNPELEKNIRVDGETAYPNECCGVLIGEVDNAGIKTVKSTLTINNASENGEQYHRFLITPEDMLRAEQSARAMKLDIIGFYHSHPDHPSAPSGYDKDHALPFYSYVIVSVDSGKAQVLTSWELADDRSNFIQEVIN

SEQ ID NO: 61813 - DNA, 795 bp, Unknown
  Obtained from environmental sample
  misc_feature (1)..(795): n is a, c, g, or t
ttgatttccctcggttccataaccgcgctggtgtcatggctggtcagggaagaccttacaatatctgcggaagaaaacaacttcgaggcaaaccgccgcgcggctgccgaaactgaacagaccctcgaaaaaatgcgcctgctctccctgtcgttctcccgtacggcggctcttgcggaacactgcggcttaatacaggaagaagccggttatttctttacacagaacccgcagattgcggctcttttctatacaacagcctcatccgccgagtggtcagaccgggcgttcgtcaatgagcgctttttcctttcacggggaattgatgcgtctcttgcggatacttttttcgacaacagcaaaaaaacgcgggaaaatgccgggatggggcaaacgatactcatcaacgcctcgcccctgtttaataaagcgcaaggttcaacatatctttcggcaatgtttttccccatacaggaaggaagcggttgcgttctgttctcaagcgaaaacattaacgaaagtttcggcataggcgttaataagtcatatcttataaacgccgacggcgatattatcgcggatgccgacatagaaaggattaaatcccatgcgacccttggggaacaggaaattataaaacagatattggacagccccgaccgtaacaaacaaatgttagttgaacttgacaaagtacgccactaccttgcctatacacggctgaatacggcgggaagcgttgtaatcaccacaatcgaatacgataaagtcttgaaggctctcggccgattctga

SEQ ID NO: 61814 - protein, 264 aa, Unknown
  Obtained from environmental sample
  misc_feature (1)..(264): Xaa is any amino acid
MISLGSITALVSWLVREDLTISAEENNFEANRRAAAETEQTLEKMRLLSLSFSRTAALAEHCGLIQEEAGYFFTQNPQIAALFYTTASSAEWSDRAFVNERFFLSRGIDASLADTFFDNSKKTRENAGMGQTILINASPLFNKAQGSTYLSAMFFPIQEGSGCVLFSSENINESFGIGVNKSYLINADGDIIADADIERIKSHATLGEQEIIKQILDSPDRNKQMLVELDKVRHYLAYTRLNTAGSVVITTIEYDKVLKALGRF

SEQ ID NO: 61815 - DNA, 672 bp, Unknown
  Obtained from environmental sample
  misc_feature (1)..(672): n is a, c, g, or t
ttgaattccccccccccccccccgtgcttttgggggcaatttatgactttaaaacaagtattttcaattccaaagctcattattatcgaagatcaccccgttatgcgcgaaggactggcgaaatattttaccgaaactaaccgctggcaggtaatgggaacagcctctacccttgccgaagccaaagagcttgtaagccgcgtttatgcggatattttccttttggatattcagcttgaagatggctggggtcttgatattattccatatatcgcaaagcaagagaagcctgcgggaaaaccccgtccaatcatggctgtatattccagttttgacgattacgcccatgtaagcgccgcgcttggaatgggcgtgcaaacctatatctgcaaacgccgaagtgaaaaggaacttgaagccgccatgcgatcaacgctggacggaaagccgtacattgacgacacagtgcagtcaaagttgaataagactgtaaattttttcagccttcttaccagacgggaaactgaaattttcaggctggtaacgcaaggattttccaacaggcagatagccgagaacctgaaaataagcccgcgcacggtggaaaatatcctttcctgtgtatacgacaaaaccggcatcaactcccgcgcggaactggaacgcttgtaa

SEQ ID NO: 61816 - protein, 223 aa, Unknown
  Obtained from environmental sample
  DOMAIN (167)...(223): Bacterial regulatory proteins, luxR family
  misc_feature (1)..(223): Xaa is any amino acid
MNSPPPPPCFWGQFMTLKQVFSIPKLIIIEDHPVMREGLAKYFTETNRWQVMGTASTLAEAKELVSRVYADIFLLDIQLEDGWGLDIIPYIAKQEKPAGKPRPIMAVYSSFDDYAHVSAALGMGVQTYICKRRSEKELEAAMRSTLDGKPYIDDTVQSKLNKTVNFFSLLTRRETEIFRLVTQGFSNRQIAENLKISPRTVENILSCVYDKTGINSRAELERL

SEQ ID NO: 61817 - DNA, 1239 bp, Unknown
  Obtained from environmental sample
  misc_feature (1)..(1239): n is a, c, g, or t
atgaaaaagttatttggaacgcttttcgcgctgatagtatgcctgacctcttgcgccaataacaacacatacccgtcaatatcatctatttcagcctcatggcttaatctaaagtccgatattataaattcagaacaatctgatgatattgcgggcagtatagataatttccatcttacgcttaaaaagtatatatcttcaccgattatttatctgtacaaaatacaccgccccgaaaatatacaaattctcgctgatattgattccgccgcagaccgtcttaacgaagcgttgaaagaaggaggcggacttcctccggggaagtacgatttacatatccttccaattatctttgaaatagattcaaaccttgaaaaattacagcttattgaaaaaaatctttcagaggcaagccagcttcagtattttcagcttttattctttttatgcgcgcttatcatcagtattgttcttgcgttgtgggcgctttacagcaggtttgaaaaggcggtaatcaaagaacggcaaagtcttgccttttcccatttaacgatagaaggtcttgaggcggaacgcaggcgcatatcccgcgaactgcacgacaccgtactgccgttggttcaagacgcgcaagtttccgcgctcattcgctcaatctgcgtggaattaatgcctcccgattttgcgcggctctcccttaatgactctttggcgggattatgcgttcaattcactaaacgctcaaggatagagtgcgcctgttccataaaagagggacttactttttggatgtacacccctgaaagacaactccatatttatcgcatagttcaggaattttttcccaatatagaaaaacactcaaaacccggacggggggctttgggggtacgtcattcagaggaaaagattttgttttgggtttctgacgacggagagggcttaggaagtaagcccagcttccatggtatacccttatccgccgatggtatcccggcgggagccggtttaggcataaagagtatgcgtcagcgggcggatattttaggggcaaaacttgactttataagtgaaagcggcaacgcccttatggtaagaattgaattccccccccccccccccgtgcttttgggggcaatttatgactttaaaacaagtattttcaattccaaagctcattattatcgaagatcaccccgttatgcgcgaaggactggcgaaatattttaccgaaactaa

SEQ ID NO: 61818 - protein, 412 aa, Unknown
  Obtained from environmental sample
  SIGNAL (1)...(19)
  DOMAIN (268)...(372): Histidine kinase-, DNA gyrase B-, and HSP90-like ATPase
  misc_feature (1)..(412): Xaa is any amino acid
MKKLFGTLFALIVCLTSCANNNTYPSISSISASWLNLKSDIINSEQSDDIAGSIDNFHLTLKKYISSPIIYLYKIHRPENIQILADIDSAADRLNEALKEGGGLPPGKYDLHILPIIFEIDSNLEKLQLIEKNLSEASQLQYFQLLFFLCALIISIVLALWALYSRFEKAVIKERQSLAFSHLTIEGLEAERRRISRELHDTVLPLVQDAQVSALIRSICVELMPPDFARLSLNDSLAGLCVQFTKRSRIECACSIKEGLTFWMYTPERQLHIYRIVQEFFPNIEKHSKPGRGALGVRHSEEKILFWVSDDGEGLGSKPSFHGIPLSADGIPAGAGLGIKSMRQRADILGAKLDFISESGNALMVRIEFPPPPPVLLGAIYDFKTSIFNSKAHYYRRSPRYARRTGEIFYRN

SEQ ID NO: 61819 - DNA, 1689 bp, Unknown
  Obtained from environmental sample
  misc_feature (1)..(1689): n is a, c, g, or t
ttgatgcctagacacatctactatgcaaaagtgcgctatatggcaatgatattgtgtgcgttaggcatagcctttgcgacggtgatcagttttgtgcttataagcgtagacgcggccaagaacaagtcggatttggagagcaagcgcaagagcgctttcctcgccaatatgagccacgagatacgcacgccgatgaacgcgataatcggtatgatcacaattggcaagtccgccgcggacacggagcgcaaagactactgtttcacaaagatagaggacgcgtcgaaccacctgctcggcgtaatcaacgacattctcgatatgtccaagatcgaggccaacaagtttgagctgtcgcccgtcgagttccactttgagaagatgatcaagcgggtgatgaacgtcgtcaacttccgcatagacgagaaacgccaaaaattctcggtgcacgttgatcaggctatccccagaatcctaatcggcgacgaccagcgcttggcccaagtaatagccaatctattgggcaacgcgataaaatttacgccggaagagggtaacgtagtcctcaccgcaaaccttgtgagcgaggagaacggcctttgcaccatgcagatttcggtaaccgacaccggtataggcataaccccggaacagcaagcgaagctctttaagtcatttgagcaagcggaatcgagcaccacgcgcaagtacggcggcacggggctgggtttggcgatctccaaaaacattgtggaaatgatgggcggcaagatagggatacaatcagaactcggcaagggctcgacatttacatttacgtttcaagccaaacgcggcgtcggcggcagggcggggcttttatccgacgacgttaacctcggcaatatccgcattctggcggtggacgacgacccggaggttttggcgtactccagcgacattgcgcacagcttcggcgtgtcgtgcgacacagcgtcaagcggggaggaagcgctcgccctggtggataaaaacgggccttatcatatttactttgtggactggcagatgccgggcatggacggcataaaattgtcacgagaattaaaagcgcgcatgaccgccgaatcgaactccgtggtgataatgatctccgccgccgagtggagcaccatcgcggaggaggcgaagaaagccggggtcgataaattcctctcaaagcccttgttcccctccgccatagcggaaatcataagcgaatgtttaggcgtagacaagaaacaggcggaaaaggcgaaggcggcaagcatcgcgaatatcttcgccgatcggcacatcctattagccgaagacgtggagatcaaccgagagatagtgctcgcgctattggagcccacgcagctgaacatagattgcgcggaaaacggcgcggaggccgtgcgcatgtttaccgaggcgcctgataaatacgacatgatcttcatggacgtgcagatgccggaaatggacggctacgaggccacgcggcacatacgggcgctgaacataccgaaagcgctgacaattcccatagtcgccatgacggccaacgtcttccgtgaagacatagagcgatgccttgaggccggcatgaatagccacgtcggaaagccgcttgactttgacgcggtaatagcaattttgaagcaatatttatcaaataacaaataa

SEQ ID NO: 61820 - protein, 562 aa, Unknown
  Obtained from environmental sample
  SIGNAL (1)...(26)
  DOMAIN (49)...(114): His Kinase A (phosphoacceptor) domain
  misc_feature (1)..(562): Xaa is any amino acid
MMPRHIYYAKVRYMAMILCALGIAFATVISFVLISVDAAKNKSDLESKRKSAFLANMSHEIRTPMNAIIGMITIGKSAADTERKDYCFTKIEDASNHLLGVINDILDMSKIEANKFELSPVEFHFEKMIKRVMNVVNFRIDEKRQKFSVHVDQAIPRILIGDDQRLAQVIANLLGNAIKFTPEEGNVVLTANLVSEENGLCTMQISVTDTGIGITPEQQAKLFKSFEQAESSTTRKYGGTGLGLAISKNIVEMMGGKIGIQSELGKGSTFTFTFQAKRGVGGRAGLLSDDVNLGNIRILAVDDDPEVLAYSSDIAHSFGVSCDTASSGEEALALVDKNGPYHIYFVDWQMPGMDGIKLSRELKARMTAESNSVVIMISAAEWSTIAEEAKKAGVDKFLSKPLFPSAIAEIISECLGVDKKQAEKAKAASIANIFADRHILLAEDVEINREIVLALLEPTQLNIDCAENGAEAVRMFTEAPDKYDMIFMDVQMPEMDGYEATRHIRALNIPKALTIPIVAMTANVFREDIERCLEAGMNSHVGKPLDFDAVIAILKQYLSNNK

SEQ ID NO: 61821 - DNA, 1314 bp, Unknown
  Obtained from environmental sample
  misc_feature (1)..(1314): n is a, c, g, or t
atgtcaaaagaaaataatgagacagaacggatcattgagacgctatggcgccgcgcaaaaatggccgacacgctcaacagagtggccatcatgttcctctcgcacagcgaagagacgttcgaggccaccatgacggccggcgtgcgtgaaatcgccgacgtcttcggcttggatagattctccctctggcgcaacgattacataggaaccgaagggctctccggcggacaaatctaccgctgggacagagaatccggcgggactacccagccgacaaagggtatgtgcgcaatgtcatacgccagccacgtgccgacctgggaaaaaattcttgccgacggcggcgttatcaacagcccggtgagccgcatgcccgaaccagaagcgaccgtgctgcgctccttcggcgtggtctcggctttcgtaacgccgatatccgtcaacaacatcttctggggcttcgccctgcttgaagaccgccgcaaagaacgtttcttcgacgacgacagcgtagaccttatgcgttcggcggcattcctatgcgccaacatcgtcatgcgtaccgatacggaacgcaaattagccaataccaacgcgctgctcaaagtggcgctgcgcaaagcaaccgaggcaagcaaggcaaagggagaattcctctccaatatgagccacgaaatgcgcacgcctctaaacgcgataaccggcatgaccgccataggcaaaaaggcaaaagaaccggagcgcaaagattacgccttcaacaagatacaagacgcctcaacgcacctgctcggcgtaatcaacgacgtgctcgacatgtcgaagattgaggcgaacatgctcgaactctctcccattgagttcaactttgaaaagatgctgcagaagatagtcgcggtgctcaacttccgcatagacgagaaagggcagaagttcactgtccgcatagaccgcgccattcccaaaatgctgatagccgacgaccagcggctggcgcaggtcgttaccaacttgctgagcaacgcgataaaattcacccccggaagacggcgccatagccctagacgcgcgctacatcggcgagaaagacggtatctgcaccgtccaaatctccgtgagcgacacggggatagggataagcgccgagcagcaaaaacacctcttccactccttccagcaagccgagagcagcacgacgcgcaagtacggcggcacggggcttggattagccatctgcaaaagcatcgtggagatgatgggcggcaagatatggatcgaatcggaaccgggaaagggctcaactttcacctttaa

SEQ ID NO: 61822 - protein, 437 aa, Unknown
  Obtained from environmental sample
  DOMAIN (39)...(185): GAF domain
  misc_feature (1)..(437): Xaa is any amino acid
MSKENNETERIIETLWRRAKMADTLNRVAIMFLSHSEETFEATMTAGVREIADVFGLDRFSLWRNDYIGTEGLSGGQIYRWDRESGGTTQPTKGMCAMSYASHVPTWEKILADGGVINSPVSRMPEPEATVLRSFGVVSAFVTPISVNNIFWGFALLEDRRKERFFDDDSVDLMRSAAFLCANIVMRTDTERKLANTNALLKVALRKATEASKAKGEFLSNMSHEMRTPLNAITGMTAIGKKAKEPERKDYAFNKIQDASTHLLGVINDVLDMSKIEANMLELSPIEFNFEKMLQKIVAVLNFRIDEKGQKFTVRIDRAIPKMLIADDQRLAQVVTNLLSNAIKFTPGRRRHSPRRALHRRERRYLHRPNLRERHGDRDKRRAAKTPLPLLPASREQHDAQVRRHGAWISHLQKHRGDDGRQDMDRIGTGKGLNFHL

SEQ ID NO: 61823 - DNA, 2388 bp, Unknown
  Obtained from environmental sample
  misc_feature (1)..(2388): n is a, c, g, or t
ttgacgttgccgccggcgaagaatggtacaacggggcctaaagaaacgaataagattcacatgacggaaccctacaattggacatacccgggcgaaaagcacgggcgcaaaatgttcacgttgagcgcccctattatggtgggagagaaattcatcggcgtggccggaattgatctgcagttggatttgatgcagaagcacctgttcgacaagatgatagacgacaagaagggcgcttatgccgtgttgatatccaacagtgggttgatggccgcgcacccaatggaggatttgatgctcggcgagttgggcgaggatatggattccgtggatcgttgggcgctcaaggacgccataaaaaaaggcgagtaccgccgtgtgctcaaaaagagcctgaagacgggcgatttttcattagtgtcatacgttccgattttgccggaagggcttgaattgccgtggtcgcttgcgtacaccgtgtcgcttgaggttgtgcaggccgaggctaaggcggcgcgggataaaatgatagtgcttggaattttttgcgccgtcgcgtggggggtattcttgttgctgttcatggtgtttgtttccgcgtttctcaaatcggaacgcaaggcaatgatatccttagaacacgcaaaaaatgaggcggaaacggctaaccgcagcaaatcgaattttctcgccaccatgtctcacgagattcgtactccgatgaacgcgataatcgggataacgcaaatacagctgcaacgcgaggatttgccggacgactacgcggccgcgtttcggaagatatatgactccgccaacaaccagctcggtataatcaacgatattttggatacgtccaaaatcgataccggcaagatggagctgagtccgatggaatatgatacgccgagcctgataaacgacgcggtgcagttcaacattgtccgaataggatcgaagccgatcgagtttgcggttgacgttgacgaaaatctcccgtcgaaactttacggcgacgagctgcgtattaagcagatactgaacaacctgctttccaacgccataaaatatacggacaaagggcgagtaaaactatcggtgggttattcggcggacagcgacggcgtgacgttgcgttttgtcgttgaggatacggggcagggcatgaaactgcaggataaagaacggctcttttcggagtaccagcgcttcaacgccgacgccaaccgcgccatagaggggattgggctcggtctgcatataacaaaaaagttggtggatatgatggacggcaccatcgatgtggaaagcgaatacggcaagggcagcgtatttaccgtgaccgtccggcaaaaggcggtggagagccccgcgataggagcggaagttgtggagcaactgcgcaaattctctttcgccggcgataggcgcgtggcgaatctgcggataggccgcgagcttatgccatacggaagcgtgcttgtggtggacgacgtggccacgaatttgtatgtggcggagggattgctgtcgctgtataaattaaaagtggatatggcggatagcggcgttgaaaccgttaagagagtggagggcggcgccgtttacgacattattttcatggatcacatgatgcccggtatggacggtatagagacgacgcaaaagctacgtggactcggatacacgggcgtgatagtggcgctgaccgccaacgcattggtcggcaacgacgaaatgttcaaacagaagggattcgacggattcatccccaagcccatagacgtcagtcaattggacgggatcttaaacaagtttgtccgcgacagacatccggaagaggtgaaaaagcacgccgcagaaactacagggcagggagaccggcatcaagggataaatcaacaccatggcgttaatcagactcaacacgcggcggtcgccgttaaacgttctaaacatgtaaactacgcgatgaatcccaaattactcaaattcttttgtaaagacgtggaaaaagcgattgtcacgctgcgggaaacggtaaagaacggcgacataaaacgcttcacgattaccgcccacggtatgaaatccgcgttggcgaacgtcggcgaggacgatgcctccggacttgccgccgcgttggaaagcgtcggtcgaagcggtgatatggggtacattacggcgaatgtcgatgagtttgtccaaacgcttgaatcgttaatggataaatacggccgtgtgataaataccgccgccggcgcggaaaaatcggataattctgtcgtggcggaagatacaaattatctcatggaacaactacgcataataaaatccgcttgcgatagctacgacgacgacgcggtctacgccgcccttgaccgatga

SEQ ID NO: 61824 - protein, 795 aa, Unknown
  Obtained from environmental sample
  DOMAIN (21)...(106): Cache domain
  misc_feature (1)..(795): Xaa is any amino acid
MTLPPAKNGTTGPKETNKIHMTEPYNWTYPGEKHGRKMFTLSAPIMVGEKFIGVAGIDLQLDLMQKHLFDKMIDDKKGAYAVLISNSGLMAAHPMEDLMLGELGEDMDSVDRWALKDAIKKGEYRRVLKKSLKTGDFSLVSYVPILPEGLELPWSLAYTVSLEVVQAEAKAARDKMIVLGIFCAVAWGVFLLLFMVFVSAFLKSERKAMISLEHAKNEAETANRSKSNFLATMSHEIRTPMNAIIGITQIQLQREDLPDDYAAAFRKIYDSANNQLGIINDILDTSKIDTGKMELSPMEYDTPSLINDAVQFNIVRIGSKPIEFAVDVDENLPSKLYGDELRIKQILNNLLSNAIKYTDKGRVKLSVGYSADSDGVTLRFVVEDTGQGMKLQDKERLFSEYQRFNADANRAIEGIGLGLHITKKLVDMMDGTIDVESEYGKGSVFTVTVRQKAVESPAIGAEVVEQLRKFSFAGDRRVANLRIGRELMPYGSVLVVDDVATNLYVAEGLLSLYKLKVDMADSGVETVKRVEGGAVYDIIFMDHMMPGMDGIETTQKLRGLGYTGVIVALTANALVGNDEMFKQKGFDGFIPKPIDVSQLDGILNKFVRDRHPEEVKKHAAETTGQGDRHQGINQHHGVNQTQHAAVAVKRSKHVNYAMNPKLLKFFCKDVEKAIVTLRETVKNGDIKRFTITAHGMKSALANVGEDDASGLAAALESVGRSGDMGYITANVDEFVQTLESLMDKYGRVINTAAGAEKSDNSVVAEDTNYLMEQLRIIKSACDSYDDDAVYAALDR

SEQ ID NO: 61825 - DNA, 609 bp, Unknown
  Obtained from environmental sample
  misc_feature (1)..(609): n is a, c, g, or t
atggcgacggattacaccgacggtttggcgatacaggctctaaaggtgattttcgaatggctgcccgccgcttacaacgaaggcgcggcaaacattacagcgcgtgaaaaaatggcaaacgccgccacgattgcgggcatggcgttcgcaaacgcgttcctcggcgtgtgccactcgatggcgcacaaactcggcgcgttccaccacctgccccacggcgtcgccaacgcgcttatgatcagcgaagttatgcgctacaacgcatgtgaagttccgccgaaaatgggaactttcccacaatatgaccatcccaaaactctttcccgttatgcgcaaatcgcggacgctctgaatcttggcggtaaaaccgacgacgaaaaacttgaaaaattgattgacgccgttgaaaagctgaaagatcagatagggatcaagaaaactatcaaggattacggcattgatgaaaaagattttcttgcccgtcttgacgacatgagcgaaaaagcttttgacgatcaatgtaccggcgcgaatccccgttatcctctgattgaggaaatcaaaaagatgttccttaacgcttactacggcaagaaggagaaggtgtaa

SEQ ID NO: 61826 - protein, 202 aa, Unknown
  Obtained from environmental sample
  DOMAIN (1)...(187): Iron-containing alcohol dehydrogenase
  misc_feature (1)..(202): Xaa is any amino acid
MATDYTDGLAIQALKVIFEWLPAAYNEGAANITAREKMANAATIAGMAFANAFLGVCHSMAHKLGAFHHLPHGVANALMISEVMRYNACEVPPKMGTFPQYDHPKTLSRYAQIADALNLGGKTDDEKLEKLIDAVEKLKDQIGIKKTIKDYGIDEKDFLARLDDMSEKAFDDQCTGANPRYPLIEEIKKMFLNAYYGKKEKV

SEQ ID NO: 61827 - DNA, 759 bp, Unknown
  Obtained from environmental sample
  misc_feature (1)..(759): n is a, c, g, or t
atgggtaactacaaactggaaaaaataatcgccgtgcgaacggcgaaaactatctaccgcgacggggacaaagtaataaaagtcatgggcgaggaataccccgctccggacgtactttccgaagcgcacagccttgctgtggtaggagaaacaacccttaaagttccgcgcttggtagaagtaacaaagatagacggcaaatgggctatcgtttgggaatacgttgacggaaccacccttgataaacttattgaaaaagataagagcaaggaaggtcaatacattgaacgttttgttgacattcagcttgatatgcacaaacacagcgcgacaaggcttcccctgcttgccgaaaaaatggagcgtaaaattaaaacatccgaccttgacgccacttctcgctatgagcttttaggaaggctggcaggtatgcccaagcataccaaactctgccacggcgattttaatcccggcaacattgttattaccgaaaaagacgaggcgtatatcatcgactggtctcacgcctctcagggcaacgcctcggcggatgcggctcagacttatatgctgttctggcttgcgggtaacatcactttagcggacaagtaccttacgttgttctgcaaaaagagcgacacggcaaaacaatatgtggaaaaatggctttccattgtggcggcttcgcggcttccgaaagcaaaaccgcaagaaaaagaatttttactgcattgggcgaatgtggcggaataccaatag

SEQ ID NO: 61828 - protein, 252 aa, Unknown
  Obtained from environmental sample
  DOMAIN (5)...(218): Phosphotransferase enzyme family
  misc_feature (1)..(252): Xaa is any amino acid
MGNYKLEKIIAVRTAKTIYRDGDKVIKVMGEEYPAPDVLSEAHSLAVVGETTLKVPRLVEVTKIDGKWAIVWEYVDGTTLDKLIEKDKSKEGQYIERFVDIQLDMHKHSATRLPLLAEKMERKIKTSDLDATSRYELLGRLAGMPKHTKLCHGDFNPGNIVITEKDEAYIIDWSHASQGNASADAAQTYMLFWLAGNITLADKYLTLFCKKSDTAKQYVEKWLSIVAASRLPKAKPQEKEFLLHWANVAEYQ

SEQ ID NO: 61829 - DNA, 756 bp, Unknown
  Obtained from environmental sample
  misc_feature (1)..(756): n is a, c, g, or t
ttgcttaacgctctttgttcgtttgcctctcccgcgcatctgctccacatacctaccagagtagtggccgcaaggagctatttggtcgcaaagtaccagtttttttcccttctgcacataatggtaggcgaccagaaggaattcatactttcccttcgcaaggttattctgacgataatccacaccctcatggcggaagaagtctacttttcctgtcttgacgattccggattttcccaggaaataaagcttaatctggcgaacgatcttataatgctttgggacagcggcacggatccccgcacggtcaggcacttgccatcccttgatgccctttggactgcccgcgattcctctccccccgctttcggaacaatgaacgccacaagcgagctcctcaggatctccatagatatgggagaagactggcaggatttcctggtcgcgaatatttcaattaacgaaacccgttgggcccttgaggagtttcttttcggtctctcttacgaagaaataaattcggtacgctccaggctaatgaaattcggcattaatgccatcggccatgacgagattccttcctttcttggaggccatcccgcttacggaataattaacagctccgattaccgcgcaatgtatgatttttatgttgatcgccgggatgccgctcgcctgcgccaaaagctttctgctcccggcccaggcagatccctggaagaaatatatatcaaataccgcatagccctggaataa

SEQ ID NO: 61830 - protein, 251 aa, Unknown
  Obtained from environmental sample
  misc_feature (1)..(251): Xaa is any amino acid
MLNALCSFASPAHLLHIPTRVVAARSYLVAKYQFFSLLHIMVGDQKEFILSLRKVILTIIHTLMAEEVYFSCLDDSGFSQEIKLNLANDLIMLWDSGTDPRTVRHLPSLDALWTARDSSPPAFGTMNATSELLRISIDMGEDWQDFLVANISINETRWALEEFLFGLSYEEINSVRSRLMKFGINAIGHDEIPSFLGGHPAYGIINSSDYRAMYDFYVDRRDAARLRQKLSAPGPGRSLEEIYIKYRIALE

SEQ ID NO: 61831 - DNA, 492 bp, Unknown
  Obtained from environmental sample
  misc_feature (1)..(492): n is a, c, g, or t
atgtctgagacaaattataaaaggcctacctgggatgaatacttcatggaagtatgcgaggccatatccaagcgggcaacctgcgaccgtggccgatccggctgcgtaatcgcaaagggcaaccaactgcttgtaacaggttacgttggggctccggcagggcttcctcactgcgacgaagcgggccaccagttcaaaaaaatgcttcatgaagacggctcggtaacaacccactgtgtaagaaccgtacacgccgaacaaaacgcgatttgccaggcggcaaagtgcggtattccgattgaaggcgcaaccttatattgcagaatgacaccgtgcaggacctgcgccatgcttatcattaactgcgggataaagagggtagtgtgccagaggcgttaccacgatgcggacgattcggaggcgatgtttaagcttgttggaatcaaacttgaatatgtgtataacgaaacccagcaatacgtcgatcaataa

SEQ ID NO: 61832 - protein, 163 aa, Unknown
  Obtained from environmental sample
  DOMAIN (9)...(131): Cytidine and deoxycytidylate deaminase zinc-binding region
  misc_feature (1)..(163): Xaa is any amino acid
MSETNYKRPTWDEYFMEVCEAISKRATCDRGRSGCVIAKGNQLLVTGYVGAPAGLPHCDEAGHQFKKMLHEDGSVTTHCVRTVHAEQNAICQAAKCGIPIEGATLYCRMTPCRTCAMLIINCGIKRVVCQRRYHDADDSEAMFKLVGIKLEYVYNETQQYVDQ

SEQ ID NO: 61833 - DNA, 810 bp, Unknown
  Obtained from environmental sample
  misc_feature (1)..(810): n is a, c, g, or t
atgtcaattagtgttttaattcctatgattattcctattataagcgtcggcggtttggcgctgttgttcggtatagttcttggtttttccgcgaaaaaattcgccgttgaatccgacccgaaagtggatcgaataataaaaatactgcccggcgctaactgcggcggctgcggcttccccggttgcagcatattcgcggaacgtgttgttacaggcgaagctaattacagcggatgctctccgggagggcagtccgccgccacaaaaatcgctaatgaattgggaattaacgcggctgaggttaaccgcaaagcggcatttattaaatgcgatggatcagataataataccagaagaaattataaatacgacggtcctaaaagctgcgtgtcggcgtcccagcttgccacaggcggaaataaaacctgcgcttacagttgcatagggcttgaaagctgtaagaacgcctgccaattcggcgcgataaaaatggtggacagcatagccgtagttatcagagcaaaatgcaccgcgtgcggaaaatgcgttaaggtgtgtccgaaacatcttatagaaatagtcccggacaagaacgcggtgcgcgtcgtgtgcaactcaagagacagggcaaaagcggttagggatagctgccgcgcgggatgtatcggctgtacgctttgtcaaaggaactgcaaagtgggagcaattaccgttgtggataatatcgcgcatattgattatgaaaaatgcgtacaatgtatggagtgcgttaataaatgtccgtccaaggcaataaaggtaatcaggtaa

SEQ ID NO: 61834 - protein, 269 aa, Unknown
  Obtained from environmental sample
  DOMAIN (48)...(82): Putative Fe-S cluster
  misc_feature (1)..(269): Xaa is any amino acid
MSISVLIPMIIPIISVGGLALLFGIVLGFSAKKFAVESDPKVDRIIKILPGANCGGCGFPGCSIFAERVVTGEANYSGCSPGGQSAATKIANELGINAAEVNRKAAFIKCDGSDNNTRRNYKYDGPKSCVSASQLATGGNKTCAYSCIGLESCKNACQFGAIKMVDSIAVVIRAKCTACGKCVKVCPKHLIEIVPDKNAVRVVCNSRDRAKAVRDSCRAGCIGCTLCQRNCKVGAITVVDNIAHIDYEKCVQCMECVNKCPSKAIKVIR

SEQ ID NO: 61835 - DNA, 576 bp, Unknown
  Obtained from environmental sample
  misc_feature (1)..(576): n is a, c, g, or t
atgacattattttttgtattagtcggcgcaatattaattaacaattatgttcttgttcaattcctgggaatgtgcccattcttcggcgtttccaaaaaaatagaaaccgccgtcggtatgggattatccgttatctttgtaatgacgatagcgtccgccattacttatactttttataaatttgttttggttccgttcaatattacctacctgttaacggtcgcttttattttgataatcgcttctattgtacaatttgtagaagtgtttatgaaaaaaatgtttaaggcgctgtataccatgttgggcgtgtatcttccgctgattacgacaaactgcgcgatattcggcgtaacgattatcaatattaaaaatgaatttacgtttgtcggatcaatcgtaaacgctgttggagcgggcatggggtttactcttgccatagtagtgcttgccagtatccgcgaaaagtatgaagccgaccccgatattcccgaaatattcagagggtttccgctggcgttattttccgccgggcttatgagcattgccttcatgggttttataggtttgatataa

SEQ ID NO: 61836 - protein, 191 aa, Unknown
  Obtained from environmental sample
  DOMAIN (1)...(191): Rnf-Nqr subunit, membrane protein
  misc_feature (1)..(191): Xaa is any amino acid
MTLFFVLVGAILINNYVLVQFLGMCPFFGVSKKIETAVGMGLSVIFVMTIASAITYTFYKFVLVPFNITYLLTVAFILIIASIVQFVEVFMKKMFKALYTMLGVYLPLITTNCAIFGVTIINIKNEFTFVGSIVNAVGAGMGFTLAIVVLASIREKYEADPDIPEIFRGFPLALFSAGLMSIAFMGFIGLI

SEQ ID NO: 61837 - DNA, 522 bp, Unknown
  Obtained from environmental sample
  misc_feature (1)..(522): n is a, c, g, or t
atgagatattacattcaactttttaaagacggtatttacaataaaaaccccgtgcttgtgcaggtcttggcgttatgtcctctgcttgccgttacaacttccgcgactaacgctatcactatggggctttcaactacagcggtaatgatctgcgccagttcggctatttctcttatacgaaaacttatgccgagcgagattcgcattgcgacctcggttgtggtagttgccggttttgttactattctttcattattattggaagcatacgcgcccgcnaatgtaagcgaagcgcttggtatttacattcccctattacccgttaactgcatagttttcgctcgcgttgaggcgttcgcgtcaaaaaataaacttttcccctcgatgattgacgccctaggcatgggattgggttttactttgggactttttatcgtcggcgttatacgtgaatttttcggcagcggtcaatcttcgggtttgagcttatacacgatcctacggcgcatgtgcttatcatga

SEQ ID NO: 61838 - protein, 173 aa, Unknown
  Obtained from environmental sample
  DOMAIN (1)...(169): Rnf-Nqr subunit, membrane protein
  misc_feature (1)..(173): Xaa is any amino acid
MRYYIQLFKDGIYNKNPVLVQVLALCPLLAVTTSATNAITMGLSTTAVMICASSAISLIRKLMPSEIRIATSVVVVAGFVTILSLLLEAYAPANVSEALGIYIPLLPVNCIVFARVEAFASKNKLFPSMIDALGMGLGFTLGLFIVGVIREFFGSGQSSGLSLYTILRRMCLS

SEQ ID NO: 61839 - DNA, 630 bp, Unknown
  Obtained from environmental sample
  misc_feature (1)..(630): n is a, c, g, or t
atgaattatataatcaaacctgcggcttcgctttttattgccgctgcgataactgtcgcggctttaagttttgtgtataacaaaacttatgaagccatcgaaaaacaaaaaaataaagttcaggaagaagcgatgaaggagcttttgccgaaagccgataacttcaaagaattacaagcggaattcacgggaagcattagagccgtatacgaaggttattatgaaactgataaattggataacagcgttatggtcggctatatttttaaactttccccgtcagggtacagcggcgagatagattttcttgccggtgtttccattctggatgataaacaaattacaggtatacgcatattgcgccacagcgaaacgccgggtcttggcgcgcttgcggttaaagaagatttttacgggcaattcagcggacgcgctctttcgccgcttagagtttcaaaatcttctcccggcagggatgagattcaggcgattacaagcgcgacaattacttcaagggcgattacaaacgccgtaaacgaagcggtagagtggtgtttggcggctgaaagacagcctgaacctgaaaaagaagaaaatgccgatttactttttaatgaggtagaattatga

SEQ ID NO: 61840 - protein, 209 aa, Unknown
  Obtained from environmental sample
  SIGNAL (1)...(25)
  DOMAIN (95)...(185): FMN-binding domain
  misc_feature (1)..(209): Xaa is any amino acid
MNYIIKPAASLFIAAAITVAALSFVYNKTYEAIEKQKNKVQEEAMKELLPKADNFKELQAEFTGSIRAVYEGYYETDKLDNSVMVGYIFKLSPSGYSGEIDFLAGVSILDDKQITGIRILRHSETPGLGALAVKEDFYGQFSGRALSPLRVSKSSPGRDEIQAITSATITSRAITNAVNEAVEWCLAAERQPEPEKEENADLLFNEVEL

SEQ ID NO: 61841 - DNA, 594 bp, Unknown
  Obtained from environmental sample
  misc_feature (1)..(594): n is a, c, g, or t
atgaccactgaggaaatgctgcggttaaaaggggctcactttgctccctatatacagcttgccactgttctcatcgggaaaacccgatccggcggcggtaatatgttcaggcatcagcttgataccatggctattctcattgactacggtcacattgattccgttctgatcaaagccgcgatagtccacgatattcttgaagacattcccgattttaaccataatctgtttttttccattgactacgaaggccatgaagtttatgaacttgtccgggaagtgaccaaaaacccgggagaaaccaaacccgcatttcttacccgcattcttgaatcaggttcgcaaaacgccaaaattctgaaagtggcggatcgaatctccaatatgatttctctgggttttgtaaatgatatggaatttgtcaatcgttataccactgaaacggaacagtatgtttttcccatagcggaactggtagacaagtccatgctgaaggagttgcaatccctggtagaatcccggcgcagatatgtcaccgatttatcaaaaaacaattcggaagaatcatccgccgatgccactgattttttgtga

SEQ ID NO: 61842 - protein, 197 aa, Unknown
  Obtained from environmental sample
  DOMAIN (35)...(129): HD domain
  misc_feature (1)..(197): Xaa is any amino acid
MTTEEMLRLKGAHFAPYIQLATVLIGKTRSGGGNMFRHQLDTMAILIDYGHIDSVLIKAAIVHDILEDIPDFNHNLFFSIDYEGHEVYELVREVTKNPGETKPAFLTRILESGSQNAKILKVADRISNMISLGFVNDMEFVNRYTTETEQYVFPIAELVDKSMLKELQSLVESRRRYVTDLSKNNSEESSADATDFL

SEQ ID NO: 61843 - DNA, 453 bp, Unknown
  Obtained from environmental sample
  misc_feature (1)..(453): n is a, c, g, or t
atgatccgtactctgcgcagcgagtgtaccatcaatcctgacaagaaactgcgggtcaatgtccgcctggccgccgaacaggagcgggtattgaaggacaatgaacaactggtaaaactccttgccggtatcagtgaaatggaaattaaaaccacaggcggcggaacgggcggcgcggcgggaaaccgtccggctggctctatcggtatggcaggttcaggttttgaggtttttgtgtttatcgccgaagcggtggacattactgcgcttaaacaaaaattcaacaaagaccttgaacgtgatcgggcatttatccggggattgcagacaaaactggcaaatgaacagtttgtcaaaaacgctccgccggagctggtatccgctgaaaaaacgaaactggaagatggccttgcgcggacaaacaagattgaatcttggctgcatgatctgtaa

SEQ ID NO: 61844 - protein, 150 aa, Unknown
  Obtained from environmental sample
  misc_feature (1)..(150): Xaa is any amino acid
MIRTLRSECTINPDKKLRVNVRLAAEQERVLKDNEQLVKLLAGISEMEIKTTGGGTGGAAGNRPAGSIGMAGSGFEVFVFIAEAVDITALKQKFNKDLERDRAFIRGLQTKLANEQFVKNAPPELVSAEKTKLEDGLARTNKIESWLHDL

SEQ ID NO: 61845 - DNA, 1311 bp, Unknown
  Obtained from environmental sample
  misc_feature (1)..(1311): n is a, c, g, or t
gtgcttgaagacctcaaggcgggcggctggtatataaaagaagaaaacatcacccacgcggtggggcaatgttaccgctgccatacgataatagagccttatctttccgagaggaagcagtggtttgtcaggatggggcccctcgcggaaaaagccctgaccagttggaggcggggggaactcatcttctacccccgcaaatgggagcacacataccggcactggctggaaaacatacgggactggtgcataagccgccagctctggtggggacacagaatccccgcgtgggactgcnagggctgcggcaaaacttcagtgtcgcgtaacgacctttccgtttgccccactgcggttcctcaaacattgagcaggatcccgatgtgcttgatacctggttttcagctggctctggcctttcgcacattgggctgggagaacgcggattgcgataccaatgatttcaagaaattttacccgaccacggcgctgataaccgcttatgacattatcttcttctgggtatcaaggatgattatggcgggacttgagtttaccggcaaggcgccgttccgcgacatttacatccacggccttgtgcgggacaaactgggccgcaaaatgagcaaaagcctgggcaacgggcttgacccgctggaactggtggatgaatacggcgcggacgcgcttaagtttacgctggcttttatgtgcgcccagggacaggatattctggttgataaagattctttcaaaatgggttcaaaattcgcgaataaaatctggaacgccagccgctatatattaatgaatctggaagggttgaatttagtacaaaatcccgaactgctcgccgtggacaaatggatctactcacggctgaacgcggccgctaaaagaatggaagaagcgttcctctcctaccgctacaacgacgccgcgcagacggcatacgaatatttctggaatgatttctgcgactggtatgtcgaggcgaccaagctgtcaatgaaagcgggggacggcgctaacggcgctaacggcgctaacgcggccgaaaaagaccgcgccgtcacggtattgcttgacgttctctcggaatctttgcggctcctgcaccccctcctgccctttgtcaccgaggaaatctacggtaagctgcccaacgtaaaaggccttttgattacagcccaatatccgcgattcaacgaagaacgctgttatcctngaagaagagcggcattttgcttttctgcaggaacttgtccgcatgatccgtactctgcgcagcgagtgtaccatcaatcctga

SEQ ID NO: 61846 - protein, 436 aa, Unknown
  Obtained from environmental sample
  DOMAIN (1)...(247): tRNA synthetases class I (I, L, M and V)
  misc_feature (1)..(436): Xaa is any amino acid
MLEDLKAGGWYIKEENITHAVGQCYRCHTIIEPYLSERKQWFVRMGPLAEKALTSWRRGELIFYPRKWEHTYRHWLENIRDWCISRQLWWGHRIPAWDCXGCGKTSVSRNDLSVCPTAVPQTLSRIPMCLIPGFQLALAFRTLGWENADCDTNDFKKFYPTTALITAYDIIFFWVSRMIMAGLEFTGKAPFRDIYIHGLVRDKLGRKMSKSLGNGLDPLELVDEYGADALKFTLAFMCAQGQDILVDKDSFKMGSKFANKIWNASRYILMNLEGLNLVQNPELLAVDKWIYSRLNAAAKRMEEAFLSYRYNDAAQTAYEYFWNDFCDWYVEATKLSMKAGDGANGANGANAAEKDRAVTVLLDVLSESLRLLHPLLPFVTEEIYGKLPNVKGLLITAQYPRFNEERCYPXRRAAFCFSAGTCPHDPYSAQRVYHQS

SEQ ID NO: 61847 - DNA, 708 bp, Unknown
  Obtained from environmental sample
  misc_feature (1)..(708): n is a, c, g, or t
atggagatccgcgtcgaagtgaagggcgtttcctgccacggctccgctcccgaacgcggcgacaacgcgatctacaagatgggggaaataatcgccgaggttaaggctctgaacaaaaaactgaaaaaagacaagttcctcggcaaggggacactggcggtttcgcagatctatttcagctcgccttcccgctgcgccgtcgccgacatgtgcgccatttccattgaccgccgcctgaccgcgggcgaaacctacaaaagcgccctcgcggaaatagacgccctgcctaaggtcaaagaatacaaggccaaagtcagcatgtacaagtacgatcagcccagttacaccggcgtggtatatccaattgattgctattttcctacctgggttataccggaagacgccaagccggcaagggcgatggtaaaggcctataagggaatgttcggcaagccaaaggttgacaagtggactttttcaactaacggcgtttcgatcatgggcaggaacaaaatcccctgtatcggcttcggccccggcaaggaagagcaggcccacgcccccaacgagaagacatggaaagccgacctcgtccgctgcgctgccgtatacgccgccttaccgagtatatatactggcggagagttgaatgagaaaaagagcaagagaaagaaagctaagaggaagaagaaagggagtagggagtag

SEQ ID NO: 61848 - protein, 235 aa, Unknown
  Obtained from environmental sample
  DOMAIN (1)...(104): Peptidase dimerisation domain
  misc_feature (1)..(235): Xaa is any amino acid
MEIRVEVKGVSCHGSAPERGDNAIYKMGEIIAEVKALNKKLKKDKFLGKGTLAVSQIYFSSPSRCAVADMCAISIDRRLTAGETYKSALAEIDALPKVKEYKAKVSMYKYDQPSYTGVVYPIDCYFPTWVIPEDAKPARAMVKAYKGMFGKPKVDKWTFSTNGVSIMGRNKIPCIGFGPGKEEQAHAPNEKTWKADLVRCAAVYAALPSIYTGGELNEKKSKRKKAKRKKKGSRE

SEQ ID NO: 61849 - DNA, 1278 bp, Unknown
  Obtained from environmental sample
  misc_feature (1)..(1278): n is a, c, g, or t
gtgaaagtaacatgcaatgctttcgaacaagaactcgactcccgactccccactcccgactcccaatatacaaggagtaaacaaatggcttacatcaatcaatacgcgtccaggttggataaactcaacttcaaggacatgttcggcggggatttttttctgacctgggaaaaaaccttcgatgaaattctcgcgacctttacggtggcggacgctttgcgctggctgagggagaacaacatatcaaccagaatttttgattcggggctcggcatttcactgttcagggacaactcgacccgcacccgtttcagttttgcctcggcctgcaatctgctcggcctcgcggttcaggatttggacgaggggaaatcccagatcgcccacggggaaaccgtgcgggaaacggccaacatgatctcctttatggcggacgttatcggcataagggacgacatgtacatcggcaagggcaacacctatatgcgcgaggtcgcaaaagcggtacgcgaaggccacgtcgacggcaaccttgaacagtgtcccacgctggtgaacctccagtgcgacatcgatcatcccacacaggcaatggccgacatgaaccacatcatccggcacttcggcggaattgacaaactcaagggaaagaaaatcgccatgacatgggcgtattcgccctcttacgggaagcccctgtccgtgccccagggcgtcatcggcctgatgacccgcttcggcatggatgtgcatctcgcccaccccgaaggctacgaggttatgcccgaggtcgaggcggtggcgaagaagaacgcggctttaagcggcggcaaattctccaaatcaaattccatgcatgaggcttttcataacgccgacatcgtgtatccaaagagctgggcgcccttcgccgcgatggaaatacggaccaatctgtacggcaacagcgactttgacgggataaaggccctggaaaaagagttgctggcgcagaacgccaaacacaaggactgggaatgtaccgaaaaacttatgaaagcgaccaaagaaggcaaggccctgtacctgcactgcctgcccgccgacatttcgggcattagctgcaaggaaggggaggtcgccgccacggtcttcgaccgttaccgcgtccccctttacaaggaagcgagccacaagccctatatcatcgccgcgatgattttcctttccaagatcaagtgtccgcaggaaaccctggcgaatatggttttgcggaataaccccaggcatttcagctaa

SEQ ID NO: 61850 - protein, 425 aa, Unknown
  Obtained from environmental sample
  DOMAIN (214)...(403): Aspartate/ornithine carbamoyltransferase, Asp/Orn binding domain
  misc_feature (1)..(425): Xaa is any amino acid
MKVTCNAFEQELDSRLPTPDSQYTRSKQMAYINQYASRLDKLNFKDMFGGDFFLTWEKTFDEILATFTVADALRWLRENNISTRIFDSGLGISLFRDNSTRTRFSFASACNLLGLAVQDLDEGKSQIAHGETVRETANMISFMADVIGIRDDMYIGKGNTYMREVAKAVREGHVDGNLEQCPTLVNLQCDIDHPTQAMADMNHIIRHFGGIDKLKGKKIAMTWAYSPSYGKPLSVPQGVIGLMTRFGMDVHLAHPEGYEVMPEVEAVAKKNAALSGGKFSKSNSMHEAFHNADIVYPKSWAPFAAMEIRTNLYGNSDFDGIKALEKELLAQNAKHKDWECTEKLMKATKEGKALYLHCLPADISGISCKEGEVAATVFDRYRVPLYKEASHKPYIIAAMIFLSKIKCPQETLANMVLRNNPRHFS

SEQ ID NO: 61851 - DNA, 954 bp, Unknown
  Obtained from environmental sample
  misc_feature (1)..(954): n is a, c, g, or t
atgaaaaagcgcatagtcattgcccttggtgggaacgctctgggggataaccttaaagagcagatggcggcggccagggtaacctccggcgccatagtggatctggttgaggaaggccacgagatcgtcattgttcacggcaacggcccccaggtggggatgatcgaaaccgccttcgagaccgccgccaaagccgacaggcattttccggtgctgcccatgtcggtctgcgtggccctgagccagggttatatcggctacgatttacagaacaccatacgcatggagcttgaccacaggaacatgaaaaaagaggtcgccacgattattacgcaggttgaggttgaccccaatgacaaggcctttgaagctccaactaagcccataggcggctttcacagccgggaagaggcggagattctcaagtccaagggcattccggtaatggaagacgcgggcaggggctggcggcaggttgtggcttccccgaaaccggtttacattattgaggctgataccatcaaggcgctgctggcgtcggggcagatccccattgccgcgggcggaggtgggattcccgtcgccatgaaggacggccagtaccggggcatgagcgccgtcatagacaaggatttttccgcggccaaactcgccgagcttatcggcgcggacatgctgatcattttaaccgcggttgaaaaagtcgcggttaattttggcaagccggatcaaaagtggctggacagcatgaccgtcgcccaggctgaacagtacatcgcggagaaccagttcgccaaaggctcgatgcttccaaaggtgcaggcttcaatcgcttttgtaaaatccaacaactttggcgccccacagcgcgggacgcacagcgcgctgattaccctgcttacaaaagcgcgtgacgggattgcgggtaaaaccgggacaagaataattccgtaa

SEQ ID NO: 61852 - protein, 317 aa, Unknown
  Obtained from environmental sample
  DOMAIN (3)...(299): Amino acid kinase family
  misc_feature (1)..(317): Xaa is any amino acid
MKKRIVIALGGNALGDNLKEQMAAARVTSGAIVDLVEEGHEIVIVHGNGPQVGMIETAFETAAKADRHFPVLPMSVCVALSQGYIGYDLQNTIRMELDHRNMKKEVATIITQVEVDPNDKAFEAPTKPIGGFHSREEAEILKSKGIPVMEDAGRGWRQVVASPKPVYIIEADTIKALLASGQIPIAAGGGGIPVAMKDGQYRGMSAVIDKDFSAAKLAELIGADMLIILTAVEKVAVNFGKPDQKWLDSMTVAQAEQYIAENQFAKGSMLPKVQASIAFVKSNNFGAPQRGTHSALITLLTKARDGIAGKTGTRIIP

SEQ ID NO: 61853 - DNA, 450 bp, Unknown
  Obtained from environmental sample
  misc_feature (1)..(450): n is a, c, g, or t
ttgttactttcatgccacgttcccgaacaaaatcttttccttccctctgcgcctttgcgttctctgcgtgaggaattgggaataatgttaggaggatttatgagtgagatcatgaggcccatacccttcccggagttaatacaatgggtgaggggcgagtataaaaaccacggttctgtttttggcgtacgaaaagagaagtttttccatccggccggttcggattgtatcgaaatgttcggaacgaaaataaaatctcccgtcggtcccgcggccggccccaattcgcagcttgcgcaaaacatcctcgcggcgtttcttgcgggcgcgcgttttatggagctcaaaccgtgcagacaatggacggcgaagaactgcngaaatgcgtcgcccggccctgtatcaacaccgttgacgaaggatacaacgttgaatggtcaaccgagctga

SEQ ID NO: 61854 - protein, 149 aa, Unknown
  Obtained from environmental sample
  misc_feature (1)..(149): Xaa is any amino acid
MLLSCHVPEQNLFLPSAPLRSLREELGIMLGGFMSEIMRPIPFPELIQWVRGEYKNHGSVFGVRKEKFFHPAGSDCIEMFGTKIKSPVGPAAGPNSQLAQNILAAFLAGARFMELKPCRQWTAKNCXNASPGPVSTPLTKDTTLNGQPS

SEQ ID NO: 61855 - DNA, 471 bp, Unknown
  Obtained from environmental sample
  misc_feature (1)..(471): n is a, c, g, or t
gtggagatcgaagaggcgttcagggaataccgggactccatgatacgggcaatgacttcgttttccggagacgatgaagcggcccttgacggggtttcccatgcgtttacccaggcactggtcaacaaactcatgctggagaccatgcccgaaccagccatgaaggcgtggctttacgcggcagcccgtaacgcagtggtggacatcaaacgccgtgaaacccgcttttaccgatttaccggggagaattgggactgcgagcttgccgatccccggtccgatgatccgctgggaaaagccatagcggaacttctgattgaaaagctccccgaatccctgcgcgtgccagtagaactgaaatactacggcggaatgaacgcttcggaaatcggagaggtaatgaacgttccggctgctacagtgcgaacgaggctgcgtgccgcactgaggcagttacggaaacaggaataa

SEQ ID NO: 61856 - protein, 156 aa, Unknown
  Obtained from environmental sample
  DOMAIN (99)...(152): Sigma-70, region 4
  misc_feature (1)..(156): Xaa is any amino acid
MEIEEAFREYRDSMIRAMTSFSGDDEAALDGVSHAFTQALVNKLMLETMPEPAMKAWLYAAARNAVVDIKRRETRFYRFTGENWDCELADPRSDDPLGKAIAELLIEKLPESLRVPVELKYYGGMNASEIGEVMNVPAATVRTRLRAALRQLRKQE

SEQ ID NO: 61857 - DNA, 507 bp, Unknown
  Obtained from environmental sample
  misc_feature (1)..(507): n is a, c, g, or t
atggggcaacactaccgatatgattcacaagaactggcgcaactgtatctggcggcgtcccttcacgatctcggcaaattggcaattccctctgaaattctggagaaacccggtaaactttctaatgaagaatttgaaactatcaaggggcatgttcgcatgacctgggagcttcttggcgatatcgaaggattagggactatatgccaatgggcatccaatcatcatgaaaaactggacggcagcggttacccatttgggaaaaaagcggccgaactggacttcaattccaggatgctgacctgccttgacttataccaggcgataagcgaagaaaggccctaccacccaaggcgcaatcacagcgacaccatacggatactctatgagatggcggatgtgggaaaaattgacggggatattgtcaaaggcatggatgttgctcttgccccatacgacggtaaagatatgccgccgcctgatggctgcgaaattaaaaataattaa

SEQ ID NO: 61858 - protein, 168 aa, Unknown
  Obtained from environmental sample
  DOMAIN (6)...(109): HD domain
  misc_feature (1)..(168): Xaa is any amino acid
MGQHYRYDSQELAQLYLAASLHDLGKLAIPSEILEKPGKLSNEEFETIKGHVRMTWELLGDIEGLGTICQWASNHHEKLDGSGYPFGKKAAELDFNSRMLTCLDLYQAISEERPYHPRRNHSDTIRILYEMADVGKIDGDIVKGMDVALAPYDGKDMPPPDGCEIKNN

SEQ ID NO: 61859 - DNA, 897 bp, Unknown
  Obtained from environmental sample
  misc_feature (1)..(897): n is a, c, g, or t
gtgcagggcgacggccctgtcaaagatattttctacaatcccaagctgaccgaatggacggattcttacgacggccgcaacagggaaccgctcttgttcccggcgaaaattcccgtagtgctgataatgggagccgaaggaattgccgtaggcatgtccacaaaaatacttccgcataacgccgtggaagtgctggaagcggagattgcctgcctttccgggaaaaaattcgagttgtacccggattttcccaccggcggccatatggatgtgtccgagtaccgggacggcaacgggaaggtgctggtcagggcgaaactcgacacttcggatccaaaacgcatactgatcaccgaactgccattcggctcaaccacggaaagccttataaacagcgtggaagccgcggcaaaaacgggcagactgaaaatccaggggataaacgactttaccacggacagggtcgaaatcgaggtgaaactggcccgcggcgtgtacgcgcgggaaaccatcgacgcccttttcgcctttaccgaatgtcagcagtccatctccgttaaccttcttgtgataagggacggcctgcccgccattatgaccgttgccgaggttatcaaacaccacgcgaaacagcttgtaaaaattctcacaaaagagcttgaactggaaaaaaaggagctgaccgacaaactccacctgcgcacgctggaaaggatatttatagaggagcgcatatacaaaggcatcgaaaaaatgaaaaccgccaaaggcgtacaggacgcggttatcgccggtttcaagccttttatgaaagaaataccgcaccgcgcgagggccaatccgaacgacgactggataacacctgagtgcgcatccccatccacaaacatatcttga

SEQ ID NO: 61860 - protein, 298 aa, Unknown
  Obtained from environmental sample
  DOMAIN (2)...(298): DNA gyrase/topoisomerase IV, subunit A
  misc_feature (1)..(298): Xaa is any amino acid
MQGDGPVKDIFYNPKLTEWTDSYDGRNREPLLFPAKIPVVLIMGAEGIAVGMSTKILPHNAVEVLEAEIACLSGKKFELYPDFPTGGHMDVSEYRDGNGKVLVRAKLDTSDPKRILITELPFGSTTESLINSVEAAAKTGRLKIQGINDFTTDRVEIEVKLARGVYARETIDALFAFTECQQSISVNLLVIRDGLPAIMTVAEVIKHHAKQLVKILTKELELEKKELTDKLHLRTLERIFIEERIYKGIEKMKTAKGVQDAVIAGFKPFMKEIPHRARANPNDDWITPECASPSTNIS

SEQ ID NO: 61861 - DNA, 750 bp, Unknown
  Obtained from environmental sample
  misc_feature (1)..(750): n is a, c, g, or t
ttgccggcgcatgatgaaatgctccagatacaggcccgcatcaaggaaattaacgcgcaccttaaaagcataaccgcgtattcaatcaatttcctgaaagggatcatcgccaagatacaggccaatgaggaactgggaaaaggagtcagaaaaacaaaagtcggcgcgtttgataaaatcgacgtaaaggaagcggccagaaaggacgttgaacttaaatatgacaaaaaaaccggctatttgggaaccaatgtcgccggggtaaaagtcgccgaggtctcgcctttcgaccgcatacttgcgattcggaaaaacgggatgtacacggtgacggatctgccggagaagctgtttataggggaagacgcatggtggataggcgcggcggacaaggaagaattgtccaaaacgatttttaccatcatctacagggagaaagaaacagggctcgcgtgcattaaacgctgcgtcattgagggctggataatgaacaaggactatttccttgtgcccgacggggcgcttgtcctccatattgacaccaggcccaaattcacattcacgttaaaatacacgccgaagccccggcttaaggtgctgtcggaggactttaaggcgcatgcctatcccgtgcgagggttaaaagccggagggatgaggctttcaaacaaacaagttgccaaaatggacttgtccaaaatggacttgtccaaaatggacattgggagaaaaaaagatggtgacgcctaa

SEQ ID NO: 61862 - protein, 249 aa, Unknown
  Obtained from environmental sample
  misc_feature (1)..(249): Xaa is any amino acid
MPAHDEMLQIQARIKEINAHLKSITAYSINFLKGIIAKIQANEELGKGVRKTKVGAFDKIDVKEAARKDVELKYDKKTGYLGTNVAGVKVAEVSPFDRILAIRKNGMYTVTDLPEKLFIGEDAWWIGAADKEELSKTIFTIIYREKETGLACIKRCVIEGWIMNKDYFLVPDGALVLHIDTRPKFTFTLKYTPKPRLKVLSEDFKAHAYPVRGLKAGGMRLSNKQVAKMDLSKMDLSKMDIGRKKDGDA

SEQ ID NO: 61863 - DNA, 777 bp, Unknown
  Obtained from environmental sample
  misc_feature (1)..(777): n is a, c, g, or t
atgaaggagcttataatgaaaaaggaatttagtctatgtatcgtgataattacactcgcttgtttaattgtaggatgtattccagttggtaaaattgataaggatagaaatttagtcattcgtgacggtgttacttctattagtgactataaattttttaataaaaatttacagagtgtgacaattcctaatagtgttacttctatcggctttgctgcttttggtaacaaccaactgaccagcgtaacatttggaaatggcgtgctttctatcggtgttagtgcatttgaaaacaacaaactgactgttgtcagcattcctaacaatgttacttctatcaatatgaaaacattttccaataaccaactgactagcataactattcctaacagcgttattaatatagaaagttatgcatttgaaaacaaccaactgactagcgttaccattggtaatagtgttacttctattggtcataatgcatttgctaacaaccaacttacaagtattactgttcctaacagcgttaattctatcggagataaggcatttgctgataatccgctcactagcgtaaatattccagacagtgttaccacatttaacaacgatgtattttcaggagcaagtaacttaacacgcattagcattggtgcaaatgttaatattacagggtctgaagccatagcatttagttttgaagattactatttgctcaataatcggcaagcaggagtttacactttcagtaatggtaaatggaattttcaaatttag

SEQ ID NO: 61864 - protein, 258 aa, Unknown
  Obtained from environmental sample
  misc_feature (1)..(258): Xaa is any amino acid
MKELIMKKEFSLCIVIITLACLIVGCIPVGKIDKDRNLVIRDGVTSISDYKFFNKNLQSVTIPNSVTSIGFAAFGNNQLTSVTFGNGVLSIGVSAFENNKLTVVSIPNNVTSINMKTFSNNQLTSITIPNSVINIESYAFENNQLTSVTIGNSVTSIGHNAFANNQLTSITVPNSVNSIGDKAFADNPLTSVNIPDSVTTFNNDVFSGASNLTRISIGANVNITGSEAIAFSFEDYYLLNNRQAGVYTFSNGKWNFQI

SEQ ID NO: 61865 - DNA, 1698 bp, Unknown
  Obtained from environmental sample
  misc_feature (1)..(1698): n is a, c, g, or t
ttgggagcggaactaaccgtcatttcatatcttgactacatcaaagaaaaaaatccccgaacggtaatcgcgcagccatgccccgcgattgtaacttatatcgaaattcatcaccctgaattattgccctttctcgctccggcggacagccctatcctgcatacaattaaaatgataaaaaaattttatcctaaatataaaaaccacaagatagctgtaatttctccctgcattgccaaacggcgtgaatatgacgaaacaggtctgggtgattacaacgttacaatgattgaattaaaaaaccttctggaaagtcagggaatagacctctcctcatttccaaaagtagaatataccggagtaagcgcggaacgtgcggccggatttccgattcccggagggcttttggataccgccgagcgttttgttcccggcatcagacggcgcaccgaaaaaattgaaggagttcataacatctatccttacttgactgaaatatcggaaatattgaacaccaatgcccaactgccgttattgattgactgcttgaattgcgaaaaaggctgtatcggcggacccggcacggggaatgccgaaaaaccgcttgctatgctaaaagaaccggtacaaaagcgcatggctgaactggaaaaacaacaacaacattctcaaatcggaaatcacacatataaaaaatatcacgatactttgagtaagtattggaagagaggactgtataaccggagctaccgcaatctttccgagaacaatacaatcaaacaccctagcgaaactgaaataactgaaattttccatactatgagaaaatacaaaaaggaagatatatacaactgtacttgctgcggttacggaagctgtaaagcgatggcaacggcaatttacaacaaactgaacaaacatgaaaattgcgcccattatattctagccttgctcaaggagaatcaggaacacattgccaacgcttcagaccttattgaaaggataaacaaattaatacaggaattaaacgctactatcgtctcacaggcgaaggcagttgataactcatcagcggaaaccgaagaaataatcacctcgattaaaaacacttcggaaatgtcccttaaacagcaggaatcagtaaaagatttgatggaagttgcgggacttgggcaagaatccatgaaaaaaaccattcaatcaataagtgaaatctctcaatctgttgaaggtataagttcgacaatccgcataatttcttcaatagcggcaaataccaatttgctgtcaatgaatgcggcgattgaagccgcccacgccggagaagccggaaagggctttgcggtagtcgccggagaaatacgccgtctttcagaaaccaccagagataattcagtaagtatttcccgtacacttaaaagtattatcggcgggatatccgacacgacaaaacaatccggcgagacagatacacgaatagcccaaatgtcaaaagagataagcggttttgccgaaactatgtctgcttttatgaacacgtttaatgaattatcggcaaaaagcgaaaacattacctcctctcttataagcctaaaagaacaaagttcggcggttaaaacaagttatgcgcaaatgattgaaatgacaaataaactttctaaagcgttgaaagacttatccaacttatcaaaaagataa

SEQ ID NO: 61866 - protein, 565 aa, Unknown
  Obtained from environmental sample
  DOMAIN (11)...(196): Iron only hydrogenase large subunit, C-terminal domain
  misc_feature (1)..(565): Xaa is any amino acid
MGAELTVISYLDYIKEKNPRTVIAQPCPAIVTYIEIHHPELLPFLAPADSPILHTIKMIKKFYPKYKNHKIAVISPCIAKRREYDETGLGDYNVTMIELKNLLESQGIDLSSFPKVEYTGVSAERAAGFPIPGGLLDTAERFVPGIRRRTEKIEGVHNIYPYLTEISEILNTNAQLPLLIDCLNCEKGCIGGPGTGNAEKPLAMLKEPVQKRMAELEKQQQHSQIGNHTYKKYHDTLSKYWKRGLYNRSYRNLSENNTIKHPSETEITEIFHTMRKYKKEDIYNCTCCGYGSCKAMATAIYNKLNKHENCAHYILALLKENQEHIANASDLIERINKLIQELNATIVSQAKAVDNSSAETEEIITSIKNTSEMSLKQQESVKDLMEVAGLGQESMKKTIQSISEISQSVEGISSTIRIISSIAANTNLLSMNAAIEAAHAGEAGKGFAVVAGEIRRLSETTRDNSVSISRTLKSIIGGISDTTKQSGETDTRIAQMSKEISGFAETMSAFMNTFNELSAKSENITSSLISLKEQSSAVKTSYAQMIEMTNKLSKALKDLSNLSKR

SEQ ID NO: 61867 - DNA, 954 bp, Unknown
  Obtained from environmental sample
  misc_feature (1)..(954): n is a, c, g, or t
atgacaggatcgtggaaaaagcgctggaagtacgcgcgctgcaagatcaagatagtggacgtgcccgttcccgtggcttacggcccggcttttgagggggagagaatccgcaaggaagacacccacgcggagttcggcgggaataaaaccctcgccttcgagtatgtcaccagcgcggaatacgatgatattacagacggcgaaatccggatcatcggtccggacatagacacaattaagcccggagggcttcttcccctcggcatttgggtggaagtagccggacgcaagatgcagtccgactttgagcccatactggaacgccaaattcatcatttggtcaacggcgcggaaggaatttggcacatgggccagcgggacatagtctggacacgtgtctccaaaggcggctttgccaagggcttaaggctaaggcattacggcgaaattattcacgcccggtttttgtccgattaccccgccattgtggacaaggtacgcgtaacgcttgttaccgaccaggccgaggtggaaaagcggcttgcaatcgcccgcagagtatacgatgagcgcaaccgccgtctggaggctatgaccgacgaatcggtggaaaccttctactcctgcctcctctgccagagtttcgcccccaaccacgtctgcgtaattacgccggaacggctgggcctttgcggcgcgtacaactggctggacggcaaggcggcttacgaaattgatgaaaccggccccaatcaaccccttaaaaagggcgagtgccttgacccggtcaaggggatatgggcgggcgttaacgagtatgttaacacgaacagccacaaggcgatcgattctttctgcgcctactccatcatggacaggccaatgacgagctgcggctgctttgaggctatttgcgcatatgtgcctgaagtgcaacggcgtaatgatcgttaa

SEQ ID NO: 61868 - protein, 317 aa, Unknown
  Obtained from environmental sample
  DOMAIN (20)...(316): CO dehydrogenase/acetyl-CoA synthase complex beta subunit
  misc_feature (1)..(317): Xaa is any amino acid
MTGSWKKRWKYARCKIKIVDVPVPVAYGPAFEGERIRKEDTHAEFGGNKTLAFEYVTSAEYDDITDGEIRIIGPDIDTIKPGGLLPLGIWVEVAGRKMQSDFEPILERQIHHLVNGAEGIWHMGQRDIVWTRVSKGGFAKGLRLRHYGEIIHARFLSDYPAIVDKVRVTLVTDQAEVEKRLAIARRVYDERNRRLEAMTDESVETFYSCLLCQSFAPNHVCVITPERLGLCGAYNWLDGKAAYEIDETGPNQPLKKGECLDPVKGIWAGVNEYVNTNSHKAIDSFCAYSIMDRPMTSCGCFEAICAYVPEVQRRNDR

SEQ ID NO: 61869 - DNA, 981 bp, Unknown
  Obtained from environmental sample
  misc_feature (1)..(981): n is a, c, g, or t
atgtcaaagctaatctgtaccagcgcaatagacggagcggtctcctttgtcgcccaggccattaacatggtggaacagtctcttaaacaaaaaggccctgactgtcctgtgtcctttcccgataccaactattacctgcctgttatttattcctttactggcaaacaaataaaaacagtagcggatttaaaaaatattcttgaggaagccaaatcgctcctgcctgcccggcccgccgaaaacacctggctgccatatctgggcagcgcccttgacgccggtgtggcggcgctctatgcctgcgaagtaatagaagcatgcaaatatctgatcggccccaacccggtggacggtatctggcttggcgcggccaacgatgtcatcatgcgcgagcggggaatagagttcgttgacggcacggcccccggcttcgcggccataaccggcgcggcgccggacaacgcaacggcggtgaagatcgccaaagagctccagcaaaaaaacctttacgttttcatgggcggctgtacgaacggcattcagttcgccgagcagttggccgccgaaggcgtacagctcggctgggaaacgcgcctcgtgcctttcgggcgggatgtttccgcgctgatttacgcccttggctttgccaaccgcgccgcgctctctttcggcggagtaaagccgggagatttcgaagcgaatcttaaatacaacaaaaacagaatcttcgcctttgttatcgccctgggcgaggtaacgcccgacaagtatgcggcggcggcgggggccatcaactacggattccccgtaatttccgacacggatatccctgaaattttaccaaccggcgtatgtacctacgagcacgtggtctccaaagtcccgcatgacaggatcgtggaaaaagcgctggaagtacgcgcgctgcaagatcaagatagtggacgtgcccgttcccgtggcttacggcccggcttttga

SEQ ID NO: 61870 - protein, 326 aa, Unknown
  Obtained from environmental sample
  SIGNAL (1)...(20)
  misc_feature (1)..(326): Xaa is any amino acid
MSKLICTSAIDGAVSFVAQAINMVEQSLKQKGPDCPVSFPDTNYYLPVIYSFTGKQIKTVADLKNILEEAKSLLPARPAENTWLPYLGSALDAGVAALYACEVIEACKYLIGPNPVDGIWLGAANDVIMRERGIEFVDGTAPGFAAITGAAPDNATAVKIAKELQQKNLYVFMGGCTNGIQFAEQLAAEGVQLGWETRLVPFGRDVSALIYALGFANRAALSFGGVKPGDFEANLKYNKNRIFAFVIALGEVTPDKYAAAAGAINYGFPVISDTDIPEILPTGVCTYEHVVSKVPHDRIVEKALEVRALQDQDSGRARSRGLRPGF

SEQ ID NO: 61871 - DNA, 1644 bp, Unknown
  Obtained from environmental sample
  misc_feature (1)..(1644): n is a, c, g, or t
gtgttgaaactgcgggatgttgcccagggtaaagctcccggttttcagatcaaggacgaaaaagccctgcgccgggccgcgtggctntacggtgtggaagaagaaggcagggacgccaacgcggtggccctggacctctcgaacgtgttcatcagggaatttacagaacaggaagaacaccttaagaccctggagcttgcgccaaagaaacgccaggctgtgtgggaagcgaccggcgtcaagccgaacggcatcgatcgcatggtggtagaggcgatgcacagaacacacatgggcgttgaccatgactacctcaacctgctgcaccacgcctttaaagtatccctggccgacggctggggcggctcgcgtatagcgtccatcacttccgacatcctttttggaacaccgacaccgctgaaaagcgcggccaatctcggcgtgctaaagaaagaaaccgtaaacattattatccacggccatgaacccgccctttcggagttactgaccgtcgtcgtggccgacccggagattgtctcatacgctaaagccgccggcgcgaacggcatcaccctggcgggcatctgctgtaccgccaacgagattctgatgcgccacggagtccccgtggccggtaactttttgcagcaggagctggcaatcgccaccggggccgttgagttgatggtcatcgacgtgcagtgctgtatgccgagccttcctgaaatagccaaaagttaccacaccgagatcgtttctacttccgacatagcaagaaccatcggcgcggttcacaagagtataggccacggcagcgagccgctaaatgtagccagggatattgtaagacgtgccatcgccaatttcaaaaaacgcgacgcagcgaagatcagcatacccaaacaaaaggaagacctcatcgcgggtttttccgtggacgccataaagtacatgctgggcgggcgattccgcgcttctttccggcccctgaatgacgcgatcatgcaaaacagaattttgggcgtggtgggtatcgtgggctgtaacaacacgaagtgtaaaacggacgaatataccaatgtgcttaccgccgaattaataaagcggaacgtgctcgtgcttcagacaggctgctcggcaattgccagcgcgaaggcggggatgctcaagcccgaagtggctttgagccaggccgggcctggtttgcgggaggtctgcgaggctgtcggtatcccgcctgtcctgcaccttggcagttgcgttgacaacagccggatactggaagccgccaccgaatcgattcttgagggtggccttggtgaagatatggggggctatcccgctgtgggcgtcgcgcccgaatggatgagcgaaaaagccgttgccatcgcctgttactttgtggcaagcggggttcccgtggttttgggaaatccgttctacgtttccggttccaaagctgtaagcgattatctacacggcagtgtgcaggaggaattcggcgcgaggttctactgcatagaggatccgttacaggccgccgaccgcattgtggaaatattgaatcaagccagagacgcccttgggatcaataaaaaggcggagcgcaagcttttcgatatgaaagacaggagggcgttgtaa

SEQ ID NO: 61872 - protein, 547 aa, Unknown
  Obtained from environmental sample
  DOMAIN (1)...(514): Prismane/CO dehydrogenase family
  misc_feature (1)..(547): Xaa is any amino acid
MLKLRDVAQGKAPGFQIKDEKALRRAAWLYGVEEEGRDANAVALDLSNVFIREFTEQEEHLKTLELAPKKRQAVWEATGVKPNGIDRMVVEAMHRTHMGVDHDYLNLLHHAFKVSLADGWGGSRIASITSDILFGTPTPLKSAANLGVLKKETVNIIIHGHEPALSELLTVVVADPEIVSYAKAAGANGITLAGICCTANEILMRHGVPVAGNFLQQELAIATGAVELMVIDVQCCMPSLPEIAKSYHTEIVSTSDIARTIGAVHKSIGHGSEPLNVARDIVRRAIANFKKRDAAKISIPKQKEDLIAGFSVDAIKYMLGGRFRASFRPLNDAIMQNRILGVVGIVGCNNTKCKTDEYTNVLTAELIKRNVLVLQTGCSAIASAKAGMLKPEVALSQAGPGLREVCEAVGIPPVLHLGSCVDNSRILEAATESILEGGLGEDMGGYPAVGVAPEWMSEKAVAIACYFVASGVPVVLGNPFYVSGSKAVSDYLHGSVQEEFGARFYCIEDPLQAADRIVEILNQARDALGINKKAERKLFDMKDRRAL

SEQ ID NO: 61873 - DNA, 2208 bp, Unknown
  Obtained from environmental sample
  misc_feature (1)..(2208): n is a, c, g, or t
atggccgagatttctcgcgaaatgagccacgaaatccgcacccccataaacgccattacaggcatggcggaactgctgatgaggggggaactctcatctgaatcgcggacttacgcgcaggatatcaaacaggcggggaataaccttgtttcgttaattaacgatatccttgatctttcaaaaatcgaagccgggaaatttgaaatcgttccggtaaaatatatgctttcatccctggtcaatgacacggtcaacattatccgcacgcggctaaaggaaaagccgatacggttttttaccaacatcgatgggagcattcccaacagcctcataggagacgaagtgcgcatgcgccagattctccttaacctcctgtccaacgccgcaaaatacacggaaaaggggtacatcggtttgaccattaccatggataaacaggacgaaaaacagattttgctcaggatgagcgtggctgataccggaaaaggaataaagcgggaacatcaggcgaacctctttgacgaattcgtgcgggtggatatgaagaagaatcagggcattgagggaacaggccttggattagccattaccagccggctctgcgcggctatggacgggaaaataaacatggaaagcgaatacggcaaaggcagcgtattcacggtaataatcccgcagggcattgaatcaaaagagcctttcgccgtggtggaggagccggaaaaaaagaaggttctcgtttatgagagcagaattaattacgccaaatcggtgtgctggtccctggaaaacatgaaagtgccttataccatgataacgaatcagtatgattttggcacattactgtacaaagaggaatggtcctatgtgttttcaggttacggtctttataaaaaaattaaacctcttattgaacaggccgattcgattttccgcggagggaaaaagccgtatcttgttcttatggtggaatggggtaccgaagcctatgtccccaacgcgcgctttgtgtccatacccgtgcagtcccagtccattgccaatatcctgaacggcaaggccgaccgtcagaattattttgaaagctcagccggttccggcgttatacgccataccttccccgacgctcgtttgctggtagtggacgacatcaccgttaatcttaaagtcgccgagggcctcctggctccctataatatgaatattgacacctgttttagcggcgcggaagcgatagaacttgtgaaaaagaacaagtatgaccttattttcatggaccacatgatgccggatatggacggcatagaagcggttgcggtaatccgcgcatgggaagatgacnagataaaaaaagatcctgcaagaaaccaaacgcccataattgcccttacagccaacgccgttgtgggaatgaaagaaacgtttcttcaatgcggatttaatgattttctcgcaaaaccaattgatgtttccaaactggacgatattcttaaccgctggataccgaaagaaaagaggacaaggataaccaaaccagtcaggcctgttcaacaagtccagaaaacaaatgatactgcggcggctgaagctctccccgaaggcagcgaattattttccatccccggcgttgattcggttaagggcatttcccttacaggcggaactacagcgaattataaacaggtgctgtccctttactgtaaagacgttgaagatcgcctgccccttctggaaaaaatgcttaaagaagataacttaaatatgtttattactcatgttcacgccatgaaaagcgcgtccgcttctatcggcgcggctgaaatgtcggctcaagccgcaaaccttgaagccgtaggcaaagcgggggataaagattttattcataataatctgggcgcttttattcagcagttcagggaattaatagatggaataaaagaggttttagctgcagacaaggccaataaagggattccgcagataacttacattccagaagcgcaagtttctatgctgtacagtcttaaatcggcgctggaatccaaaaaaacaacggaaatcgacataattcttgaagagttggacaggtcgctggacggtcatcttcagcctttgcttgaacaaatatccgacaacattctaatcgccgaatacggcaaggcaggagaagttatagacggtttattaagagaaaggagcggttcttga

SEQ ID NO: 61874 - protein, 735 aa, Unknown
  Obtained from environmental sample
  DOMAIN (561)...(648): Hpt domain
  misc_feature (1)..(735): Xaa is any amino acid
MAEISREMSHEIRTPINAITGMAELLMRGELSSESRTYAQDIKQAGNNLVSLINDILDLSKIEAGKFEIVPVKYMLSSLVNDTVNIIRTRLKEKPIRFFTNIDGSIPNSLIGDEVRMRQILLNLLSNAAKYTEKGYIGLTITMDKQDEKQILLRMSVADTGKGIKREHQANLFDEFVRVDMKKNQGIEGTGLGLAITSRLCAAMDGKINMESEYGKGSVFTVIIPQGIESKEPFAVVEEPEKKKVLVYESRINYAKSVCWSLENMKVPYTMITNQYDFGTLLYKEEWSYVFSGYGLYKKIKPLIEQADSIFRGGKKPYLVLMVEWGTEAYVPNARFVSIPVQSQSIANILNGKADRQNYFESSAGSGVIRHTFPDARLLVVDDITVNLKVAEGLLAPYNMNIDTCFSGAEAIELVKKNKYDLIFMDHMMPDMDGIEAVAVIRAWEDDXIKKDPARNQTPIIALTANAVVGMKETFLQCGFNDFLAKPIDVSKLDDILNRWIPKEKRTRITKPVRPVQQVQKTNDTAAAEALPEGSELFSIPGVDSVKGISLTGGTTANYKQVLSLYCKDVEDRLPLLEKMLKEDNLNMFITHVHAMKSASASIGAAEMSAQAANLEAVGKAGDKDFIHNNLGAFIQQFRELIDGIKEVLAADKANKGIPQITYIPEAQVSMLYSLKSALESKKTTEIDIILEELDRSLDGHLQPLLEQISDNILIAEYGKAGEVIDGLLRERSGS

SEQ ID NO: 61875 - DNA, 1236 bp, Unknown
  Obtained from environmental sample
  misc_feature (1)..(1236): n is a, c, g, or t
atgcctgacagcattgaatatctgcaaggcgacgctcaaggcgatgcacccaattcgccttcccagaacgccttcatcgaagtagatcattatcagctttgcaagcataaccagaacgcgccgggtgacgtttttctttcgcagaaaaaccccagcgacggacgggtgatcaccgccctttccgatggcctgggttccgggattaaggccggggtgcttgccacgctcaccgcgactatggccgccaaattcatttcgtgtaacattcccatcaagcgggcgaccgaaatcatcatgaacagcctgccggtatgcagcgagaggggaatcagttacgcgacattcacgctggtcgatatggcccccgatgcttcggtaaaaatcatggagtatgacaacccgccctatacgtttatcagaaaagaaacggtgctgagcccttcgaaaaaagcgaccgcctttgagcggcaggacaaatcaaccgggccgaaaaaagacaccagcgtgctatactcgtactttagggcccaaagcggcgaccgtctgatttttttctccgacggggtaagccaggcgggcatgggaagcaaaccccaccccttcggttggacaacggccaaagcccgtgagtttgccctccagagcgttagggaaaaacctgaaatcagtgcccgcgaattggcccactccattgttcagcgggcttcgcaaattgacctgttcaagccgcaagatgatatttcctgcggcgttatttatttccgggagccaagggacatgttgatactcactggcccgccggttcaccccgaaagcgaccgggagattgcgaatattttttcttccttcaccggaaagaaagtggtttcaggcggcaccaccgccgccattatcagccgggagcttaaccggcagataaaagtgaatatgaaaagctacgacaaaaacataccgccatggtcggagatggaaggggcggacatggtaaccgaaggcatcatcactctgggggcggttcaggcgatgctggagaaccgccgtgaaatcgaagcgcacgccggaggccgggatgccgcctctcgcatgattggcttcctcttggacagcgacaggatcacatttatcgtgggcaccaagatcaacgaagcccaccaggatcctaccatgccggtagagctggaaatcaggcgcaacgtgattaaacgcattgcgtccctgcgaaagaaaagtacctaa

SEQ ID NO: 61876 - protein, 411 aa, Unknown
  Obtained from environmental sample
  DOMAIN (52)...(255): Stage II sporulation protein E (SpoIIE)
  misc_feature (1)..(411): Xaa is any amino acid
MPDSIEYLQGDAQGDAPNSPSQNAFIEVDHYQLCKHNQNAPGDVFLSQKNPSDGRVITALSDGLGSGIKAGVLATLTATMAAKFISCNIPIKRATEIIMNSLPVCSERGISYATFTLVDMAPDASVKIMEYDNPPYTFIRKETVLSPSKKATAFERQDKSTGPKKDTSVLYSYFRAQSGDRLIFFSDGVSQAGMGSKPHPFGWTTAKAREFALQSVREKPEISARELAHSIVQRASQIDLFKPQDDISCGVIYFREPRDMLILTGPPVHPESDREIANIFSSFTGKKVVSGGTTAAIISRELNRQIKVNMKSYDKNIPPWSEMEGADMVTEGIITLGAVQAMLENRREIEAHAGGRDAASRMIGFLLDSDRITFIVGTKINEAHQDPTMPVELEIRRNVIKRIASLRKKST

SEQ ID NO: 61877 - DNA, 1407 bp, Unknown
  Obtained from environmental sample
  misc_feature (1)..(1407): n is a, c, g, or t
ttgatgtctggcgatacaccgtgtaccgctccgggtaaaccctccttaatgatctcctcggcctgtccggttatagtcgaatacataaagctctacaaaccttctctcgtgccttttatttcacctcacgcctcaccgctcctcacccacgcgcggtttttacgttcccgttacgaaacagacgggaaagtcgcgattgtgtttatcgggccatgcttcgccaagaaacacgaggccgacctgtacagcacggagattgacgccgccattaccttcgaggaattgcgcgactggctgaataaagagcaaataacaccacagacaatttcatctgcggcggactgcgtgtttgagccccgccggagcgcgaaaggggcctttttccccattgaaaacggagaaataaccgctttttcagcctacatcagggaagctgctgaaacggagaaagggccctatatacacaccctctcggcgtcaggctttcacgcggtgggggatatgctggatggatttgatcccgctacggtggacgcgcctttgtttctggaactgctggcctgtcccggcggctgcctaaacggccccggaatgtcccacgctacgccgggcgttatccgcaacgtacgcctgtgggactatgcccgttccgccgataataccctggacggcgaggcgctctcgctcacgccgccggttgacgccggttataccctggccccgctgcctgacatcgtacacacggaacaggaaatcaccgaagcgcttttgcgggtgggaaaacacagccttgccgaccggctcaactgctcgagctgcggctatgatacctgccgggattttgccatcgccctgttgaacggaagggcggagaaatccatgtgtgcttcgcatatgcgagagcttgccaacaaaacagccaacggccttatcaaggcgattccttccggcgttgtgattgttgatcgggacatgaaaatcatcgactgcaacgaacagtttgcccgtctaatgggaaacgaagcagaagagctgttcgtcatgatgccggggctggaaggagcggacctcaaaaaaatatcacccttcccgcagtatttccagacgattattgatccttcagggccggagtttacccaaaccgacgtgcgggacggcagcagaatatttcaccttacagtcttcgccgtggaaaagggtgttgccgcggcgggggttgtggaagacattaccgcgccccgggtgcaaatcgagacaaccgttgagcgggcacgggaactcatcaaaaaaaatgtttcaactgttcagcaaatagcttttttactgggagaaaacgcggcggaatccgaggctatcctcaattccattatcgagtcttacactgtagaagaagaaaaagatgcctga

SEQ ID NO: 61878 - protein, 468 aa, Unknown
  Obtained from environmental sample
  DOMAIN (4)...(199): Iron only hydrogenase large subunit, C-terminal domain
  misc_feature (1)..(468): Xaa is any amino acid
MMSGDTPCTAPGKPSLMISSACPVIVEYIKLYKPSLVPFISPHASPLLTHARFLRSRYETDGKVAIVFIGPCFAKKHEADLYSTEIDAAITFEELRDWLNKEQITPQTISSAADCVFEPRRSAKGAFFPIENGEITAFSAYIREAAETEKGPYIHTLSASGFHAVGDMLDGFDPATVDAPLFLELLACPGGCLNGPGMSHATPGVIRNVRLWDYARSADNTLDGEALSLTPPVDAGYTLAPLPDIVHTEQEITEALLRVGKHSLADRLNCSSCGYDTCRDFAIALLNGRAEKSMCASHMRELANKTANGLIKAIPSGVVIVDRDMKIIDCNEQFARLMGNEAEELFVMMPGLEGADLKKISPFPQYFQTIIDPSGPEFTQTDVRDGSRIFHLTVFAVEKGVAAAGVVEDITAPRVQIETTVERARELIKKNVSTVQQIAFLLGENAAESEAILNSIIESYTVEEEKDA

SEQ ID NO: 61879 - DNA, 396 bp, Unknown
  Obtained from environmental sample
  misc_feature (1)..(396): n is a, c, g, or t
atgagcgccgcgttgggcaccgcaaaggcaccggtttacacggagcttgccgaatgtcatgactgttacaagtgcattcgcaaatgtccggtaaagtctatcaaggtggaaaaagggcaggcaagcatcctgtttgaccgttgcgtttactgcgggcgttgcgtgatgagttgtcctgcccatgccaaacattaccggaacgatgttgaaaaagtaaagctgctgttggcggacgggcggaaaacgctagtttccctcgctccttcgttcgtttcggaatttaccgactggaaaactgaagaacttatcgctgtgcttaaaaagctggggttcgctgctgtgtcggaaccgctctgggcgcggattttctttcagcccgtagcgcccgtgatttga

SEQ ID NO: 61880 - protein, 131 aa, Unknown
  Obtained from environmental sample
  DOMAIN (12)...(35): 4Fe-4S binding domain
  misc_feature (1)..(131): Xaa is any amino acid
MSAALGTAKAPVYTELAECHDCYKCIRKCPVKSIKVEKGQASILFDRCVYCGRCVMSCPAHAKHYRNDVEKVKLLLADGRKTLVSLAPSFVSEFTDWKTEELIAVLKKLGFAAVSEPLWARIFFQPVAPVI

SEQ ID NO: 61881 - DNA, 306 bp, Unknown
  Obtained from environmental sample
  misc_feature (1)..(306): n is a, c, g, or t
atggccgagcggcacgagaatacgtatagagcggcaatgccgccgcttacagaaggggtgtatatgaaagtaacggtttgtatcggcagcgcctgccatgtgaaaggcgcgggaaaaattgtggagcagttgcagtcccttatagcccaaaaaaattacggcgagaaggttgaattggccggcgcgttctgcatgggcaaatgcgccaccggcgtttcggtcacggtagatggcgagtatcactcgttacagcctgagaacaccaaaaccttctttgaggaacaggtggtgaagaaactcgcgtaa

SEQ ID NO: 61882 - protein, 101 aa, Unknown
  Obtained from environmental sample
  misc_feature (1)..(101): Xaa is any amino acid
MAERHENTYRAAMPPLTEGVYMKVTVCIGSACHVKGAGKIVEQLQSLIAQKNYGEKVELAGAFCMGKCATGVSVTVDGEYHSLQPENTKTFFEEQVVKKLA

SEQ ID NO: 61883 - DNA, 1308 bp, Unknown
  Obtained from environmental sample
  misc_feature (1)..(1308): n is a, c, g, or t
atggcgacagttgacgataaaaaaattatttactccatgtataaggtttccaaaaagcatggaactaagcaggtactaaaggatataagtatctcctactattacggcgctaaaatcggcgttatcggtcttaacgggtcgggaaaatcgagtcttttgaaaattctcgcaggcaaggacaccgagtttgcgggggaaacaaccgtaagcccgggctataatatcgggtttcttgaacaggagccgtatcttgagccggggaagactgtcaaggaaatagtctccgagggggctaaagaactggtcgatcttcttgcggagtttgacaaagtaagcgaggcgtttggagacccggacgccgactacgataagctgggagcgaagcaggctgaacttcaggaaaaaatcgaagccgccgacggctggaatttggacagccgccttgagcttgcgatggaagctctgcgctgtcctcccggcgacgaagttgtagatcatctttcaggcggtgagaggcggcgtgtcgctctttgccgtctgcttctgcaaaaacccgacatccttttacttgacgagccgaccaaccacttggacgctgaaactgtagcttggctggaacgtcatctgcaggattacgccggaaccgttatcgctgttacacacgaccgctattttttggataacgtcgcaggctggatactggaacttgatcgaggagaaggaattccatggaagggaaattattcaggatggcttgaacaaaaagaaaaccgcatggcgcaggaagaaaaaggcgaaagcgacaggcgcaaaacattacagcgtgaacttgaatggatacgcatgagtccgaaggggcggcacgcaaagagcaaagcccgtatcacccaatacgaaaaactttatcaggacgatgaaagggaacgctcgcgaggcgctgtaacaaataataaaattacaattccggctggtccgcatttgggcaaacttgtaatcgaggcggaaggattatcaaaatctttcggaaacaaactgttattcgacaatatgagtttcacggttccgccgggagcgtgcgtcggcattatcggtccgaacggcgcgggaaaaactactcttttcaaattgataacaggcgctgaaaaacccgatgcgggagaattgcgattgggcgagacagtaaaaataggttacgccgatcagatgagagcttctcttgacggcgaaaaaagcgtttgggaacagctttcagacggacaggatttaataaaactcggcagcggacagggcgcagctcgtgccatctga

SEQ ID NO: 61884 - protein, 435 aa, Unknown
  Obtained from environmental sample
  DOMAIN (36)...(239): ABC transporter
  misc_feature (1)..(435): Xaa is any amino acid
MATVDDKKIIYSMYKVSKKHGTKQVLKDISISYYYGAKIGVIGLNGSGKSSLLKILAGKDTEFAGETTVSPGYNIGFLEQEPYLEPGKTVKEIVSEGAKELVDLLAEFDKVSEAFGDPDADYDKLGAKQAELQEKIEAADGWNLDSRLELAMEALRCPPGDEVVDHLSGGERRRVALCRLLLQKPDILLLDEPTNHLDAETVAWLERHLQDYAGTVIAVTHDRYFLDNVAGWILELDRGEGIPWKGNYSGWLEQKENRMAQEEKGESDRRKTLQRELEWIRMSPKGRHAKSKARITQYEKLYQDDERERSRGAVTNNKITIPAGPHLGKLVIEAEGLSKSFGNKLLFDNMSFTVPPGACVGIIGPNGAGKTTLFKLITGAEKPDAGELRLGETVKIGYADQMRASLDGEKSVWEQLSDGQDLIKLGSGQGAARAI

SEQ ID NO: 61885 - DNA, 795 bp, Unknown
  Obtained from environmental sample
  misc_feature (1)..(795): n is a, c, g, or t
ttgtattggctggcgaatcatgcggggaaagcgaaagatacaagaaagcaattttacaatatagcttttggcatatatgcgttgagcgaacattaccgcgccgcaggagatcaatcatcgctggatttggcgacggctctttttgacgcaactgagcgttacggacttgatccatctgcggacggttatattgaggcatgtgatcgcgaatggcgcggtattgacgatttcaggctaagcggaaaagaccttaattgccccaagtcgatgaataccaacctgcatgtactggaagcctacacaaacttagtttgcgccggcgggggtgagcgggtgatcaaggcgcttgaagcgttattgcacgtaacactggataaaattgtaaaccgcgattggcattttgatttattttttgacatgaactggaattcgctttcaaaggatatttcttacggccatgatattgaggggagctggttgttgtatgaagcggcgcttgcaacaggcgatgagaatcttatctcaaaagtgaaaaaagcggcgctagcgattgcggaagttatttataatgttgccatagatcataaaaacggcggattaatcagcggctgtgatgcacaggggcatattcacaacaaaaaggaatggtggccgcaagcggaagctgttgtggtttttacaatgcgtatgagttatcgggtgagcggaaatactttgatgcggctgagagcgtttggggttacattcagaatcattttgtggatagcgcacacggcgaatggtttaatgaattga

SEQ ID NO: 61886 - protein, 264 aa, Unknown
  Obtained from environmental sample
  misc_feature (1)..(264): Xaa is any amino acid
MYWLANHAGKAKDTRKQFYNIAFGIYALSEHYRAAGDQSSLDLATALFDATERYGLDPSADGYIEACDREWRGIDDFRLSGKDLNCPKSMNTNLHVLEAYTNLVCAGGGERVIKALEALLHVTLDKIVNRDWHFDLFFDMNWNSLSKDISYGHDIEGSWLLYEAALATGDENLISKVKKAALAIAEVIYNVAIDHKNGGLISGCDAQGHIHNKKEWWPQAEAVVVFTMRMSYRVSGNTLMRLRAFGVTFRIILWIAHTANGLMN

SEQ ID NO: 61887 - DNA, 579 bp, Unknown
  Obtained from environmental sample
  misc_feature (1)..(579): n is a, c, g, or t
atgatagcgggaaaaatcattatcgaatacaagaaccaaaaaccgcctctggtcaatgccggcggtcatatactcggccttccccttgcgagcgcagaagcaattgatgcaatacagcttgtatcggagaagaaagaaaaaaacgtactgactatagaaaacaaagaaactttttacgctctgggaagtccgcaaaaacacgacgcggacaaagactctcttcgttatgactgctttctttatataggcggctattcaaaccgtgccgctgccgctcttgtaaagaccctggctgcttcaggtttttctttttaccatgccagcgaccttgaccccgatggcgttctcattttgcagcacattcaggatattgctgaaaagccggttattccggtgcggatggatgccgcgacttttgaccaatacaaagcatgggcgcgaactcttaccaaaccaatgctccgtcagatcgaaaaaatccgggaaaaaacaaggagtatccccgaattggccggattgctacggcgtattgaggaaacaggcatgggtatagagcaagaaattattgattatagatga

SEQ ID NO: 61888 - protein, 192 aa, Unknown
  Obtained from environmental sample
  misc_feature (1)..(192): Xaa is any amino acid
MIAGKIIIEYKNQKPPLVNAGGHILGLPLASAEAIDAIQLVSEKKEKNVLTIENKETFYALGSPQKHDADKDSLRYDCFLYIGGYSNRAAAALVKTLAASGFSFYHASDLDPDGVLILQHIQDIAEKPVIPVRMDAATFDQYKAWARTLTKPMLRQIEKIREKTRSIPELAGLLRRIEETGMGIEQEIIDYR

SEQ ID NO: 61889 - DNA, 1710 bp, Unknown
  Obtained from environmental sample
  misc_feature (1)..(1710): n is a, c, g, or t
gtgactgaaggcgtggcggccattgtcgccgtcccgtcccttaactggcatattgccgccattcttccgcttacggtaaaagactccctgaacggcggcatgacaatgctcttcctgttaatgatggcggccatagcggttatattgataatttctttcttttttatcactgggatgctcaaacccatgcacagcatgctggaaaccttggacaaaatagcggaggactgggaccttacccggcgggttaaattcaagcatctggacgaattcggcgttcttgcccatgactttaactttatgatggatcaaattaaaaaccttgtagggacaataaaatataaaatcaacgcgctcaccaatacgggttatgaactttccgccaatgttgaaaaaacttccaaggcggtaggttccatttcggaagattttgacggcatgaaggccatgtcgggcaagcaggacataagcgcatccgaagcgcgcaacgcggcggcgacaattcaaaacagcattaacagcctgaatacgcttatagaaagccagtctaaaagcatcaatacatcatcttccgcgattgaggaaatgacaaagaatattcattccgtaaccaatacgttgatagaaaacagcaaaaatgttgaaaaacttacggaagcgtcggaaaacgggaaagaaggacttcagacggtggcggagaagataaaggaaatcgcccgcgactccgaggggcttttggaaataaatttattaatggacaatatcgccggtcagacaaacttgctttcgatgaacgcggcaattgaggccgcccacgccggagaagccgggaaggggtttgccgtagtcgccgatgaaatccgtaaacttgccgaatcgtcaagcgagcagtccaaaacaacagcggcaatgttaaaaaagataaaagaatccatagacagcatcacggcctcttcaaacgaggttctttcccgtttcgaggttattgattccgaggtaaagactgtatcccatcatgaacaaaatatccttaacgcgatggaagaacaggaagcggggggaaagcaaatagttgattccatgctgcacttaaaagagacaagcgtaactgtaagaaaaggatcggaagatatgcttgaatcgggcaatcacctgaccacacaaacgaatgatttcattaatatcagcaacaaggttgtagaaggcatgaacaatattataaacggcgccatgcaggagataaaagccgccgtaaatcttttaaatcagatgagtacggaaaacaccaataatttcgatgagttgaaagcggaatcgttaaaatttaaagttgatacatccgacgcaaagaaaaaaatcatcattgttgacgatgaggcgaccgttcttaccatgacaaaagccatgttggaagacgtatatgacattaccatggcaaagtccggcaatgaagctttaaaattgttcttccagggttatactcctaatttagtgttattggatttaagtatgccggaaatgggcggctgggacgcttataaaaggatacgtgatttatcaaaattacacagcgttcctatagcgatatacacgacttcaaatgatccgaaagacagggcccgcgcgaaagaaatgggagcggttgattatattcaaaaacccgctaaaaaagacgatcttttaagcagaataaagagaaacattaattaa

SEQ ID NO: 61890 - protein, 569 aa, Unknown
  Obtained from environmental sample
  DOMAIN (180)...(395): Methyl-accepting chemotaxis protein (MCP) signaling domain
  misc_feature (1)..(569): Xaa is any amino acid
MTEGVAAIVAVPSLNWHIAAILPLTVKDSLNGGMTMLFLLMMAAIAVILIISFFFITGMLKPMHSMLETLDKIAEDWDLTRRVKFKHLDEFGVLAHDFNFMMDQIKNLVGTIKYKINALTNTGYELSANVEKTSKAVGSISEDFDGMKAMSGKQDISASEARNAAATIQNSINSLNTLIESQSKSINTSSSAIEEMTKNIHSVTNTLIENSKNVEKLTEASENGKEGLQTVAEKIKEIARDSEGLLEINLLMDNIAGQTNLLSMNAAIEAAHAGEAGKGFAVVADEIRKLAESSSEQSKTTAAMLKKIKESIDSITASSNEVLSRFEVIDSEVKTVSHHEQNILNAMEEQEAGGKQIVDSMLHLKETSVTVRKGSEDMLESGNHLTTQTNDFINISNKVVEGMNNIINGAMQEIKAAVNLLNQMSTENTNNFDELKAESLKFKVDTSDAKKKIIIVDDEATVLTMTKAMLEDVYDITMAKSGNEALKLFFQGYTPNLVLLDLSMPEMGGWDAYKRIRDLSKLHSVPIAIYTTSNDPKDRARAKEMGAVDYIQKPAKKDDLLSRIKRNIN

SEQ ID NO: 61891 - DNA, 591 bp, Unknown
  Obtained from environmental sample
  misc_feature (1)..(591): n is a, c, g, or t
ttggccgagtcggccttgcgggttttatttccagaatcattgactgtaagtccggaatttacccacagacattcaacgcagattgccaataaagcatggtttatggggaaacattataagtacgagccgcgggaattggcggaactttatctggcggcatccttgcatgacataggcaagttggcaattccttccgaaattctggaaaaacccggaaaacttacagatgaagaatttgaaataatcaagagccatgtccgcctgacatgggagcttcttaacgaaattgaaggatttgaaacaatatgccaatgggcttccaaccatcatgaaaaactggacgactcaggatacccgttcgggaaaaaatccgcggagttggattttaattcaaagctgttagcctgcctggacttgtatcaggcgataagcgaagaaaggccttatcatcccggacggaatcacgcggacacaatgaagatactctacgaaatggcggataccgtaaaaattgacagggatattaccaaagatatggatactgcccttgccccatacgacggcaaagaactgccgccgcccaacggttaa

SEQ ID NO: 61892 - protein, 196 aa, Unknown
  Obtained from environmental sample
  DOMAIN (21)...(143): HD domain
  misc_feature (1)..(196): Xaa is any amino acid
MAESALRVLFPESLTVSPEFTHRHSTQIANKAWFMGKHYKYEPRELAELYLAASLHDIGKLAIPSEILEKPGKLTDEEFEIIKSHVRLTWELLNEIEGFETICQWASNHHEKLDDSGYPFGKKSAELDFNSKLLACLDLYQAISEERPYHPGRNHADTMKILYEMADTVKIDRDITKDMDTALAPYDGKELPPPNG

SEQ ID NO: 61893 - DNA, 564 bp, Unknown
  Obtained from environmental sample
  misc_feature (1)..(564): n is a, c, g, or t
atggctacgggctggtatgtcctgcatacttattcgggatacgaaaacaaaatagaaagaacaatccgcatgatgaccggaaacggggagttggacaagaatgtcgtccgcgacgtanaagtccccagtgaggaagttgtcgaagtcaaagacggaaaaaaacgcacccagaacagaaaattccttcccggctacattcttgtcgaaatggatcttcccgataccgaaatggactggaaactgacctgttccaaaataaaaaaaatccagggcgttacgggatttgtcgggactccctcggataaaaaaccccagccgctgacaggcgacgaagcgcgcgcgattttgcaaaagtcgggtgaaattaaaggagagaggacagtgcgcacaagacagacttttgcccccggcgaacaggtaaaaatcatcgacgggccgtttgagtcctttgtcggcactatagaagaagttaatcaggaaaaaaataaattaaaagtaatggttggaattttcggcagaaatgcgcctgtggaagttgatcttttacaggtagaaaaagtataa

SEQ ID NO: 61894 - protein, 187 aa, Unknown
  Obtained from environmental sample
  DOMAIN (134)...(171): KOW motif
  misc_feature (1)..(187): Xaa is any amino acid
MATGWYVLHTYSGYENKIERTIRMMTGNGELDKNVVRDVXVPSEEVVEVKDGKKRTQNRKFLPGYILVEMDLPDTEMDWKLTCSKIKKIQGVTGFVGTPSDKKPQPLTGDEARAILQKSGEIKGERTVRTRQTFAPGEQVKIIDGPFESFVGTIEEVNQEKNKLKVMVGIFGRNAPVEVDLLQVEKV

SEQ ID NO: 61895 - DNA, 417 bp, Unknown
  Obtained from environmental sample
  misc_feature (1)..(417): n is a, c, g, or t
atggcaaaaaagaagattgcgacaatgattaagttgcaatgtccggcgggaaaggccacaccggccccgcccgtaggacccgcgcttgggcctcacggcgtcagcgcgccccagtttgtccaacagtttaacgacaggacaaaaggcatggaaccgggacttataatccctgttattatcacggtttatgtggataaatcatttacatttatcctcaaaaccccgcccgcttcggttttaattaaaaaagcgatagggcttgaatcgggttcaaggaatctcacaaggtcaaggtcggtaaaatctcaagaaaacagcttgaagacatcgccaaaacaaaaatggcggatctttcagctaacgatcttgacgccgcagttaaaattatcgccggtacagcccggtctatgggtgtag

SEQ ID NO: 61896 - protein, 138 aa, Unknown
  Obtained from environmental sample
  DOMAIN (9)...(68): Ribosomal protein L11, N-terminal domain
  misc_feature (1)..(138): Xaa is any amino acid
MAKKKIATMIKLQCPAGKATPAPPVGPALGPHGVSAPQFVQQFNDRTKGMEPGLIIPVIITVYVDKSFTFILKTPPASVLIKKAIGLESGSRNLTRSRSVKSQENSLKTSPKQKWRIFQLTILTPQLKLSPVQPGLWV

SEQ ID NO: 61897 - DNA, 681 bp, Unknown
  Obtained from environmental sample
  misc_feature (1)..(681): n is a, c, g, or t
atgaaacgcggaaaaaaatacaaagcaagcgccaaaaactacgacccgatgaatacctatgaattaaaagaagcggtttctcttgtaaagaaaatggctttcgcgaaatttgacgagtcggttgatctttccattaaattgaatctgaaaaagagccaggccgtgcgcgatactgtggttcttccgcaccagttccggggcgacaaaaaagtgcttgttttctgcaaacccgaaaaagaaaaagaagcgcaggaagcgggagccgcgtttgtcggcgccgacgacttaatcgaaaaagttaaaggcggctggacggattttgacgtcgccgtagctacccccgacatgatgaaagatgtcggcaagcttggtatggtgcttggccgcaaaggacttatgcccaacccgaaaacaggaaccgttaccttcgatcttaaaggcactttagccgagttaaaaaaaggccgcgttgaattcagggctgacaaaaccggcgttgtacatcttgttgtaggcaaggtttccatggagcctgaaaaagttgtggaaaatattgatgtagtggtaaccgaaattaaacgcaaaaggccgcccgatgttaaaggcgagtttattcaatcggtatcggttgcgtctacaatggggcccggcgtctgggtagccataagagatcaggagtag

SEQ ID NO: 61898 - protein, 226 aa, Unknown
  Obtained from environmental sample
  DOMAIN (14)...(217): Ribosomal protein L1p/L10e family
  misc_feature (1)..(226): Xaa is any amino acid
MKRGKKYKASAKNYDPMNTYELKEAVSLVKKMAFAKFDESVDLSIKLNLKKSQAVRDTVVLPHQFRGDKKVLVFCKPEKEKEAQEAGAAFVGADDLIEKVKGGWTDFDVAVATPDMMKDVGKLGMVLGRKGLMPNPKTGTVTFDLKGTLAELKKGRVEFRADKTGVVHLVVGKVSMEPEKVVENIDVVVTEIKRKRPPDVKGEFIQSVSVASTMGPGVWVAIRDQE

SEQ ID NO: 61899 - DNA, 531 bp, Unknown
  Obtained from environmental sample
  misc_feature (1)..(531): n is a, c, g, or t
atggcaataatagcgaaaaaaatacagccgaataaaacaaaggccattgcggagcttaaagattctttcagtaatgcaagcgattatgtgtttacctgctatcgcgggctcacagtcgagcagattaccaatttaaggaaacttctccgcgcgaaggacgttgaatacaaagttgtaaaaaacaactttgcaaggattgctttcgagcagctttcaacgccggatgtgtcgtcctacattatcggtcccaccgcggtagcgataagcccgaaggacgcgaacgaagtcgcgaagatactcttcgattttgcgaaagaggctcccgcacttgagataaaaggcgctttggtcagcggcacggtttacaacgccgcccagacagaggcgttctcaaaactgcccggcaagctggaattaatttccatgctcatgtcggttatgaacgggcccgcgcgcaatcttgccgccgcgctcaacgatattccggcaagactggttcgtacagtcaaggcgatagccgacaaaaaatga

SEQ ID NO: 61900 - protein, 176 aa, Unknown
  Obtained from environmental sample
  DOMAIN (7)...(105): Ribosomal protein L10
  misc_feature (1)..(176): Xaa is any amino acid
MAIIAKKIQPNKTKAIAELKDSFSNASDYVFTCYRGLTVEQITNLRKLLRAKDVEYKVVKNNFARIAFEQLSTPDVSSYIIGPTAVAISPKDANEVAKILFDFAKEAPALEIKGALVSGTVYNAAQTEAFSKLPGKLELISMLMSVMNGPARNLAAALNDIPARLVRTVKAIADKK

SEQ ID NO: 61901 - DNA, 366 bp, Unknown
  Obtained from environmental sample
  misc_feature (1)..(366): n is a, c, g, or t
atgcgaaatttaacgtgtatcgtctgtccgatgggctgttcccttgaagcagacgacagcaaaggcgaagattctcttaccgtaaccggaaataaatgtcagcgcggagcggcttacgcagtagaagaaatccgctcgccgaaacgtgttgtaaccgccacttgcgccgtcaatggggaagtaagcggctctgtaagacgcgtgcctgtaaagaccgccgttccttgtccgaaggaaaaaatatccgcccttttggaagatatttacaaggtgaaaatcgctcttcccgtaaaagccggcgatgttgtaatcgccgattggaacggcagtaagatagacatagttgcggcgaggacattaaattga

SEQ ID NO: 61902 - protein, 121 aa, Unknown
  Obtained from environmental sample
  SIGNAL (1)...(17)
  DOMAIN (2)...(118): Protein of unknown function (DUF1667)
  misc_feature (1)..(121): Xaa is any amino acid
MRNLTCIVCPMGCSLEADDSKGEDSLTVTGNKCQRGAAYAVEEIRSPKRVVTATCAVNGEVSGSVRRVPVKTAVPCPKEKISALLEDIYKVKIALPVKAGDVVIADWNGSKIDIVAARTLN

SEQ ID NO: 61903 - DNA, 1362 bp, Unknown
  Obtained from environmental sample
  misc_feature (1)..(1362): n is a, c, g, or t
ttgcacttacaagataataaaaataatcatgagggaagcaaatctttcttgggaagaagttacaaaacacggcggaaaaagccgcatattggacggtgtgctatgaaagaactccaatatgacgcggcggtaatcggcggaggagcggctggaatggcggcggcgctggaactcgaagctcaaggtttttcctgcgcgcttattgacagggaagatcatctcggcggcattcttatgcagtgcattcacaacggttttggcttgcacgaattctcggaagaattaacgggaccagaatttgcggagaggtttattgaacgtgtaataaaatcaaaaatcgccgtttacattgatacgaccgttactcgcttttcgcaggataaatcatcgcaagttaaagaactctactgcgtatctcctgcaggagcggtaaaaattaaaacacgagccgtactgcttgcaatgggatgccgtgaaaaaaacaggggtaatgtccgcatacccggctcccgtcctgcgggaatttatacggcaggtcttgcacagcgccttgtaaacatagaaggctacattcccggcagagaaattgtaatcatcggttcgggcgacatcgggctaatcatggcaaggcgcatgacttgggtaggatgcaaagtaaaagccgtagtggaaataatgccgtatcccgcaggattgacacgtaacattgttcagtgccttaacgattataacattcccctttacttgtcatcgcagaccacgggtgttttcggcaatgaccgtgtagagggaatagaagttaccccgatgacaaacggcgtgcttgcgcccgaaaaaagttttcgtatagactgcgatacagttctgctttccgtcggtcttgttcccgaaaacgaattgtcaagagccgcaggcgtggagttgaattccgtaacaaacggacctttggtagacagttctttaatgacaaacatagacggcgtttttgccagcggcaatgtgctccatgtccacgatcttgtcgattgggtttgcgaagaaagccggcgtgctggaagttacgccgcttcttggcttagaggagaacatccctctttgcagatacatacaaaagcgggctctcatgtccgttatgtgaaccctgtgcggcttgcccccgacagggaaaacatcatttatatgcgttccatgattgtaaaaaacgacattgttcttgaattgcgtataggcgataaggtgattaaaagcaaaaaggaacgccatgttcagccttcggaaatgatcagttttaagctgagccccaaggattttgaaggagcgcagataaattcggattccgttttggaattcagtataaattga

SEQ ID NO: 61904 - protein, 453 aa, Unknown
  Obtained from environmental sample
  DOMAIN (195)...(293): Pyridine nucleotide-disulphide oxidoreductase
  misc_feature (1)..(453): Xaa is any amino acid
MHLQDNKNNHEGSKSFLGRSYKTRRKKPHIGRCAMKELQYDAAVIGGGAAGMAAALELEAQGFSCALIDREDHLGGILMQCIHNGFGLHEFSEELTGPEFAERFIERVIKSKIAVYIDTTVTRFSQDKSSQVKELYCVSPAGAVKIKTRAVLLAMGCREKNRGNVRIPGSRPAGIYTAGLAQRLVNIEGYIPGREIVIIGSGDIGLIMARRMTWVGCKVKAVVEIMPYPAGLTRNIVQCLNDYNIPLYLSSQTTGVFGNDRVEGIEVTPMTNGVLAPEKSFRIDCDTVLLSVGLVPENELSRAAGVELNSVTNGPLVDSSLMTNIDGVFASGNVLHVHDLVDWVCEESRRAGSYAASWLRGEHPSLQIHTKAGSHVRYVNPVRLAPDRENIIYMRSMIVKNDIVLELRIGDKVIKSKKERHVQPSEMISFKLSPKDFEGAQINSDSVLEFSIN

SEQ ID NO: 61905 - DNA, 933 bp, Unknown
  Obtained from environmental sample
  misc_feature (1)..(933): n is a, c, g, or t
gtggagctgttcactaattttaaggtaagtggggctgaccgtagtgaggatttttggaatattcgcgcggaagacggaagggtagtaaaagcgcgttatgcgattaattctgcgggactttttgcggacgaagtgtccaaggcttttaaggctgaagaatttacgataagtgcgagaaagggcgagtattttcttttggacaggttgacaaaagcctgtccttctagggtggtttttcccgttcccacttctgtttcaaaagggatgttggttatccctacggtggagggaacagcccttgtaggccccaccgcagacgctgtacttgataaaaatgatttttcaactacttccaaacatctggaacagataattgtttcaggaaaaacgatgataccctctttaagccataacgacgttatcactaattttgcggggcttcgcccgtgtcttggagaggatttttatattgaggcttcgaaaaaagtcccggcttttgtacaggtagcggggattcaaagtccggggcttactgcctcgcccgcgattgccgagtatgtaaaaaacattttagttgatattggtttgcagctaacggagaagccgcactgggatccttatgtggaaaaccaccctaaggcaagagaacttgactttgaagaacttgacgactatattgccaaagattctacatggggcagtattgtctgccgctgtgaaaatgtcagcgaggctgaaattattncagctgtaagattgggacacacgacattggacggagtaaaatattttactcgcgcgcaaatgggacgctgtcagggcggcttttgcacttacaagataataaaaataatcatgagggaagcaaatctttcttgggaagaagttacaaaacacggcggaaaaagccgcatattggacggtgtgctatga

SEQ ID NO: 61906 - protein, 310 aa, Unknown
  Obtained from environmental sample
  DOMAIN (234)...(289): BFD-like [2Fe-2S] binding domain
  misc_feature (1)..(310): Xaa is any amino acid
MELFTNFKVSGADRSEDFWNIRAEDGRVVKARYAINSAGLFADEVSKAFKAEEFTISARKGEYFLLDRLTKACPSRVVFPVPTSVSKGMLVIPTVEGTALVGPTADAVLDKNDFSTTSKHLEQIIVSGKTMIPSLSHNDVITNFAGLRPCLGEDFYIEASKKVPAFVQVAGIQSPGLTASPAIAEYVKNILVDIGLQLTEKPHWDPYVENHPKARELDFEELDDYIAKDSTWGSIVCRCENVSEAEIIXAVRLGHTTLDGVKYFTRAQMGRCQGGFCTYKIIKIIMREANLSWEEVTKHGGKSRILDGVL

SEQ ID NO: 61907 - DNA, 1416 bp, Unknown
  Obtained from environmental sample
  misc_feature (1)..(1416): n is a, c, g, or t
atgccgctggataaaaacataaagaagatcatggtcataggttccggtcctattgtgatcggccaggcggctgaatttgactatgccggaacgcaggcttgtcgtatgttgcgcgaggacgggattgaaatcgtcctggtcaactccaatcccgcgaccataatgaccgacaaaaacatcgccgacagaatttacatcgagccgctgacccttacgaccgtcaagcggattattgaaaaggaacgcccagacagcatcctttctggccttggcgggcagacggggcttacgctgtgtatgcagttagcccgcgacggctatcttgaaaaaatgaacgtgcgcctgctgggttcttccccagaaacgattgacaaggcggaggacaggcgcattttcaaggagaccatgcagagcatcggccaaccggtgatcccttcggaaatcgcgaacgacgttgatacggcggttaaatttgcggtagagataggctacccggtcatcgtgcgtccagccttcacgcttggaggttcgggcggcggcatcgcggcggacgaaaacgcccttcgggaaatcgcaacaaacggcctgtccatttcgccgatatgccagattctggtggaaagatccgttgccgggtggaaggaaatagaatacgaagttatgcgcgaccgcaacgggaacgtgattaccgtctgctctatggaaaactttgatccggtgggcatacacacaggcgacagcatcgtgattgcgcccgccgttactctggcggacaaagaataccaaatgctccgcttggccgctttgaacattatccgcgcccttggagttgaaggcggctgtaacgtccagttcgccctgaacccagacagctttgaatacgcggttatcgaggtaaacccgcgcgtttcgcgttcttccgcgcttgcgagcaaggcaacgggctacccaatagcgaaagtcgcgacaaaaattgccgtcggctataccctggacgaaataataaacgccgttaccggcaatactttcgcggcgtttgagcctacgattgactacgtggcggtgaagttcccaaaatggcccttcgacaaattcgtatacgcacaaaaagagctgggcacgcagatgaaggcaaccggcgaagtcatggctcttgcggacacctttgaagaagctctcttaaaagccgtgcgtggcgcggaaatcggccttaacagccttgacctgccccgcctggcggcgaaatctgacgaagagatacgcgcccttctccatacagtaaccgacgagcgtctgtttgtgctgtacgaggccataaaacgcggcatcggtgtggacgagctttaccagatgacgaaggtagaccgctggtttttgcacgggcttgtcaatatcgcttccgggcggtatttttga

SEQ ID NO: 61908 - protein, 471 aa, Unknown
  Obtained from environmental sample
  SIGNAL (1)...(23)
  DOMAIN (420)...(470): Carbamoyl-phosphate synthetase large chain, oligomerisation domain
  misc_feature (1)..(471): Xaa is any amino acid
MPLDKNIKKIMVIGSGPIVIGQAAEFDYAGTQACRMLREDGIEIVLVNSNPATIMTDKNIADRIYIEPLTLTTVKRIIEKERPDSILSGLGGQTGLTLCMQLARDGYLEKMNVRLLGSSPETIDKAEDRRIFKETMQSIGQPVIPSEIANDVDTAVKFAVEIGYPVIVRPAFTLGGSGGGIAADENALREIATNGLSISPICQILVERSVAGWKEIEYEVMRDRNGNVITVCSMENFDPVGIHTGDSIVIAPAVTLADKEYQMLRLAALNIIRALGVEGGCNVQFALNPDSFEYAVIEVNPRVSRSSALASKATGYPIAKVATKIAVGYTLDEIINAVTGNTFAAFEPTIDYVAVKFPKWPFDKFVYAQKELGTQMKATGEVMALADTFEEALLKAVRGAEIGLNSLDLPRLAAKSDEEIRALLHTVTDERLFVLYEAIKRGIGVDELYQMTKVDRWFLHGLVNIASGRYF

SEQ ID NO: 61909 - DNA, 804 bp, Unknown
  Obtained from environmental sample
  misc_feature (1)..(804): n is a, c, g, or t
ttgtgcgtatacgaatttgtcgaagggccattttgggaacttcaccgccacgtagtcaatcgtaggctcaaacgccgcgaaagtattgccggtaacggcgtttattatttcgtccagggtatagccgacggcaatttttgtcgcgactttcgctattgggtagcccgttgccttgctcgcaagcgcggaagaacgcgaaacgcgcgggtttacctcgataaccgcgtattcaaagctgtctgggttcagggcgaactggacgttacagccgccttcaactccaagggcgcggataatgttcaaagcggccaagcggagcatttggtattctttgtccgccagagtaacggcgggcgcaatcacgatgctgtcgcctgtgtgtatgcccaccggatcaaagttttccatagagcagacggtaatcacgttcccgttgcggtcgcgcataacttcgtattctatttccttccacccggcaacggatctttccaccagaatctggcatatcggcgaaatggacaggccgtttgttgcgatttcccgaagggcgttttcgtccgccgcgatgccgccgcccgaacctccaagcgtgaaggctggacgcacgatgaccgggtagcctatctctaccgcaaatttaaccgccgtatcaacgtcgttcgcgatttccgaagggatcaccggttggccgatgctctgcatggtctccttgaaaatgcgcctgtcctccgccttgtcaatcgtttctggggaagaacccagcaggcgcacgttcattttttcaagatagccgtcgcgggctaa

SEQ ID NO: 61910 - protein, 267 aa, Unknown
  Obtained from environmental sample
  misc_feature (1)..(267): Xaa is any amino acid
MCVYEFVEGPFWELHRHVVNRRLKRRESIAGNGVYYFVQGIADGNFCRDFRYWVARCLARKRGRTRNARVYLDNRVFKAVWVQGELDVTAAFNSKGADNVQSGQAEHLVFFVRQSNGGRNHDAVACVYAHRIKVFHRADGNHVPVAVAHNFVFYFLPPGNGSFHQNLAYRRNGQAVCCDFPKGVFVRRDAAARTSKREGWTHDDRVAYLYRKFNRRINVVRDFRRDHRLADALHGLLENAPVLRLVNRFWGRTQQAHVHFFKIAVAG

SEQ ID NO: 61911 - DNA, 447 bp, Unknown
  Obtained from environmental sample
  misc_feature (1)..(447): n is a, c, g, or t
ttgctcgcaagcgcggaagaacgcgaaacgcgcgggtttacctcgataaccgcgtattcaaagctgtctgggttcagggcgaactggacgttacagccgccttcaactccaagggcgcggataatgttcaaagcggccaagcggagcatttggtattctttgtccgccagagtaacggcgggcgcaatcacgatgctgtcgcctgtgtgtatgcccaccggatcaaagttttccatagagcagacggtaatcacgttcccgttgcggtcgcgcataacttcgtattctatttccttccacccggcaacggatctttccaccagaatctggcatatcggcgaaatggacaggccgtttgttgcgatttcccgaagggcgttttcgtccgccgcgatgccgccgcccgaacctccaagcgtgaaggctggacgcacgatgaccgggtag

SEQ ID NO: 61912 - protein, 148 aa, Unknown
  Obtained from environmental sample
  misc_feature (1)..(148): Xaa is any amino acid
MLASAEERETRGFTSITAYSKLSGFRANWTLQPPSTPRARIMFKAAKRSIWYSLSARVTAGAITMLSPVCMPTGSKFSIEQTVITFPLRSRITSYSISFHPATDLSTRIWHIGEMDRPFVAISRRAFSSAAMPPPEPPSVKAGRTMTG

SEQ ID NO: 61913 - DNA, 1212 bp, Unknown
  Obtained from environmental sample
  misc_feature (1)..(1212): n is a, c, g, or t
atgcataatataccagcagacagaattatcgcttactttcagcctattctctccgccgataccaaaaagatatacggttttgaagtattggggcgttttgtagacggtgacggaacggttcaatcgttaggcgatttttttaccgaccctgatacctcgcatgaagaagccctcaacatagacagaatagtaagaaaatacgctttaaaaaaatatgcggaagaaaagcgggacgaatatctgtttatcaatatcagattggcatggcttatgtcgtatgcggaaaatccggaagaaatgctgacattgcaactggcaaaagaattcggcatagaacctgaaaaaattgttatagaaattacggaagaagagtttaacgcgagcgaagaatatatccgcgtcataattcactataaaaaaatcggctgccgcatcgcgcttgacgattacggaaagagcgccagcaatattgaccgtttggcaaagcttaagccggacattataaaaatcaatattgattatattcataacagcgaaaagtcctatcattaccgtgagtatttacgatcccttgccgcttttgccgactctgttggcatcgaagtgctgtatgaaggcgtagagacacaccggcaactggatatttgtatttcctcaaaaggaaggttctatcaaggatttttaatagccgatcctcaaccgtctatgggcgatacagttataaactcttttgttttttccgtattaatcgaaaccgcatatatggcaatacaaagcaaggcgatcaattcggaaaacgtgagaaattccctggacgttcaggttgagcgtttcctgcttgaaaacccgtttgatcgcaaaaaaatttgcgacgacgcttatcttataaagctcctggataatttgccggaagtgaaaaggatttttctgtgcagcagacaaggcgttcagctttccaataatattgaacggaattcaaaagatattgaatgccgtgattataaaaacaagaactggtcctggcgcggatattttcatgaaagcctgactgcttttgcaaccggcagaaaaagctgcctgtcaaacatctatcgtgattttacgacaaaagaacagatgttcacatattattacgcggtaagcgatgacgtatttttgttcgtggatattgccgaagatacggaagggatagaggcctatgccgctggataa

SEQ ID NO: 61914 - protein, 403 aa, Unknown
  Obtained from environmental sample
  DOMAIN (1)...(232): EAL domain
  misc_feature (1)..(403): Xaa is any amino acid
MHNIPADRIIAYFQPILSADTKKIYGFEVLGRFVDGDGTVQSLGDFFTDPDTSHEEALNIDRIVRKYALKKYAEEKRDEYLFINIRLAWLMSYAENPEEMLTLQLAKEFGIEPEKIVIEITEEEFNASEEYIRVIIHYKKIGCRIALDDYGKSASNIDRLAKLKPDIIKINIDYIHNSEKSYHYREYLRSLAAFADSVGIEVLYEGVETHRQLDICISSKGRFYQGFLIADPQPSMGDTVINSFVFSVLIETAYMAIQSKAINSENVRNSLDVQVERFLLENPFDRKKICDDAYLIKLLDNLPEVKRIFLCSRQGVQLSNNIERNSKDIECRDYKNKNWSWRGYFHESLTAFATGRKSCLSNIYRDFTTKEQMFTYYYAVSDDVFLFVDIAEDTEGIEAYAAG

SEQ ID NO: 61915 - DNA, 1098 bp, Unknown
  Obtained from environmental sample
  misc_feature (1)..(1098): n is a, c, g, or t
atggccgagttaggccaccccgttgtgctcggcggacgttacggcctgggttcaaaagaatttacccccgcaatggtcaaaggcgtattcgaaaaccttacaggcaagaaaatcgccaatttcatcgtcggtattaatgacgatgtggaacacaagagtattgattacgatccgcattttgtattggaagaagaaggtttaagcgaagctttgttctacggcttgggatcggacggcacggtcggcgcgaacaagaactcaatcaagatcatcagcgaggcgaaacctgaactcaacgcgcaggcgtacttctcctacgactcgaaaaaatcaggcggctttaccgtttcgcacctccgcttcggcaaaggcgctataagaaggccgtaccttatcaactccgcggacttccttgcgtgccacaaattttcctacatggaaatgtacgatatgcttaaaatgctcaagtcaggcggcacattccttcttaacagccccttcaaagcggcggatgtatggaagaatatccccgtagaggcacagaagcgcataatcgacaaaaaattaaaattctatgttataaacgccgccgaaattgcgtttaacaccggcatgggcaaccgcatcaacacggtcatgcaggccgcttatttcaagatttccggcatattgtccgaagaagaagcggtaagacgcatgaaggaacatatcgaacattcctacggcaagaagggcaaagacgtagtagaaaagaactacaaaaccgtagacgcgtcattaaccgccgttgaggaagtaaaatatccttccaagaccgaaggcgacatccacatgaaaaaaccctttgcaacagcgaaggatccatggatcaaggaagttctcggaaccatgtcggtacaggaaggcgacaacctgcccgtcagcaaacttccggaagacggaacattcccgaccgccactacccagtacgaaaaacggtccgtcgcggaacgcgttcccctttggaatcccgaagtctgtatacagtgcggcactgtactgtcgtatgcccccacgcctgtatgcgctttaaaaccttaccgacgatcaagtcgctaa

SEQ ID NO: 61916 - protein, 365 aa, Unknown
  Obtained from environmental sample
  DOMAIN (76)...(261): Pyruvate ferredoxin/flavodoxin oxidoreductase
  misc_feature (1)..(365): Xaa is any amino acid
MAELGHPVVLGGRYGLGSKEFTPAMVKGVFENLTGKKIANFIVGINDDVEHKSIDYDPHFVLEEEGLSEALFYGLGSDGTVGANKNSIKIISEAKPELNAQAYFSYDSKKSGGFTVSHLRFGKGAIRRPYLINSADFLACHKFSYMEMYDMLKMLKSGGTFLLNSPFKAADVWKNIPVEAQKRIIDKKLKFYVINAAEIAFNTGMGNRINTVMQAAYFKISGILSEEEAVRRMKEHIEHSYGKKGKDVVEKNYKTVDASLTAVEEVKYPSKTEGDIHMKKPFATAKDPWIKEVLGTMSVQEGDNLPVSKLPEDGTFPTATTQYEKRSVAERVPLWNPEVCIQCGTVLSYAPTPVCALKPYRRSSR

SEQ ID NO: 61917 - DNA, 1344 bp, Unknown
  Obtained from environmental sample
  misc_feature (1)..(1344): n is a, c, g, or t
gtggacggacagaaagcggcgctggttatagcctgcgaagactgctacagctgcggcgtctgcttcaatatatgccccatgtccaataaaggccaggaaaaacccgcgctgtcatggaaacattattccgatgatcacgaattccacgcggaacaggtcaaggtctgggagtacttcctttcattgcccgaaacgcccgcgggcgaactgaaaaacgcgaaagcgtttgcctacaagcgtcccctgtttgaattctccggcgcctgcggcggctgcggtgagacaccctacatcaaacttatgtcgcagcttgtcggcgaccgcgcgctcatcggcaacgccacaggctgtacctcaatttacggcggaaacctccccaccaccccctacgcgcagagggcggacgggcgcgggccggtgtggtcaaacagcctctttgaagacgcggcggaattcgccatgggcttcaggcttaccagcgacaagctggctgtccacgcccgcgaaattgccgaaaaggcaaaaagcgaaggcattgccgccggaatcatcgacaagatactttccaatgatcaggctgatgaagcgaagatcgacgaaatacggaaaaacatagacgaactcaaagcggcgcttaaaaacgactcaaagcccacggcgaaactgttgctctcccttgccgatttctttgtaaaaagatcggtatggggcttcggcggcgacggctgggcttatgacatcggcttcggcggtcttgaccacgtactcgcctcgggcaaaaatgttaaccttctgtgtctggacaccgaggtctactccaacaccggcggccagatgtcaaaggcgaccccggtaggcgccatcgccaagttcgccaacgccggaaaggaaattaccaaaaaagacctgggcgcgatagcaatgagttacggttatgtgtatgtcgccaaggtatcgctgggcgcggacatgaaccagacgatcaaagccttccgcgaagctgagtcctacaacggcccctcgcttatcatcgcctactcgcactgtatcaaccacggcatcgacatgagcaagggacttgagcacggcaaggcggtagtcaccagcggcctgtggcccctgttccgctacgaccccaggctcaaagaccagggcaagaaccccttccagcttgactccaaggaacccacgaccagcattgaggatttcatgtacagcgaagtccgcttcaagagcctcaaacaggccgatcccaaccgcgccgacagactgcttaaaatagccaaggacaaagccgagcgcacctggaaagagtacaagtacctggcggacagaccgttctaa

SEQ ID NO: 61918 - protein, 447 aa, Unknown
  Obtained from environmental sample
  DOMAIN (215)...(345): Thiamine pyrophosphate enzyme, C-terminal TPP binding domain
  misc_feature (1)..(447): Xaa is any amino acid
MDGQKAALVIACEDCYSCGVCFNICPMSNKGQEKPALSWKHYSDDHEFHAEQVKVWEYFLSLPETPAGELKNAKAFAYKRPLFEFSGACGGCGETPYIKLMSQLVGDRALIGNATGCTSIYGGNLPTTPYAQRADGRGPVWSNSLFEDAAEFAMGFRLTSDKLAVHAREIAEKAKSEGIAAGIIDKILSNDQADEAKIDEIRKNIDELKAALKNDSKPTAKLLLSLADFFVKRSVWGFGGDGWAYDIGFGGLDHVLASGKNVNLLCLDTEVYSNTGGQMSKATPVGAIAKFANAGKEITKKDLGAIAMSYGYVYVAKVSLGADMNQTIKAFREAESYNGPSLIIAYSHCINHGIDMSKGLEHGKAVVTSGLWPLFRYDPRLKDQGKNPFQLDSKEPTTSIEDFMYSEVRFKSLKQADPNRADRLLKIAKDKAERTWKEYKYLADRPF

SEQ ID NO: 61919 - DNA, 666 bp, Unknown
  Obtained from environmental sample
  misc_feature (1)..(666): n is a, c, g, or t
atgattcaacttgttgctttccttggtaatcccggttctgaatatgccggtaaccgacacaacgcgggctggatgcttgcgcgggttcttcctttctacgcgtctctgcgctggcagaaaaaattcaagggcctgtatgccgcgataaacagcgcacagatagcgcagtttgctgaaccctggcaggaccagagcgtccagggttcttcttttgagaaaattcactttctgatgcccgaaacctacatgaaccattcaggggaatcggtacacggggccgcttcgtttttcaaggtcaagattgaggaaattctcgtggtccatgatgaactggaactccccctggggaccatttcgctgaaattttcaggcggccttggcggccacaacggcctgcgctcaatgaaggcgtgctgcggggccgctgatttctggcgtctgcgaatcggcattggccgccctgactcgcggctgcccggcgaaggcggtcccgagggaagcggcaagggggtaattgattgggtactgtcggatttttcaggcgccgagcgggaactgcttgacccggcgcttgacgcgggcgcgggccttttactgcgggccctgaccggcgaaccggaaaccctgctaccccaatgggcaaaaaagaaaatttcaggagcgtaa

SEQ ID NO: 61920 - protein, 221 aa, Unknown
  Obtained from environmental sample
  DOMAIN (4)...(215): Peptidyl-tRNA hydrolase
  misc_feature (1)..(221): Xaa is any amino acid
MIQLVAFLGNPGSEYAGNRHNAGWMLARVLPFYASLRWQKKFKGLYAAINSAQIAQFAEPWQDQSVQGSSFEKIHFLMPETYMNHSGESVHGAASFFKVKIEEILVVHDELELPLGTISLKFSGGLGGHNGLRSMKACCGAADFWRLRIGIGRPDSRLPGEGGPEGSGKGVIDWVLSDFSGAERELLDPALDAGAGLLLRALTGEPETLLPQWAKKKISGA

SEQ ID NO: 61921 - DNA, 816 bp, Unknown
  Obtained from environmental sample
  misc_feature (1)..(816): n is a, c, g, or t
atgaacttggaagagtcctttaaggccctctacgacgttgtggtacagcttcgcggccccggcggctgcccctgggaccgggagcagacacctttgactctgcggggcgatttaatcgaggagacctatgagtgcgtggaagccattgaggaaaaaaatcccgtccacgttgccgaggagctaggcgatcttttccttttggcgaccatgctctcctatatgcacgaacaggaaggcgcgtttaccattgccgacgtgcttgcgggagttacggaaaaactgatccgccgccatccccatgtattcggcgatgcaaaagtaagaaacagtgccgaggtccttgttaattgggcggcaataaaggtggaacaggaaggtcgcaagcccaaagactcaatcctggacgaggtaagctccggcctgccgcccatggatcgcgcctggaaactccagaaaaaagcggccaaagccggttttgactggcccgacattgagggcgtaatcgcgaaaatccgggaagagcttgaggaagcgcaagacgccacgggcattacgcgcggcaatacggaaaccccgtccggtccggaaaagctggaagaagaattgggggatctgctcttttcggcgattaacctgtgccgctatcttaaagtggagccttcagtggcgcttcgcaggaccaacagcaaatttaccagccgtttcaaatacgtagagaaaaaaatgaaggaaaccgggcaggaaatgaagcaggaaaacctgggcgtcatggacgctttttggaatgaagcgaaaaccaaaggcttgttaggatag

SEQ ID NO: 61922 - protein, 271 aa, Unknown
  Obtained from environmental sample
  DOMAIN (162)...(235): MazG nucleotide pyrophosphohydrolase domain
  misc_feature (1)..(271): Xaa is any amino acid
MNLEESFKALYDVVVQLRGPGGCPWDREQTPLTLRGDLIEETYECVEAIEEKNPVHVAEELGDLFLLATMLSYMHEQEGAFTIADVLAGVTEKLIRRHPHVFGDAKVRNSAEVLVNWAAIKVEQEGRKPKDSILDEVSSGLPPMDRAWKLQKKAAKAGFDWPDIEGVIAKIREELEEAQDATGITRGNTETPSGPEKLEEELGDLLFSAINLCRYLKVEPSVALRRTNSKFTSRFKYVEKKMKETGQEMKQENLGVMDAFWNEAKTKGLLG

SEQ ID NO: 61923 - DNA, 369 bp, Unknown
  Obtained from environmental sample
  misc_feature (1)..(369): n is a, c, g, or t
atggctcgtctcgaggggggcttcccgcttagatgccttcagcggttatcccgtccgaacgtggctacccggcgcttgcccttggcaggacaaccggcacaccagaggttcgtccatttcggtcctctcgtactaaaaacagctcctctcaaccatccaacgcccatggcagatagggaccgaactgtctcgcgacgttctgaacccagctcacgtaccgctttaattggcgaacagccaaacccttgggacctgcttcagccccaggatgcgatgagccgacatcgaggtgccaaaccttcccgtcgatgtgaactcttggggaagattagcctgttatccccggagtaccttttatccgttaagtga

SEQ ID NO: 61924 - protein, 122 aa, Unknown
  Obtained from environmental sample
  misc_feature (1)..(122): Xaa is any amino acid
MARLEGGFPLRCLQRLSRPNVATRRLPLAGQPAHQRFVHFGPLVLKTAPLNHPTPMADRDRTVSRRSEPSSRTALIGEQPNPWDLLQPQDAMSRHRGAKPSRRCELLGKISLLSPEYLLSVK

SEQ ID NO: 61925 - DNA, 303 bp, Unknown
  Obtained from environmental sample
  misc_feature (1)..(303): n is a, c, g, or t
gtgccaaaccttcccgtcgatgtgaactcttggggaagattagcctgttatccccggagtaccttttatccgttaagtgacggcgcttccactcgccaccgccagatcactaagacctactttcgtacctgctcggcctgtcggcctcgcagtcaagcctccttgtgcctttacactcgcacgccgatttccaaccggcgcgaggagaccttcgcgcacctccgttactctttgggaggcgaccgccccagtcaaactgcctgcctaccgctgtccgaagcccagcttcatgggccccgttag

SEQ ID NO: 61926 - protein, 100 aa, Unknown
  Obtained from environmental sample
  misc_feature (1)..(100): Xaa is any amino acid
MPNLPVDVNSWGRLACYPRSTFYPLSDGASTRHRQITKTYFRTCSACRPRSQASLCLYTRTPISNRREETFAHLRYSLGGDRPSQTACLPLSEAQLHGPR

SEQ ID NO: 61927 - DNA, 321 bp, Unknown
  Obtained from environmental sample
  misc_feature (1)..(321): n is a, c, g, or t
gtgacggcgcttccactcgccaccgccagatcactaagacctactttcgtacctgctcggcctgtcggcctcgcagtcaagcctccttgtgcctttacactcgcacgccgatttccaaccggcgcgaggagaccttcgcgcacctccgttactctttgggaggcgaccgccccagtcaaactgcctgcctaccgctgtccgaagcccagcttcatgggccccgttagaaacctagtcagacaagggtggtatttcaccgccggctccacacaggctaacgcccatgcctcccagcctcccacctatcctacacatgcctga

SEQ ID NO: 61928 - protein, 106 aa, Unknown
  Obtained from environmental sample
  misc_feature (1)..(106): Xaa is any amino acid
MTALPLATARSLRPTFVPARPVGLAVKPPCAFTLARRFPTGARRPSRTSVTLWEATAPVKLPAYRCPKPSFMGPVRNLVRQGWYFTAGSTQANAHASQPPTYPTHA

SEQ ID NO: 61929 - DNA, 471 bp, Unknown
  Obtained from environmental sample
  misc_feature (1)..(471): n is a, c, g, or t
gtgaagccccctagtccatccagtgctctacctgcgcaacatttgcatgaggctgtccctcaaggcatttcggggagaaccagctatttccaagtttgtttagtctttcgctccgagccacgggtcatccctgccttttttaacagactagggttcggccctccacccggtttcacccgggcttcagcctgcctatggctagatcacttggcttcgggtctatggcatgcaactattacttcgccctgttcagactcggtttccctgcggctccgggactcccatcccttagcctcgctgcataccataactcgcaggctcattctacaaaaggcacgccgtcacccaattacttgggctccgacctgttgtgggtccacggtttcaggttctttttcactcccctcgccggggttcttttcgcctttccctcacggtacttctgcactatcggtcgctccctgtgtttag

SEQ ID NO: 61930 - protein, 156 aa, Unknown
  Obtained from environmental sample
  misc_feature (1)..(156): Xaa is any amino acid
MKPPSPSSALPAQHLHEAVPQGISGRTSYFQVCLVFRSEPRVIPAFFNRLGFGPPPGFTRASACLWLDHLASGLWHATITSPCSDSVSLRLRDSHPLASLHTITRRLILQKARRHPITWAPTCCGSTVSGSFSLPSPGFFSPFPHGTSALSVAPCV

SEQ ID NO: 61931 - DNA, 456 bp, Unknown
  Obtained from environmental sample
  misc_feature (1)..(456): n is a, c, g, or t
atggctagatcacttggcttcgggtctatggcatgcaactattacttcgccctgttcagactcggtttccctgcggctccgggactcccatcccttagcctcgctgcataccataactcgcaggctcattctacaaaaggcacgccgtcacccaattacttgggctccgacctgttgtgggtccacggtttcaggttctttttcactcccctcgccggggttcttttcgcctttccctcacggtacttctgcactatcggtcgctccctgtgtttagccttggatcgtggtcgacccggattcccgcggggtttctcgtgccccgcagtacttaggataccgctgccaaatagccatcgtttcgggtacggggctttcaccccctctggccggctttcccaaaaccgttcccctacgatgaccctccagatatcgcggtcctgcaaccccgcctaa

SEQ ID NO: 61932 - protein, 151 aa, Unknown
  Obtained from environmental sample
  misc_feature (1)..(151): Xaa is any amino acid
MARSLGFGSMACNYYFALFRLGFPAAPGLPSLSLAAYHNSQAHSTKGTPSPNYLGSDLLWVHGFRFFFTPLAGVLFAFPSRYFCTIGRSLCLALDRGRPGFPRGFSCPAVLRIPLPNSHRFGYGAFTPSGRLSQNRSPTMTLQISRSCNPA

SEQ ID NO: 61933 - DNA, 954 bp, Unknown
  Obtained from environmental sample
  misc_feature (1)..(954): n is a, c, g, or t
gtggccgggtacgtcgccttcggcggcagtgtttccaagtgccgcagcgtcggcgaggtcggcggtaaaaccgccgtcggcggcatagcggggcgcgttgagaacggtaaaatcgataattgctgttccgccgcgacggtcagcggcgaaaacgaagtcggcggggtggttggatccgtttattcgtccggcggcggcgtaaacgacagcgcggcgctgaatccaagcgtgaagtccacccgcgggcgtcccgatgtcgggcgcgtggtcggaaagaacgctgacggcgcgacgctctcgaacaacgccgcttgcgccgaaatgaggaacggcgccggcggtaccgaatggccggctgacccggctctgaacggcgagtccgtcgccgctgatctgatacgttccgacagaacaatcggcgggcgctttaatggagacggcggcggttggacggtaacatccgacatgcttcccggcgcggcgtcgtcgccgccgccgtcaacgccggcatcatcccaaccgccggcatcaacacccgtgccgccgcccgcgccgatatccgtaggcgctgatctagccgccgcgccgcaccgctcccaacggccggcggtcgccgcgccggaaatttccggggacggcggctttacggatccgatagcgggggatatggtcgcggtgaagggcggaacgtttatgatgggggctaccgccgaacagggcggcgattgctacgatgatgaaaaacccgctcacgcggtgatcctcagagattattacataggggaaatacctcgtgacgcaaaggttgtggaatcggataatggcgggaaacgtccgttgccggatccgtctaaatttaagggcggcgattttggcggtcgagacaatcagttggaaagatatcgtggatgtgtttttcataagattgaaagtgacgaccggaaaagcgtatag

SEQ ID NO: 61934 - protein, 317 aa, Unknown
  Obtained from environmental sample
  misc_feature (1)..(317): Xaa is any amino acid
MAGYVAFGGSVSKCRSVGEVGGKTAVGGIAGRVENGKIDNCCSAATVSGENEVGGVVGSVYSSGGGVNDSAALNPSVKSTRGRPDVGRVVGKNADGATLSNNAACAEMRNGAGGTEWPADPALNGESVAADLIRSDRTIGGRFNGDGGGWTVTSDMLPGAASSPPPSTPASSQPPASTPVPPPAPISVGADLAAAPHRSQRPAVAAPEISGDGGFTDPIAGDMVAVKGGTFMMGATAEQGGDCYDDEKPAHAVILRDYYIGEIPRDAKVVESDNGGKRPLPDPSKFKGGDFGGRDNQLERYRGCVFHKIESDDRKSV

SEQ ID NO: 61935 - DNA, 552 bp, Unknown
  Obtained from environmental sample
  misc_feature (1)..(552): n is a, c, g, or t
gtgacgcaaaggttgtggaatcggataatggcgggaaacgtccgttgccggatccgtctaaatttaagggcggcgattttggcggtcgagacaatcagttggaaagatatcgtggatgtgtttttcataagattgaaagtgacgaccggaaaagcgtataggttgccgacgagggcggaatgggaatacgccgcgcgcggcggggtgaagagcaagggttataagtatgccgggagcaacgacatagacgaaatagcctggtacggcggcaatagcggcagaaagacgcatatcgtgggaacaaaagccccgaacgagcttggaatatacgatatgagcggaaatatatgggagtgggtgaacgattggtacgggaagtacagatcggattcgcagacgaacccgatgggggccgcgccggacgcttaccgtgtgaatcgaggaggcagctggagctccgcggcggcgaacagccgtgtttccagccgccgcaacgactttccggaagccgccagcgatctcgtggggtttcgcctcgcgctgacgcgctaa

SEQ ID NO: 61936 - protein, 183 aa, Unknown
  Obtained from environmental sample
  DOMAIN (2)...(181): Domain of unknown function (DUF323)
  misc_feature (1)..(183): Xaa is any amino acid
MTQRLWNRIMAGNVRCRIRLNLRAAILAVETISWKDIVDVFFIRLKVTTGKAYRLPTRAEWEYAARGGVKSKGYKYAGSNDIDEIAWYGGNSGRKTHIVGTKAPNELGIYDMSGNIWEWVNDWYGKYRSDSQTNPMGAAPDAYRVNRGGSWSSAAANSRVSSRRNDFPEAASDLVGFRLALTR

SEQ ID NO: 61937 - DNA, 570 bp, Unknown
  Obtained from environmental sample
  misc_feature (1)..(570): n is a, c, g, or t
atgattctggcccacatagagaacggctcnnttatttacggcccgggatgccgttcgntgatctggacacaaggctgctccctccggtgcgcggggtgctggaacagcgatatgtgggagttcgagccgaacatcgtcatgcccgtcggcgaaatacttaatctgataaccgcggaagggcgcgccatcgaaggaataacgctcttaggcggcgagccgctcgaccaagcggaggagtgcgccgaactattgcgcttgtgcaaaacacgggaactcaccaccatgctcttcaccggatacgaacttggggaaataactgacggcgacatcctaaaactgtgcgatatactgatcaccggccgctacgacgaatcaaagagaacgctctaccgtcagtggatcggatcgacaaaccaagagatacgcttcctgagcgacgcttaccgcgattacaagctccaaaacgcgaattacgtggagatcggcattgaggacaacgggagaatcacgacgctcgggtttccgccggacggggcggggacagctttcggaattccggcgaactattag

SEQ ID NO: 61938 - protein, 189 aa, Unknown
  Obtained from environmental sample
  misc_feature (1)..(189): Xaa is any amino acid
MILAHIENGSXIYGPGCRSXIWTQGCSLRCAGCWNSDMWEFEPNIVMPVGEILNLITAEGRAIEGITLLGGEPLDQAEECAELLRLCKTRELTTMLFTGYELGEITDGDILKLCDILITGRYDESKRTLYRQWIGSTNQEIRFLSDAYRDYKLQNANYVEIGIEDNGRITTLGFPPDGAGTAFGIPANY

SEQ ID NO: 61939 - DNA, 1959 bp, Unknown
  Obtained from environmental sample
  misc_feature (1)..(1959): n is a, c, g, or t
atggtcaagatcggccgaggtccttacgacgcaatcagcgaagcggattttatgaaagacgagtaccgcaacgtgtcgcgtgaagctgtaagaaaatcggcagtcctgcttaaaaacgatgggaactttctccccctgcgacccggcgcggttgaaggcacaatcgcggtaatggggccccttgcctctgaattgcatttggactggtacgccgggcatccctcttatatgattacgccgctggatggtttacgggacttatatggcaaggataaggttgcgtataccgactgccgcgacattgtgttttttaccactgaagatggcaggcctctggtattgacggaaaagactttctccgttggaaaacaaggggaggttcctacccgcttttatatggaggattggggctggggcgcacggacatttaccgatgcgcaaagcggtctcatgctggaaatcccatattacgatccaaaaccaggcgatgacgcaggcgagcctcagcttattaccgcaaccgcaaaaagttccctaatctggtttaacaaaaatttatttaatgccattccacaggagaacggcctgtttcttctgcgtacctatgacaaccgccgcgccgcatatccttgcgagcctggcccggtggaactgcgagacaatacctttgagagtacaggagagttgttcaggatgaatcttgagcgagacggtctttcagaagcggtaaaggccgcggcgcaggcggggcaggttatttttgtcggcggtaacgatccgatgatcacagggagggaaggggttgatcggccaagtctttccctgccgccgcgtcaggaagagctgattcgccgtatctctgccgctaatcccaaaactgtattggtgttgctttccggctatccctttgcctgtaaagatatcgccttaaaagttcccgcgatcttgtggatggcgcatggtattcaggagaccggagccgccttagccgacattttaagcggagcttattctccggctggaaggcttcctcttacctggtatgataatgaaagacagcttccggctatgatgcaatacgatattatttcttccacatctacttatcagtatttctcaggacaagtattgtttccttttggtcacgggctaagttacagcagttttgagtattcgcatcttgcaattgacaaaactgaagcgggagcaaacgaaaccgtcaacatttcgtttaaaataaaaaatacaggttttgttgaagccgaagaagtcccccaaatgtatatctcgttttcaggttccgtgttccgccgtccgttaaaaagcctgaaaggatttacccgtcttggtatgcgccctaacgaagaacaagttgttcgatttactttgccggtagaggaattggcggtttgggacagttttcaagaccgtttttgcgtggagacaggccattgcacggtcatgattggtgcgtcttcggcggatatacggctttcgggcggctttaaagttcatggcgaaaatgtatttcccagaacaattcccgatcgtatttacgcgcaaaggtttgacggttattcagattgttttctgcacgaaaaacggggcagtgacattcccgctgtatttaacagttctgaaggcggctggatacgttttgaggcattagattttgccgatggtcgcggattgatttccgccattgtacaaggcgcgccgggcagccgcattgaaattcgtctggactcgccgtatgacgagtatggcgcattgctgggaacattcgttgtccctaacaccggcgacatatctttttatcatctggcagaaatatacagtccccaccgccttccggtttgggcatacgctgaaactgccatagaaaaaacaagcggcgttcatgatctgtatctggtgttttttggaaaaacaggtctatggcgaattgatattcaataa

SEQ ID NO: 61940 - protein, 652 aa, Unknown
  Obtained from environmental sample
  DOMAIN (521)...(652): Carbohydrate binding module (family 6)
  misc_feature (1)..(652): Xaa is any amino acid
MVKIGRGPYDAISEADFMKDEYRNVSREAVRKSAVLLKNDGNFLPLRPGAVEGTIAVMGPLASELHLDWYAGHPSYMITPLDGLRDLYGKDKVAYTDCRDIVFFTTEDGRPLVLTEKTFSVGKQGEVPTRFYMEDWGWGARTFTDAQSGLMLEIPYYDPKPGDDAGEPQLITATAKSSLIWFNKNLFNAIPQENGLFLLRTYDNRRAAYPCEPGPVELRDNTFESTGELFRMNLERDGLSEAVKAAAQAGQVIFVGGNDPMITGREGVDRPSLSLPPRQEELIRRISAANPKTVLVLLSGYPFACKDIALKVPAILWMAHGIQETGAALADILSGAYSPAGRLPLTWYDNERQLPAMMQYDIISSTSTYQYFSGQVLFPFGHGLSYSSFEYSHLAIDKTEAGANETVNISFKIKNTGFVEAEEVPQMYISFSGSVFRRPLKSLKGFTRLGMRPNEEQVVRFTLPVEELAVWDSFQDRFCVETGHCTVMIGASSADIRLSGGFKVHGENVFPRTIPDRIYAQRFDGYSDCFLHEKRGSDIPAVFNSSEGGWIRFEALDFADGRGLISAIVQGAPGSRIEIRLDSPYDEYGALLGTFVVPNTGDISFYHLAEIYSPHRLPVWAYAETAIEKTSGVHDLYLVFFGKTGLWRIDIQ

SEQ ID NO: 61941 - DNA, 906 bp, Unknown
  Obtained from environmental sample
  misc_feature (1)..(906): n is a, c, g, or t
atgttggccatgcagatatgcaccaaagaaaaaccggatttgatcctgttggacgttgaaatgccggatatggacggatttgatgtcatttccagattaaagcagaacccttacctgaaccggatacctgttatcttccttacagccagccatagccatgaagtcgagataaaggctttggaattgggcgcaagggattttataatgaaaccggcggaaaaaagcatattgctgcacagaattgaactgcatcttcggtttgcttcctatcaggttcagacggaagaaaaagtcacagccctttcagacaacatcgcaatctcatttgcggagatgatcgaatgccgtgacgaaaatactggcggccatgtgattcgtacgtcaaaatatgttgatatactgggcaaagagctgattagcaagggtatttttccggacgagcttaatgattccgaattgcagatgatggtgcgcgccgccccgctgcacgatatcgggaaaatagccatcagcgaccgcgtgctgctgaaggccggtcggcttgatgatatagaattttccattattaaacgccatgcggaaataggcgcccaaattgtggaaaggatgtaccagcggatgcccgcgcagaggtatctttactatggcagccttattgccggatcccaccatgaacgttatgacggcaagggttacccgaaaggcctggaaaaggataatatccccctctgcgcgagaattatggcagtggcggatgtttatgacgcgcttatggaaacacgggttttaccgcaggggctgggccatatccaggcaagcaatatcatttatgaaaacgaatggacgcagtttgatccaaggtcgttaaggcgttcagagatgtcgaggaacagatatgtgaaatag

SEQ ID NO: 61942 - protein, 301 aa, Unknown
  Obtained from environmental sample
  DOMAIN (1)...(82): Response regulator receiver domain
  misc_feature (1)..(301): Xaa is any amino acid
MLAMQICTKEKPDLILLDVEMPDMDGFDVISRLKQNPYLNRIPVIFLTASHSHEVEIKALELGARDFIMKPAEKSILLHRIELHLRFASYQVQTEEKVTALSDNIAISFAEMIECRDENTGGHVIRTSKYVDILGKELISKGIFPDELNDSELQMMVRAAPLHDIGKIAISDRVLLKAGRLDDIEFSIIKRHAEIGAQIVERMYQRMPAQRYLYYGSLIAGSHHERYDGKGYPKGLEKDNIPLCARIMAVADVYDALMETRVLPQGLGHIQASNIIYENEWTQFDPRSLRRSEMSRNRYVK

SEQ ID NO: 61943 - DNA, 1515 bp, Unknown
  Obtained from environmental sample
  misc_feature (1)..(1515): n is a, c, g, or t
ttgatggctgaggataattcaaataatgccaggcttgcttttcttgaggaggaaaacaagcggcttctggcggaatacaacggactgaaccgcaagtatcaggcagccaaagaaacaattgaacgcatcaactggtacagccgttccagggatcaaatgtacgagagcctgttggcaaagaacaccaggcagaaagaatttttcagcctgctcctgaaaaacctgcaaaacgttattttgattttggatcagaacctgcgtctgctgtattgttcagacgcttttctcaggcttgtcggaataaccaatataggatttatcagcaaccagtcctttgatgaattttccaaatggtacgcggacgcggccagcatcaaatttcttcttgacgcgctggtacaggcgttagctgaaaaaaaggtaaatgtcgtggatcgggttttgcctatagggaaggacaaagaacccaggcattacaggattaatatcgcgccaatgatgaatgctaaaggggtgattgaaggcacaattctcctgttcaatgattttacggaaatcatggaagccaaagaacaggcagagaaggcaaacaaggcaaaatcggtttttctcgcccagaccagccatgaaatacgcacccccatgaacaccgtgattggcatgagcgaattggccctccgcgcggataacctgccccaggcccaggagtatcttggaagcatcaagcaggccgggcttaaccttttggccatcatcaatgatattcttgatatttcaaagatcgaagccggcacaatggaaatagagaatattccttattcgctttccacccttattaacgatgtggttaccatgatccaggtaaaagtctcggaaaaacccatcatctttgtcgttgatttggattcttctcttcccaatatgcttaagggtgacgaagcgaggatacggcaggttctggtaaatctgctttccaacgcggttaaatacacccataaagggttcatccggctgacattgacataccatatcgatccattggacaacaatgtgattaggcttgtttatgaagtttcagattcgggcattggcataaagaaagaggatctgcctaatctgtttcgcacgtttacacgcctggacatgaaaaaaaaccagggcgtggaaggaaccggccttgggctcgcgattaccaaaagtatctgcaaggccatgggcggcgatgtaaccgccgacagcaagtacggcgagggttctatttttacagcggttcttccccagattattgaagaaaaagagccgatcgcgctggtggaaaaccccggtaaaaaatccgttctttactatgaaaaacagccgctttacgccaaatctatggtttatgctctgggaaacatgggcgtacctgtgacgctaaaaacagacgcggaagatttcctgcagactctttccggcggaaattatcatttcgcttttatcaatgctgatattgcagaaaaagcaagggcaatgtaa

SEQ ID NO: 61944 - protein, 504 aa, Unknown
  Obtained from environmental sample
  DOMAIN (66)...(183): PAS fold
  misc_feature (1)..(504): Xaa is any amino acid
MMAEDNSNNARLAFLEEENKRLLAEYNGLNRKYQAAKETIERINWYSRSRDQMYESLLAKNTRQKEFFSLLLKNLQNVILILDQNLRLLYCSDAFLRLVGITNIGFISNQSFDEFSKWYADAASIKFLLDALVQALAEKKVNVVDRVLPIGKDKEPRHYRINIAPMMNAKGVIEGTILLFNDFTEIMEAKEQAEKANKAKSVFLAQTSHEIRTPMNTVIGMSELALRADNLPQAQEYLGSIKQAGLNLLAIINDILDISKIEAGTMEIENIPYSLSTLINDVVTMIQVKVSEKPIIFVVDLDSSLPNMLKGDEARIRQVLVNLLSNAVKYTHKGFIRLTLTYHIDPLDNNVIRLVYEVSDSGIGIKKEDLPNLFRTFTRLDMKKNQGVEGTGLGLAITKSICKAMGGDVTADSKYGEGSIFTAVLPQIIEEKEPIALVENPGKKSVLYYEKQPLYAKSMVYALGNMGVPVTLKTDAEDFLQTLSGGNYHFAFINADIAEKARAM

SEQ ID NO: 61945 - DNA, 855 bp, Unknown
  Obtained from environmental sample
  misc_feature (1)..(855): n is a, c, g, or t
atgcgcaaactcatactgactacggcggcggtcgcggcggcgatttggttggcggggtgctctaagacaccgacgccgaaatccgtctccgcgacgcctgatacggcggccctatcggtcgatacgccgcccgccgacgcttccgctttttccgaaacggcggtcggcgggcaaagttttgaaatggcgttcgtggcgggcgggacgtttacgatagggtgcgccgccgaacaggacagcgattgcgccgaccacgaacgtccggcgcattccgtgacgctgagcgattactacatagggaagcgcgaggtgacgcangggctgtggaaagcggtgatgggcgccgataataatccgtcatcttttacagggagcgataatttgcccgttgaaaacgtccgttggaatgaggtcagcgcgtttatagacagtttgaatagaaagaccggcaggacgtacagattgccgacggaggcggagtgggagtatgcggcgcgcggggggaataagagcggagggtacaaatattcaggtagtaatacgttggatagcgttgcttggtattgggataatagcggtcgtgaaactcatgaggcaggtacgaaagcgccgaatgaacttggtatctatgacatgagcggcaacgtgtgggagtggacgggcgataggtatggagattacggttcggatgcgcagactaatcctatagggccgtcaacgggctctaaccgcgtgtttcggggcggtagttggtacagcgacgagtgggtttgccgtgtctctattcgctacgacaacgaccctgacggcagcttcaacggcttaggcttccgccttgtgttgttgtccccctag

SEQ ID NO: 61946 - protein, 284 aa, Unknown
  Obtained from environmental sample
  SIGNAL (1)...(22)
  DOMAIN (58)...(281): Domain of unknown function (DUF323)
  misc_feature (1)..(284): Xaa is any amino acid
MRKLILTTAAVAAAIWLAGCSKTPTPKSVSATPDTAALSVDTPPADASAFSETAVGGQSFEMAFVAGGTFTIGCAAEQDSDCADHERPAHSVTLSDYYIGKREVTXGLWKAVMGADNNPSSFTGSDNLPVENVRWNEVSAFIDSLNRKTGRTYRLPTEAEWEYAARGGNKSGGYKYSGSNTLDSVAWYWDNSGRETHEAGTKAPNELGIYDMSGNVWEWTGDRYGDYGSDAQTNPIGPSTGSNRVFRGGSWYSDEWVCRVSIRYDNDPDGSFNGLGFRLVLLSP

SEQ ID NO: 61947 - DNA, 651 bp, Unknown
  Obtained from environmental sample
  misc_feature (1)..(651): n is a, c, g, or t
atgcgcaaactcatactgactacggcggcggtcacggcggcgattgcgggggctttcgccgatgagacggctttcggaacattcaccgacgcaagagacgggcagacgtacaagacggtgaaaattggcaaacagacttggatggcgcagaatatcaattatcagaccaaaggcgggtcttggtgctataatgatagtgcgtcatattgcgaacaatacggcagactgtacgattggaaaacagcgacaaccgtctgtcctaaaggatggaagttgccgtctcgcgaggattgggattatttggggcaagcggtagggggagagagaaaacagggtaatgagggtatggttgattggtacggcgcgggtaagaaattgaactcaaagagcgggtggggttggaatgattactataatgtaagcggtaatggtactgacaattacggattttcagccctgcctggcggctaccgctactccactggcggtttcgacgatgccgacgactacggcatctggtggacggccacggaataccatcgcgacttcgcctactaccggtacatggactactactacgactacgtgcacgaggacggcagcgacaagagcgacgggcgctcggtgcgttgtgttgaggacagtaaatga

SEQ ID NO: 61948 - protein, 216 aa, Unknown
  Obtained from environmental sample
  SIGNAL (1)...(20)
  misc_feature (1)..(216): Xaa is any amino acid
MRKLILTTAAVTAAIAGAFADETAFGTFTDARDGQTYKTVKIGKQTWMAQNINYQTKGGSWCYNDSASYCEQYGRLYDWKTATTVCPKGWKLPSREDWDYLGQAVGGERKQGNEGMVDWYGAGKKLNSKSGWGWNDYYNVSGNGTDNYGFSALPGGYRYSTGGFDDADDYGIWWTATEYHRDFAYYRYMDYYYDYVHEDGSDKSDGRSVRCVEDSK

SEQ ID NO: 61949 - DNA, 537 bp, Unknown
  Obtained from environmental sample
  misc_feature (1)..(537): n is a, c, g, or t
atggctgatttagaatacacactcaccaacgatacgttgttcaagatgttgttcgtgaagtaccccgacttgctgaaaaggttggtcgcaaagatattgggtataacggttgagagcgtcaccgagttcgtgataaccaaccccgagatgccgccgcagaacatgggcgagaagttctgccgcttggacatcaacatgatggtgaacgcccaacaagtcaacatagaggttcaggtgaaagacgagggagactatccggtgcggtcgctctactattgggcgcggaactactcaagcgcgttgaaagacggcgggaaatactatagcctgccatgtaccgtagtcataaatattgtcgagtttgaacttttcaaggataccaccgattttcactcggagtttcgcgcgttggaagttaagcgccatacggaattgacagataggatgagtttgcattacttcgagttgcccgaagttgccggaagtagcggaagcggacgcgggagacgagttggaactgtggcttgcgctgtttaa

SEQ ID NO: 61950 - protein, 178 aa, Unknown
  Obtained from environmental sample
  misc_feature (1)..(178): Xaa is any amino acid
MADLEYTLTNDTLFKMLFVKYPDLLKRLVAKILGITVESVTEFVITNPEMPPQNMGEKFCRLDINMMVNAQQVNIEVQVKDEGDYPVRSLYYWARNYSSALKDGGKYYSLPCTVVINIVEFELFKDTTDFHSEFRALEVKRHTELTDRMSLHYFELPEVAGSSGSGRGRRVGTVACAV

SEQ ID NO: 61951 - DNA, 2448 bp, Unknown
  Obtained from environmental sample
  misc_feature (1)..(2448): n is a, c, g, or t
ttgtcgaatctccccgaaggggtttcatggacggaagagaacggcgaggggctgaccctcaccgggatcagcaatctcaccatacgcggcgtcacggggagcggcgagtggcctaaaatcatcgtagacccgcggaacgtgtacgttctacggtttgtaaattgcagcgacattctcattgagaccctcacggcggggcactccgaaggcggttattgcgccggcggcgtgttcgggttcgaggggtcgtcgcggataaccgtaaacgccacggccatgtacgggagcggcacggaaggactcaccctgaaaaacgtctcggacatgaaagttacgaattccaaaatttacgaatgcacggaagctatcttttcggttgacggcggcggcaaagtggcgtttgagaattgcttgttcctccgcaaccgcgggtatcacttggtctacgtctccggcgacggcgaccagcacctgtcaattaccgactgcgacttcagagacaactggaatgaagacggcaacggcgggatgttcttcttaacgggcgagggcatttccatatcgcgcactaagttcctcggcaacaaaatcaacaaaatcaacgtcggcaacaacaatgtgctgttcggcgaggattgcgagtttgacgacatgtttgtcgacgcgagggacgggatggggtacaggttcgtgaagatcggtaatcagacgtggatggcggataacctgaattatcagacgcctaattcttattgttacaacaacagcgattacgcctgtgtgcaatacggcaggctgtaccggtggagcgcggcgaaggaggcctgcccgacgggttggcgtttgccgtcaaaagaggagtggagcgctttgatcgccgcgacaggcggcggcgaggcgggtcaattgttgaaatcgacaagcggttgggctgaagacggtaacggtacgaatgggtccggattttcggctctgcccggcggtctccgcaacgccggcggcggcttcgaaagggtcaacgggagcggcaattggtggacagcctcggagcgcgacggcggcttcgcctactaccggttcatgggcagcgccaaaaacacagtgttcgagaactactactccaaggacggcggttactccgtccgttgcgtccaagacgacggcgcgaatgcggaatcgccgtcggacgagcggaccctgatcaagcgtattccggcgggttaccgtatccgctccatagacggcgaaaaacagatatttcacggcgatttgaacggggacggcgcggacgactacgccatcatcattgaagaggaaaccgacgatgccaatcgcggcgttatgattttctttaaagacggcggcggctacaagcttgcgttggaaaaccgtagcggcttgngatcggagagttcggaaaattgcggcgcctgcggctacaggcaaatctcgtttgagatagcanagggtaatttttatatttattaccaatggggcaaaggcaaatcaccgaaagagatatttacgtttcgctatagaaactccgagtttgagttaatcggttatgatgttgatgtcaataacattaaaggggagacaagcatcaatttcccggcgaaaaagaaattggtgaaggagtgtcctaaaggcaagaaatgcaaagaaacatggactgcctttacaatggaagaatcgatactgttgcgaaaaatcgacgatttcccaagtcttgaacttgctgattatatgaaagagactgttgaggctgggacggcgggaacaacggtagctgcaacgccggagacgtctgtaataccggcggcgacggtaaaagcggtcgcggcggccgcggcgtcggcgcggaaggggacgtttaccgacagcagaaacgggcagacgtacaaaacggtaacgataagcggcaagacgtggacggctgagaatatgaatataaagacgggcacatcgtggtgtcacggcgacgcggaatccaactgcaaaaaatacggacggctgtacaattggtcaacggcggctaagatggtctgtccggccggctggcatctgccgacccgcgacgagtgggcggttttggctaaagccgccggaggttccggcgcttacggaggcggcggcatagccggcaagacgctgaaatcaacgagcggatggagtgatttttgcggccctgacggcgataaaccgtgtaaaagcggcaacggcacggatgatttcgggttcaccgccttgtccggctccagccgcatgcttttcaacgaccaatacaaccgcctcggcgaaaacagcggctggtggacggccaccgaggaagacaacctaagcgcctacggccgccacgcgagctttatcgacgaccggttggaagagcaaagcaatcatagggactgcgggctttctgtccggtgtgtacaggatgcgggacaataa

SEQ ID NO: 61952 - protein, 815 aa, Unknown
  Obtained from environmental sample
  misc_feature (1)..(815): Xaa is any amino acid
MSNLPEGVSWTEENGEGLTLTGISNLTIRGVTGSGEWPKIIVDPRNVYVLRFVNCSDILIETLTAGHSEGGYCAGGVFGFEGSSRITVNATAMYGSGTEGLTLKNVSDMKVTNSKIYECTEAIFSVDGGGKVAFENCLFLRNRGYHLVYVSGDGDQHLSITDCDFRDNWNEDGNGGMFFLTGEGISISRTKFLGNKINKINVGNNNVLFGEDCEFDDMFVDARDGMGYRFVKIGNQTWMADNLNYQTPNSYCYNNSDYACVQYGRLYRWSAAKEACPTGWRLPSKEEWSALIAATGGGEAGQLLKSTSGWAEDGNGTNGSGFSALPGGLRNAGGGFERVNGSGNWWTASERDGGFAYYRFMGSAKNTVFENYYSKDGGYSVRCVQDDGANAESPSDERTLIKRIPAGYRIRSIDGEKQIFHGDLNGDGADDYAIIIEEETDDANRGVMIFFKDGGGYKLALENRSGLXSESSENCGACGYRQISFEIAXGNFYIYYQWGKGKSPKEIFTFRYRNSEFELIGYDVDVNNIKGETSINFPAKKKLVKECPKGKKCKETWTAFTMEESILLRKIDDFPSLELADYMKETVEAGTAGTTVAATPETSVIPAATVKAVAAAAASARKGTFTDSRNGQTYKTVTISGKTWTAENMNIKTGTSWCHGDAESNCKKYGRLYNWSTAAKMVCPAGWHLPTRDEWAVLAKAAGGSGAYGGGGIAGKTLKSTSGWSDFCGPDGDKPCKSGNGTDDFGFTALSGSSRMLFNDQYNRLGENSGWWTATEEDNLSAYGRHASFIDDRLEEQSNHRDCGLSVRCVQDAGQ

SEQ ID NO: 61953 - DNA, 996 bp, Unknown
  Obtained from environmental sample
  misc_feature (1)..(996): n is a, c, g, or t
atgagatactcttacagggaagagtataaaacgctgttttcctgcgatgatgagtatctttttgaaagggcgcgcgccgcggctcaaaaggtctacggcaaaagtatctatatgcgcggtcttattgagtttaccaattactgtaaaaacgactgcctttactgcggattgcgcgccggaaatgacaaagcgcaaagatatcgcctttccaaacagcagatacttgaatgctgcaaatcaggccatgctctgggctttagaacctttgtattgcaaggcggcgaagacccctggtttaccgatgaaattctcgtggaaattgtaagcgaaattagggaggcctaccccgattgcgccataacgctctcgcttggggagcgcagttatgaaagctacggacgcctgcgtaaggcggggacggacaggtatttactgcgccacgaaaccgcaaacgaggaacactacaatacattacatcccgataacatgcttcttgccagccgcaaacagtgcctttttaatttaaaagaattgggctatcaggtagggtgcggctttatggtcggctctccaaaccagacttccgatcatcttgtggacgatctgtgttttataaaagagctgaaaccgcacatggtaggcatagggccctttattccccattcggacacgcctttcaaagacaagcaggcgggagatttgcacctaacgctgaatctcctcgcgattttgcgccttatgcagccaaaccttctgctccccgctacaacggctctcggcacggttgacccgaacggcagggaattgggcgtccttgccggcgcaaatgttgttatgccgaacctgtcgcccgtagacgtaagaaaaaaatatctgctgtatgacaataaaatttgcaccggcgatgaagccgccgaatgtgtcgcctgcatggcaaggcgcatccttaataccggctatgaaatagtagccgcgcgcggtgattataatgaataa

SEQ ID NO: 61954 - protein, 331 aa, Unknown
  Obtained from environmental sample
  DOMAIN (42)...(205): Radical SAM superfamily
  misc_feature (1)..(331): Xaa is any amino acid
MRYSYREEYKTLFSCDDEYLFERARAAAQKVYGKSIYMRGLIEFTNYCKNDCLYCGLRAGNDKAQRYRLSKQQILECCKSGHALGFRTFVLQGGEDPWFTDEILVEIVSEIREAYPDCAITLSLGERSYESYGRLRKAGTDRYLLRHETANEEHYNTLHPDNMLLASRKQCLFNLKELGYQVGCGFMVGSPNQTSDHLVDDLCFIKELKPHMVGIGPFIPHSDTPFKDKQAGDLHLTLNLLAILRLMQPNLLLPATTALGTVDPNGRELGVLAGANVVMPNLSPVDVRKKYLLYDNKICTGDEAAECVACMARRILNTGYEIVAARGDYNE

SEQ ID NO: 61955 - DNA, 759 bp, Unknown
  Obtained from environmental sample
  misc_feature (1)..(759): n is a, c, g, or t
gtgattataatgaataaaaacggaaagcattggcttgtatttttcatttcgccgcgttattatcatgaaaaaaagaacggggagattcaggatttaatgttagaggtggcgttaatctgcggcggtccttcaaaagaatgtaacatttcattaaattcagtccgttctgtttacgaccacatgagaaatatgccggatgtttccgcaaatattgtttttattaacgaagacagcaagaaatacctgattgacgaaaaattcttatattcaaacactacgtccgattttaagtttatgcttcattcgcatggaaaccgcatagacgacgccgcttatctggatttcttaaaaagcaacgatctggtttttcccgttatgcacggtaaatacggcgaagacggggaattgcagaaatttcttgaagacaacgaaattcccttcgtcgcttctccttccgaagcgtgcgtgaaaatgtacaacaagcaaagcgcggaacttaatattcttaaagcaaataaaatgacaacaattcccaaattatttttagacgaaaaaagcgatttacccgccgaaattaaaacattttttcataataaaaaaataagcgaagttatcttaaagccggttgagggaggctcctctataggcgtaaaaaaaggaataggaattcttgatgccgttaacaaagcgaaagaattaattaacacgtacaagtctattgttgtagaaaaagtttgtaaaggaaaggatttaccgtaa

SEQ ID NO: 61956 - protein, 252 aa, Unknown
  Obtained from environmental sample
  DOMAIN (34)...(158): D-ala D-ala ligase N-terminus
  misc_feature (1)..(252): Xaa is any amino acid
MIIMNKNGKHWLVFFISPRYYHEKKNGEIQDLMLEVALICGGPSKECNISLNSVRSVYDHMRNMPDVSANIVFINEDSKKYLIDEKFLYSNTTSDFKFMLHSHGNRIDDAAYLDFLKSNDLVFPVMHGKYGEDGELQKFLEDNEIPFVASPSEACVKMYNKQSAELNILKANKMTTIPKLFLDEKSDLPAEIKTFFHNKKISEVILKPVEGGSSIGVKKGIGILDAVNKAKELINTYKSIVVEKVCKGKDLP

SEQ ID NO: 61957 - DNA, 921 bp, Unknown
  Obtained from environmental sample
  misc_feature (1)..(921): n is a, c, g, or t
atgaaagacgagaaaaaattctccggcaggtttggagattacggcggacaatacattcccgaaacattgatgaatgagatcatcaatctggaaaaagcctacaatcattataaagacgatcccgccttcaatgcagaattgaacgctctgttaaaaaattacgcaggccgcccttccctcctctactacgcggaaaaaatgacccgcgatcttggcggtcctaaaatttacctgaagcgcgaggacttgaaccacacaggctcccacaagatcaacaatgttcttggacagacgctcctcgcaaaaaaaatgggcaagacaagaattatcgccgagacgggagcgggtcagcacggtgtcgcggcggctactgcggcggcgcttctgggaatggagtgcgaaatttttatggggaaggaagacaccgagcgtcaggcgcttaatgtttaccgcatggaattgcttggcgcaaaagttcaccctgtaacatcgggaacgatgacgctaaaagacgctgtaaatgaaacgatgcgtgaatgggtaagccgtgttcacgatactcattatgtgcttggctcggtaatggggcctcatccctttcccgtaattgtgcgtgattttcaggctgtgatcagcaaggaggcaagggagcagatacttgcggcggaggggaaacttcctgccgccgtgcttgcctgtgtcggaggcggcagtaacgctatggggatgttttacaattttataaatgataagggagtgaagctcataggctgtgaggcggcggggtcgggtatcaatacggaaaaacacgcagcggcaatcgcaaaggggcaagtgggtatcttccatggaatgaaatcttatttctgccagaacgaggaagggcaaatagctcccgtgtactctatatcccggccataa

SEQ ID NO: 61958 - protein, 306 aa, Unknown
  Obtained from environmental sample
  DOMAIN (52)...(305): Pyridoxal-phosphate dependent enzyme
  misc_feature (1)..(306): Xaa is any amino acid
MKDEKKFSGRFGDYGGQYIPETLMNEIINLEKAYNHYKDDPAFNAELNALLKNYAGRPSLLYYAEKMTRDLGGPKIYLKREDLNHTGSHKINNVLGQTLLAKKMGKTRIIAETGAGQHGVAAATAAALLGMECEIFMGKEDTERQALNVYRMELLGAKVHPVTSGTMTLKDAVNETMREWVSRVHDTHYVLGSVMGPHPFPVIVRDFQAVISKEAREQILAAEGKLPAAVLACVGGGSNAMGMFYNFINDKGVKLIGCEAAGSGINTEKHAAAIAKGQVGIFHGMKSYFCQNEEGQIAPVYSISRP

SEQ ID NO: 61959 - DNA, 921 bp, Unknown
  Obtained from environmental sample
  misc_feature (1)..(921): n is a, c, g, or t
gtggggacaaataagagcgctccgtcaaggagcgtagacaagttaatgcggcatgtcccggcgcaggataattccaccgcatacagtaatgccggctgggattatccagccgggcgcgccgcggagacaaataataacaaagagttgaatatgttagattttaacgcaatcaaaaacgcggccaaaggttacgaggcggacatgacaaaatttttaagggaccttatccggattcccggtgaaagctgcggtgaaaaagaaaccgccgcccgcatcgtggaagaaatgaaaaaactcggctttgacgaggccgggattgacaagatgggcaacgcgattggctatatggggaacggcaagactcttatcgcttttgacggccacatcgacacagttggcataggcaatcgggacaactggaagttcgacccatacgagggctttgagagcgaaaccgagatcggcggacggggcgcctcggatcagcttggcgggccggttgccgcggtctatggcgcgaagataatgaaagacttaggccttctcaacgacaagtaccgcgtcatggtaagcggcacggtgcaggaggaagactgcgacggcctttgctgggaatacattataaaggaagaaaaaatcaagcctgagttcgtggtgatcaccgagccgaccaacggcaacatttaccgggggcagaggggtcgcatggagatccgcgtcgaggtgaaggggatttcctgccacggttccgcgcccgagcgcggcgacaacgcgatctataaaatgggagaaataatcgccgaggttaaggcgctgaacaaaaagctgaaaaaagacaagttcctcggcaagggaaccctggctgtttcgcagatatatttcagttcgccctcccgctgcgccgtcctcggccgaatctga

SEQ ID NO: 61960 - protein, 306 aa, Unknown
  Obtained from environmental sample
  misc_feature (1)..(306): Xaa is any amino acid
MGTNKSAPSRSVDKLMRHVPAQDNSTAYSNAGWDYPAGRAAETNNNKELNMLDFNAIKNAAKGYEADMTKFLRDLIRIPGESCGEKETAARIVEEMKKLGFDEAGIDKMGNAIGYMGNGKTLIAFDGHIDTVGIGNRDNWKFDPYEGFESETEIGGRGASDQLGGPVAAVYGAKIMKDLGLLNDKYRVMVSGTVQEEDCDGLCWEYIIKEEKIKPEFVVITEPTNGNIYRGQRGRMEIRVEVKGISCHGSAPERGDNAIYKMGEIIAEVKALNKKLKKDKFLGKGTLAVSQIYFSSPSRCAVLGRI

SEQ ID NO: 61961 - DNA, 1218 bp, Unknown
  Obtained from environmental sample
  misc_feature (1)..(1218): n is a, c, g, or t
atgagggagccgattaaatgggcatgtaacgaaatgcccaaaacggactgctccaaaagcctctcgctaatgacgcctgacgagacggagaaagccttcggttttcaccggagttttccgcagtattcgccgacacccctggttagtttgtccaatttggccgaacttttcggaatgaagggaatctatattaaagacgagtccttccgtttcgacctcaacgccttcaaagtgcttggcggctcttacgcaatagcgaagtatatcgccaaacgcctcggcaaagacatcgccgaaattgattacaatgtcctggtttcagccgagaccaagcgtaggttaggcgacattacgttttacaccgccacagacggaaaccacggaaggngcgtggcgtgngcggcgaacaaactcaggcaaaaggcagttgtgtacatgcccaggggttcctcgcacatccggttggaaagcattcttaacgagggagccgaggcggctgtcaccgatcttaattacgatgacgcggtgcggcttgcgaacaaaaaggcgtccgaagaccccaacggcgtggtggtacaggacactgcctgggccggctatgaggagatccccagttggatcatgcagggctacggttccatggccgttgagtcaatggagcagttgaaggaagccggtgtagaacggcctacccatatttttgttcaggccggcgtcggttctcttgccggcgcggtaatcggctattttaccgatctttttccggataatcccccggttatgactgtggtggaagcgtcagccgcaaacaacctgtacatttccagcatagcgggaaaacttgtaggccttaagggaaacctctctaccattatggcgggccttgcctgcggcgaggggaacacgatctcctgggagatattgaaaaattacgcccggttttttgtctccgcgcccgactgggtcgcttcgcgggggatgagagtgctggcagttcccgttaaaggcgacgaaaaagtaatttccggagagtcgggcgcggtaacgatggggttattgtttacccttctgcggaaagaagaatacaaagacttgcaggaggctttagggttaaattccgaatcggtggtgctgctgttcagtacggaaggcaacaccgatcctgagaaattccgcgacgtagtctgggacggggagtttcccagtggggacaaataa

SEQ ID NO: 61962 - protein, 405 aa, Unknown
  Obtained from environmental sample
  DOMAIN (38)...(374): Pyridoxal-phosphate dependent enzyme
  misc_feature (1)..(405): Xaa is any amino acid
MREPIKWACNEMPKTDCSKSLSLMTPDETEKAFGFHRSFPQYSPTPLVSLSNLAELFGMKGIYIKDESFRFDLNAFKVLGGSYAIAKYIAKRLGKDIAEIDYNVLVSAETKRRLGDITFYTATDGNHGRXVAXAANKLRQKAVVYMPRGSSHIRLESILNEGAEAAVTDLNYDDAVRLANKKASEDPNGVVVQDTAWAGYEEIPSWIMQGYGSMAVESMEQLKEAGVERPTHIFVQAGVGSLAGAVIGYFTDLFPDNPPVMTVVEASAANNLYISSIAGKLVGLKGNLSTIMAGLACGEGNTISWEILKNYARFFVSAPDWVASRGMRVLAVPVKGDEKVISGESGAVTMGLLFTLLRKEEYKDLQEALGLNSESVVLLFSTEGNTDPEKFRDVVWDGEFPSGDK

SEQ ID NO: 61963 - DNA, 1314 bp, Unknown
  Obtained from environmental sample
  misc_feature (1)..(1314): n is a, c, g, or t
atggacaccgtttcaacggctccgctcgctatttctctggctttgcaaggcggtatttctgttatacacaaaaatatgagcatcgaaaatcaagccgcagaagttcgcaaggttaaaagatgggaatctggcgttgttttgaacccaataaccctaaacgcagacgaacccgtttcaaaagcctttgaaatttccgccaagcaaaagttaagcggttttcctgttgtttccaagggcaaacaattagtcggcataataacaggcagggatttgcgcacagtcacagacagaagcatgaaagtaaaagatgttatgacaaaaaaactaatcacagcctctccaaaaatttcgctggcaaaggcaaaagaaattttaaatacaaatcgtatagaaaaattgttgctggtggacaataaaaataatttaaaaggtttaataaccttaacagatattttgaaaagagaaattaaccccgaagcctgcttggattcaaacgggcaactatgcgttggggctgccgttggcaccgcagcagatactttggagcgagccgcgggtctcgtggaagctggcgtggatatgctggtcgtggacaccgcgcacgggcaccatataaatgtgcgcaatatggtgaaaacacttaaaaaaacttatcccaatttaacgctcgttggcggaaatgtggcaacagccgaaggagttagggaacttgcaaaatgcggcgcagatgttgttaaagttggaattggacccggctctatttgcaccaccagagttgtggctggcgttggagttccgcaattcacggcaatttttgaatgtgccgaagaagcggtgaaacaaggtgttggcataattggcgatggaggaataaaatattcgggtgatattgttaaagccttggcagcaggtgcacacgccgttatgctcggcagcctttttgctggcacagaagaaagccccggagaaataattttggcagatggtcgcacattcaaaagctatcgcggaatgggttccattggagctatgaaagaaggttccaaagaccgctattttcaatccgagattggagacgaatcaaaattcgttcccgaaggcattgaaggcagagttccatacaaaggacctctcaaagaattggtttatcaattaacaggcggaattcgcagtggtcttggctatgtgggagctgcggatttggcagatctcagagcaaaagcacgttttgtgcaaataacaagcgcagggttaaaagaaaaccacccgcacgatataaccataacaaaagaagcacctaattatagggcgtga

SEQ ID NO: 61964 - protein, 437 aa, Unknown
  Obtained from environmental sample
  DOMAIN (43)...(156): CBS domain pair
  misc_feature (1)..(437): Xaa is any amino acid
MDTVSTAPLAISLALQGGISVIHKNMSIENQAAEVRKVKRWESGVVLNPITLNADEPVSKAFEISAKQKLSGFPVVSKGKQLVGIITGRDLRTVTDRSMKVKDVMTKKLITASPKISLAKAKEILNTNRIEKLLLVDNKNNLKGLITLTDILKREINPEACLDSNGQLCVGAAVGTAADTLERAAGLVEAGVDMLVVDTAHGHHINVRNMVKTLKKTYPNLTLVGGNVATAEGVRELAKCGADVVKVGIGPGSICTTRVVAGVGVPQFTAIFECAEEAVKQGVGIIGDGGIKYSGDIVKALAAGAHAVMLGSLFAGTEESPGEIILADGRTFKSYRGMGSIGAMKEGSKDRYFQSEIGDESKFVPEGIEGRVPYKGPLKELVYQLTGGIRSGLGYVGAADLADLRAKARFVQITSAGLKENHPHDITITKEAPNYRA

SEQ ID NO: 61965 - DNA, 537 bp, Unknown
  Obtained from environmental sample
  misc_feature (1)..(537): n is a, c, g, or t
ttgcgcacatttatatggtgcccgtgcgcggtgtccacgaccagcatatccacgccagcttccacgagacccgcggctcgctccaaagtatctgctgcggtgccaacggcagccccaacgcatagttgcccgtttgaatccaagcaggcttcggggttaatttctcttttcaaaatatctgttaaggttattaaaccttttaaattatttttattgtccaccagcaacaatttttctatacgatttgtatttaaaatttcttttgcctttgccagcgaaatttttggagaggctgtgattagtttttttgtcataacatcttttactttcatgcttctgtctgtgactgtgcgcaaatccctgcctgttattatgccgactaattgtttgcccttggaaacaacaggaaaaccgcttaacttttgcttggcggaaatttcaaaggcttttgaaacgggttcgtctgcgtttagggttattgggttcaaaacaacgccagattcccatcttttaaccttgcgaacttctgcggcttga

SEQ ID NO: 61966 - protein, 178 aa, Unknown
  Obtained from environmental sample
  SIGNAL (1)...(22)
  misc_feature (1)..(178): Xaa is any amino acid
MRTFIWCPCAVSTTSISTPASTRPAARSKVSAAVPTAAPTHSCPFESKQASGLISLFKISVKVIKPFKLFLLSTSNNFSIRFVFKISFAFASEIFGEAVISFFVITSFTFMLLSVTVRKSLPVIMPTNCLPLETTGKPLNFCLAEISKAFETGSSAFRVIGFKTTPDSHLLTLRTSAA

SEQ ID NO: 61967 - DNA, 348 bp, Unknown
  Obtained from environmental sample
  misc_feature (1)..(348): n is a, c, g, or t
ttgaatgtgcgaccatctgccaaaattatttctccggggctttcttctgtgccagcaaaaaggctgccgagcataacggcgtgtgcacctgctgccaaggctttaacaatatcacccgaatattttattcctccatcgccaattatgccaacaccttgtttcaccgcttcttcggcacattcaaaaattgccgtgaattgcggaactccaacgccagccacaactctggtggtgcaaatagagccgggtccaattccaactttaacaacatctgcgccgcattttgcaagttccctaactccttcggctgttgccacatttccgccaacgagcgttaaattgggataa

SEQ ID NO: 61968 - protein, 115 aa, Unknown
  Obtained from environmental sample
  misc_feature (1)..(115): Xaa is any amino acid
MNVRPSAKIISPGLSSVPAKRLPSITACAPAAKALTISPEYFIPPSPIMPTPCFTASSAHSKIAVNCGTPTPATTLVVQIEPGPIPTLTTSAPHFASSLTPSAVATFPPTSVKLG

SEQ ID NO: 61969 - DNA, 813 bp, Unknown
  Obtained from environmental sample
  misc_feature (1)..(813): n is a, c, g, or t
atgggtgaagcgttaaatgcagaaacaattttagcatctattgtagagcttcgcggaagtattgtagaacttcgcgagagccttgccgaacagggaaaacgctcggataaggcgacagcagagcttcgcgatagaatggacgagcaatggaaacgctctgagcaagctacagcggagcttcgcgatagaatggacgagcaaggtaagcgtatggatgagcagggcaagcgcatagacaagttggttgaagaatttgctgaggtcagagcagaactgaagggaaataatcgtaaattggatgaaaataatcatagactagatgaaaataatcgtaaattagatgaaaataatcgtaaattagatgaaaataatcatagactagggaagctaactaacaaggttggtgaaatagtagaaaaaatagtacttccaggcatagttgataagttcaatgaaaaaggctttaagtttgattcagtgtctgctaatgttgagtttttgaatgaaaagaaagatggaaatattgcggaggttgatgctcttcttgagaacggaaaatttgtaatagcagttgaaactaaaaccgagttgactatcaaagatgtgaacgcgcatataaaacgcttgcaagcgttacgcaagatttctaggtttaagggcaaaaagatatatggagctttttccacggcaataacagaaaagaagccaattaattatgctttggaaaaaggtttttacgttttgcaacagcccgatgttatggctattaggatattagattttcccaaaggtcgctctgcaaaggcttggtag

SEQ ID NO: 61970 - protein, 270 aa, Unknown
  Obtained from environmental sample
  misc_feature (1)..(270): Xaa is any amino acid
MGEALNAETILASIVELRGSIVELRESLAEQGKRSDKATAELRDRMDEQWKRSEQATAELRDRMDEQGKRMDEQGKRIDKLVEEFAEVRAELKGNNRKLDENNHRLDENNRKLDENNRKLDENNHRLGKLTNKVGEIVEKIVLPGIVDKFNEKGFKFDSVSANVEFLNEKKDGNIAEVDALLENGKFVIAVETKTELTIKDVNAHIKRLQALRKISRFKGKKIYGAFSTAITEKKPINYALEKGFYVLQQPDVMAIRILDFPKGRSAKAW

SEQ ID NO: 61971 - DNA, 573 bp, Unknown
  Obtained from environmental sample
  misc_feature (1)..(573): n is a, c, g, or t
atgcggcatcacatccgcatgccggagggcaacatggatgagaaaataaggagtactaccgtaatagccgtaaggaaaggcggcaaggtcgcgatggcgggtgacggacaggtgacaatgggaaataccgtaatgaaaaacaacgcgcgtaaagtacgcagacttatggacgggaaagtgctttgtggttttgccggcgctaccgctgacgcgtttaccctttttgaccgttttgaagcaaagttaaaagaatattcaggtgatcttgcaaggtcagcggttgaattggcaaaagactggcgcatggaccgcactttaaggcggcttgaagcgcttttgttggtggcggatatatctaaaatactgttaatatcaggcacgggagacgtgattgaacctgcggaggacgcgcttgcgattggttctggcgggaattacgcttacgcggcggcgttggcgtttatggaaggtagccacttttcggcggcggaaatagcggaaaaaagtttaaaaatagcgggtaacatttgtatttatacgaatatgcaaataacgttggaggaattgggatga

SEQ ID NO: 61972 - protein, 190 aa, Unknown
  Obtained from environmental sample
  DOMAIN (16)...(189): Proteasome A-type and B-type
  misc_feature (1)..(190): Xaa is any amino acid
MRHHIRMPEGNMDEKIRSTTVIAVRKGGKVAMAGDGQVTMGNTVMKNNARKVRRLMDGKVLCGFAGATADAFTLFDRFEAKLKEYSGDLARSAVELAKDWRMDRTLRRLEALLLVADISKILLISGTGDVIEPAEDALAIGSGGNYAYAAALAFMEGSHFSAAEIAEKSLKIAGNICIYTNMQITLEELG

SEQ ID NO: 61973 - DNA, 372 bp, Unknown
  Obtained from environmental sample
  misc_feature (1)..(372): n is a, c, g, or t
gtgcctgatattaacagtattttagatatatccgccaccaacaaaagcgcttcaagccgccttaaagtgcggtccatgcgccagtcttttgccaattcaaccgctgaccttgcaagatcacctgaatattcttttaactttgcttcaaaacggtcaaaaagggtaaacgcgtcagcggtagcgccggcaaaaccacaaagcactttcccgtccataagtctgcgtactttacgcgcgttgtttttcattacggtatttcccattgtcacctgtccgtcacccgccatcgcgaccttgccgcctttccttacggctattacggtagtactccttattttctcatccatgttgccctccggcatgcggatgtga

SEQ ID NO: 61974 - protein, 123 aa, Unknown
  Obtained from environmental sample
  misc_feature (1)..(123): Xaa is any amino acid
MPDINSILDISATNKSASSRLKVRSMRQSFANSTADLARSPEYSFNFASKRSKRVNASAVAPAKPQSTFPSISLRTLRALFFITVFPIVTCPSPAIATLPPFLTAITVVLLIFSSMLPSGMRM

SEQ ID NO: 61975 - DNA, 933 bp, Unknown
  Obtained from environmental sample
  misc_feature (1)..(933): n is a, c, g, or t
gtgagtgagtttttgggaacagaagtaacacaaaattatctctcttacttgcagagcgtacgcggggtctcccctcggacgcttgccgcttaccgtgatgatctgtccctgtttgttaattattgtaacaatcatgatattgacccggtacaggcaagtccttatcaggtgcagagttttatcgctgaactcagcgcggaacgggcggctccgtccagcgtgaaccgccgcctctcttccatcaggggcttttaccgctggctgcttcgctttggcaaacgcgccgacaatccctgcgatagtttacgcaatgttaaagccccccagggcctgccctccgtgttatgggaagatgaaatggccgcttttgccgaattgccggagaaaaacaagatactctggccggaacgggacaaggcgttaattttgaccatgtactcggcgggcctgcgtatttcagaactggtatcgttaagcatgaacatgataaccggcgatagggaaggggcgcgggtaaccggcaagggcggcaaggaacggatggtgttcttttccggcgaggcgcgggccgctttgggggattatcttccccggcgggaggcaaaaatccgtgacgcggggatacatgccgctgatatgaacggcgctttgttcatcagcgaaaaagggcggcccctgtccgtgccgggagtgcgctggattatcggtcaatacgcgcggcggtcggatttgggaaaaaacattcacccgcacagcctgcgccacagtttcgcgacgcatctggtaaacgcgggctgcgatgtccgcatcgtgcaggaaatgctgggacattcaagcatttccacaactcagcgttatacgcatgttaattttgaacaaatgaagaaagtatatgcggcatcacatccgcatgccggagggcaacatggatga

SEQ ID NO: 61976 - protein, 310 aa, Unknown
  Obtained from environmental sample
  DOMAIN (9)...(92): Phage integrase, N-terminal SAM-like domain
  misc_feature (1)..(310): Xaa is any amino acid
MSEFLGTEVTQNYLSYLQSVRGVSPRTLAAYRDDLSLFVNYCNNHDIDPVQASPYQVQSFIAELSAERAAPSSVNRRLSSIRGFYRWLLRFGKRADNPCDSLRNVKAPQGLPSVLWEDEMAAFAELPEKNKILWPERDKALILTMYSAGLRISELVSLSMNMITGDREGARVTGKGGKERMVFFSGEARAALGDYLPRREAKIRDAGIHAADMNGALFISEKGRPLSVPGVRWIIGQYARRSDLGKNIHPHSLRHSFATHLVNAGCDVRIVQEMLGHSSISTTQRYTHVNFEQMKKVYAASHPHAGGQHG

SEQ ID NO: 61977 - DNA, 645 bp, Unknown
  Obtained from environmental sample
  misc_feature (1)..(645): n is a, c, g, or t
gtgctgctggaccgctattatgttacgcgatcaaacaagcagcttgtcccaaccctgctggggaagaaaatatgcgaaatgctggttgattattttcccgattatgtcgacgttgattttacggcctctatggaaacgaagctggacaaggtagaggaaagccagttgaaatggcccgatatgctcaaggaattctgggggcctttcaaagccaaagttgacgaggtaggcaaatccctggagtccttcaaaggttccctggacgagccgaccgactatgtatgcgaaaaatgcggcaagcccatcgtgaaaaaactgggcagaaacgggtttttcctcgcctgtaccggctttcccgaatgccgcaacacaagatcggttccgcttgccgtctgccccaaatgcggcggagacgttgtcgcgcggaaaacaaagggcaggggaaaggaattttacggctgcgccaattaccccgaatgtgattttgtcagccactacaagccgatcagccagaactgccccaagtgcggcaagttcatggtggaaaaatacgacaagaagaacggcagtcataaggcgtgtattaacccgaattgcgactacctgcacagcgttgatgatgagaacgaggaaagcgagaagtga

SEQ ID NO: 61978 - protein, 214 aa, Unknown
  Obtained from environmental sample
  DOMAIN (170)...(208): Topoisomerase DNA binding C4 zinc finger
  misc_feature (1)..(214): Xaa is any amino acid
MLLDRYYVTRSNKQLVPTLLGKKICEMLVDYFPDYVDVDFTASMETKLDKVEESQLKWPDMLKEFWGPFKAKVDEVGKSLESFKGSLDEPTDYVCEKCGKPIVKKLGRNGFFLACTGFPECRNTRSVPLAVCPKCGGDVVARKTKGRGKEFYGCANYPECDFVSHYKPISQNCPKCGKFMVEKYDKKNGSHKACINPNCDYLHSVDDENEESEK

SEQ ID NO: 61979 - DNA, 1005 bp, Unknown
  Obtained from environmental sample
  misc_feature (1)..(1005): n is a, c, g, or t
gtgctggacaggctggtcgggtacagtctttcgcccctattatggaaaaaagttaagaacggcctttcagcgggcagggtgcagtctgtagccctgcgccttatatgcgaacgggaaaaggaagtggaatcctttattcccgaggaatactggagcctggaagcggattttaagatcggaaggtcaacctttaccgcccagcttgtaaagtggaacggcgtcaaaccagaactgccgaacgagacgtcggcaatggcgataatcaacgacttaagcggcgccgattgcgttgtgagcgatatcaaggaagtcgaaaaaacaataaaaccaaaacctccgttcatcacctcggaactgcaaaagtcagcggcaaaccggcttggttatacgtcacggaagaccatgcaggtggcccagcagctttacgaaggggtgaatatgggctcgacccgcatcggccttatcagttacatgaggacggactcggtgcgcgtgtcagagacggcccttacggaactgcgcgaatggcttggcgagcattatcccaatgagcttccggaaaaaccgcttgagtatagctccggaaaaaaagcccaggacgcgcacgaggcaatacgcccgacctatgtgagctatacgccggattcggtcgccgaatatctgaacagggatcagctcaggctgtacacgataatctgggaacgctttgtttcaagccagatgacaaatgccaaaacccgcacggtcagcgttgaaatcaaggctgtcaccggcaagaagaagaagggctgttcagggtttcggggacaaaacttgttgaaaaaggtttttacaaagttatcaaactgctctcgtcaaaagaggaaaaggggaatccctatcccccgcttaaaacgggggacaaggtcacgattgaaaaattccatcccgagcagcattttacgcagggcccgccccgctataccgaggcttccattatcgatattttacgcgagaaggaaatag

SEQ ID NO: 61980 - protein, 334 aa, Unknown
  Obtained from environmental sample
  DOMAIN (2)...(334): DNA topoisomerase
  misc_feature (1)..(334): Xaa is any amino acid
MLDRLVGYSLSPLLWKKVKNGLSAGRVQSVALRLICEREKEVESFIPEEYWSLEADFKIGRSTFTAQLVKWNGVKPELPNETSAMAIINDLSGADCVVSDIKEVEKTIKPKPPFITSELQKSAANRLGYTSRKTMQVAQQLYEGVNMGSTRIGLISYMRTDSVRVSETALTELREWLGEHYPNELPEKPLEYSSGKKAQDAHEAIRPTYVSYTPDSVAEYLNRDQLRLYTIIWERFVSSQMTNAKTRTVSVEIKAVTGKKKKGCSGFRGQNLLKKVFTKLSNCSRQKRKRGIPIPRLKRGTRSRLKNSIPSSILRRARPAIPRLPLSIFYARRK

SEQ ID NO: 61981 - DNA, 1419 bp, Unknown
  Obtained from environmental sample
  misc_feature (1)..(1419): n is a, c, g, or t
atgaaaactcaagaaacggcaagcgacattgaacgcaatgcgcttagggaagaatcggtattgctgcgcatccaccagctgcaaaatgggctggtgcagcttaccgacgcgactaccgcctaccggctggtcacgaagcatggcgacgacatccgctacattgccccctggaagaaatgggtcgtatggaacggcgcctattgggaaaccgacagcggcggggcgctgatccacacaagggggctggaaatcgtgcggaatatctacggcgaaatcgccaaaaccgccgactaccgggaaaggatcgaaatcgagaagtacgccatcaaaagcgagtccacaaggcagagggaaaactttgtcagggcagcgcggtacattcccgaactcaacgccgcagtcgacgaccttgaccgcgatccctggcttctgaacgtggagaacggcactatcgacttgcggacgggggagctgctgccccacaggcaggaggataaaatcacgaaggttgcccatgtccagtatgacaggaacgccgactgcccgaaatggaagcagtttgtccgggagatcatggattacaaaggcgatttggttacattcctccaaaccgccgcagggtggtcggtcagcggggacatcagcgagcaggcaatgttcatcctctacgggacaggggcgaacgggaaaagcactttcctcagcgtgatcatgcgcattttgggggattacgccattaccacctaccctgaaacctttatgaagcggagcggcgattcgctgaccaacgacatcgcccgattgcgggggacgaggtttgttgccacggcggagacggagcaggggaagcggctttcggagcacctgatcaagcaggctacgggcaacgaccagataaccgcgaggttcctgtacggggagcactttaacttcgtgccgacattcaagatattcatggcgagcaaccacaagcctgtcatcaaggggactgaccacggcatctggaggcggatcaagctgataccgttcactacaacgatagccgaagagaagatggacaggcaccttgagcaaaagctacttggggaaaaatccggcatactaaactggctgatcgaaggggcgctgcgctggcaaaaggaaggcttgaacaccccttcgatcgtgctgaacgccacggacgagtaccggggcgagatggacgctatagggaacttcatcaaggaacggtgcgtccaaaagccgggggaggcgatcaaggcgcgagagctgttccgggcgtaccaagaatggtgcgaggagaacaacgagatggcaaccagcgagcggatgttcgggctgcgtatgaaggagctgggcatggcgcagaagcgggcagccgatggccggtactggctggatattgcgcttcaggggtag

SEQ ID NO: 61982 - protein, 472 aa, Unknown
  Obtained from environmental sample
  DOMAIN (144)...(455): Poxvirus D5 protein-like
  misc_feature (1)..(472): Xaa is any amino acid
MKTQETASDIERNALREESVLLRIHQLQNGLVQLTDATTAYRLVTKHGDDIRYIAPWKKWVVWNGAYWETDSGGALIHTRGLEIVRNIYGEIAKTADYRERIEIEKYAIKSESTRQRENFVRAARYIPELNAAVDDLDRDPWLLNVENGTIDLRTGELLPHRQEDKITKVAHVQYDRNADCPKWKQFVREIMDYKGDLVTFLQTAAGWSVSGDISEQAMFILYGTGANGKSTFLSVIMRILGDYAITTYPETFMKRSGDSLTNDIARLRGTRFVATAETEQGKRLSEHLIKQATGNDQITARFLYGEHFNFVPTFKIFMASNHKPVIKGTDHGIWRRIKLIPFTTTIAEEKMDRHLEQKLLGEKSGILNWLIEGALRWQKEGLNTPSIVLNATDEYRGEMDAIGNFIKERCVQKPGEAIKARELFRAYQEWCEENNEMATSERMFGLRMKELGMAQKRAADGRYWLDIALQG

SEQ ID NO: 61983 - DNA, 582 bp, Unknown
  Obtained from environmental sample
  misc_feature (1)..(582): n is a, c, g, or t
atggaacggtttaaccccttaaatgactaccttttcctgaaagtcatgggcgaagaaggcgacgaagaacagtgccttgcctttctgaacgccgttttaggctccaaaaacaaacagcccgtcaaattgattaaaatccttgaaaacaaggcttttgtcgcggaggtcatcggcgaaaaaaccagcatccttgatgtcagggtagaaaccgactcaggcgagaaagttaatatcgaggttcagcttaaagatttatacaacatggaaaaacggaccctgatgcactgggggcgggaatttaccgcaggcatatcctccgggggcaactataaggatttgcccaaagtaataaccataaacatcgtcaattttgacaacataaaactggacgattttcacacctgctttcatctatgggaagacgatcaccatgattacctgttgacggacgtgctggaaatacattttatcaatatggtaaaattcagaaaattgaaaaccggggatgttgcaaacaatcttcttgagcggtggcttacatttctggatgtaacacgccggaaaatacctcggccaatctga

SEQ ID NO: 61984 - protein, 193 aa, Unknown
  Obtained from environmental sample
  misc_feature (1)..(193): Xaa is any amino acid
MERFNPLNDYLFLKVMGEEGDEEQCLAFLNAVLGSKNKQPVKLIKILENKAFVAEVIGEKTSILDVRVETDSGEKVNIEVQLKDLYNMEKRTLMHWGREFTAGISSGGNYKDLPKVITINIVNFDNIKLDDFHTCFHLWEDDHHDYLLTDVLEIHFINMVKFRKLKTGDVANNLLERWLTFLDVTRRKIPRPI

SEQ ID NO: 61985 - DNA, 1503 bp, Unknown
  Obtained from environmental sample
  misc_feature (1)..(1503): n is a, c, g, or t
atggaaaacataagggactggtgcgtcagccgccaactgtggtgggggcatagaattccggcgtggacttgcgcagactgcggcaaaatgacagtttcacgtaacgacatcgacgcttgtccgcattgcaagagtaaaaaaatcgaacaagaccccgatgtgcttgacacttggttttcaagctggctttggccgttcagcacattaggctgggaaaacgccgattgtaacaccgacgacttcaaaaaatattatccgactacggcgcttataaccgcctatgacataatctttttctgggtatcaagaatgatcatggcgggacttgagttcacgggcaaagcgccgttccgtgacatttacattcacgggcttgtgcgcgacaaacagggacgcaaaatgagcaagtctctgggcaacgggcttgatcctttagaacttgtggacgagttcggagcggacgcaatgaaatttacgctcgcctttatgtgcgcccaaggacaggatattcttgtagacaaagaatcttttaagatggggacaaaattcgctaacaaggtgtggaacgcaagcagatatattttgatgaaccttgacgggcgcaatttgcaggaaaacccggccttaactccggctgacgaatggatatactcacggttaaacgacgccgcaaaatcaatgatggaagcgtttctctcttaccgttataacgatgcggcgcagacagcttacgaatttttttggaacgattactgcgactggtatgttgaagcgacaaaactttccatgaaagacggcgacagcgccgagaaagaccgcactactacggtgttattagacatattatctcaatctctgcgcctgctccaccctctcctgccctttgtgacggaggaaatctaccaaaaattacccgaaaatttcagacgcgcaagctcaaaagcgcagaataaaacagggcaggaaacactgctcataaacgctcaataccctgcttacgatgaaaagcgcaatgacccgttgcaagagaaaaattttgccgctcttcaatcgctggttggaatggcgcgtactctgcgaagcgaatgcggcataacgcctgagaaaaaactccgcctgctgttaagatcaagcgcggaattggaaaaaccgttcagagaaaacgaagggctgataaaacttttggcaggcgcaggcgaattacagattgaagccgcaagcggcgcgtcaagcgaaagacctgcgggttctatcggtcttgccggaacaggttttgaaatttttgtgtttgtagcggaagcggtagataccgccgcgcttaagaaaaaattgtccggcgatcttgaaaaagacaggaaatacattgaaagcctaaaagcgaaactcgccaacgagcagtttgttaaaaacgctccgagcgagcttgttgaggaacaaaaatctaagctggaagaatccgtcaagagaactgaaaaacttgccggttatttgagggatttatag

SEQ ID NO: 61986 - protein, 500 aa, Unknown
  Obtained from environmental sample
  DOMAIN (1)...(173): tRNA synthetases class I (I, L, M and V)
  misc_feature (1)..(500): Xaa is any amino acid
MENIRDWCVSRQLWWGHRIPAWTCADCGKMTVSRNDIDACPHCKSKKIEQDPDVLDTWFSSWLWPFSTLGWENADCNTDDFKKYYPTTALITAYDIIFFWVSRMIMAGLEFTGKAPFRDIYIHGLVRDKQGRKMSKSLGNGLDPLELVDEFGADAMKFTLAFMCAQGQDILVDKESFKMGTKFANKVWNASRYILMNLDGRNLQENPALTPADEWIYSRLNDAAKSMMEAFLSYRYNDAAQTAYEFFWNDYCDWYVEATKLSMKDGDSAEKDRTTTVLLDILSQSLRLLHPLLPFVTEEIYQKLPENFRRASSKAQNKTGQETLLINAQYPAYDEKRNDPLQEKNFAALQSLVGMARTLRSECGITPEKKLRLLLRSSAELEKPFRENEGLIKLLAGAGELQIEAASGASSERPAGSIGLAGTGFEIFVFVAEAVDTAALKKKLSGDLEKDRKYIESLKAKLANEQFVKNAPSELVEEQKSKLEESVKRTEKLAGYLRDL

SEQ ID NO: 61987 - DNA, 555 bp, Unknown
  Obtained from environmental sample
  misc_feature (1)..(555): n is a, c, g, or t
atgacaacagaacaaatgctgcagataagcggcatacaacttgttccgtatatgcaagtcgccacccatctcatcggcaaatcgcgcgagggcggcggaaatatgttccgtcatcaaattgacactatggggattcttatcgactacggctatgtcaattcggtattgcttaaagcctcgcttgtccacgacgttcttgaagatatccccgattttaaccacaatactttactttccatcgacaccgacagccacgctgtttataaccttgttcttgaagttacgcgaaggcacgatgaaacaaaacccgattttcttacccgtatactcgaaacaggttcttttgacgcgaaaacgttaaaagtagcggatcgtatatccaatatgatttctctcggttttgtaaacaatctcgcctttgtagaacgttatataaacgaaactgaaaaatacctttttccccttgcggcgcaggtaaatcattatatgctgatagaacttacagaccttgtaaaaataaaacgcaaatatctggaagacttgaaacaacaatga

SEQ ID NO: 61988 - protein, 184 aa, Unknown
  Obtained from environmental sample
  misc_feature (1)..(184): Xaa is any amino acid
MTTEQMLQISGIQLVPYMQVATHLIGKSREGGGNMFRHQIDTMGILIDYGYVNSVLLKASLVHDVLEDIPDFNHNTLLSIDTDSHAVYNLVLEVTRRHDETKPDFLTRILETGSFDAKTLKVADRISNMISLGFVNNLAFVERYINETEKYLFPLAAQVNHYMLIELTDLVKIKRKYLEDLKQQ

SEQ ID NO: 61989 - DNA, 489 bp, Unknown
  Obtained from environmental sample
  misc_feature (1)..(489): n is a, c, g, or t
ttgtgcctgaaagaagacgtttttcgtctttttacaacgcgctgcatttctaatattgatgccatacttggtttatcgacaaaaaaagcgtttaggattatatatgatataatgaaaggaacaaaacctgtgatactggctataatagccgcgcttgttctaaaactgttctttttcgattttatcatcgctcagggacattcgatggaacctgcgatccaagacgggtctgttttggttgtaagccgtgttgcctacgggcttcaactgccttcaaacaggtatttgtttcgctgggcgcagccgaaaattggagaagttgtggttttttatacgccttccggggaaatggcggtaaaacgctgtacaatggcggaagaaaacggcttgtttttcgccgaaggggataacagcctggcgtcctatgattcgcgcgcatacggacctattcttgcggacaaaattattgggaaggtattgggatattaa

SEQ ID NO: 61990 - protein, 162 aa, Unknown
  Obtained from environmental sample
  DOMAIN (63)...(155): Peptidase S24-like
  misc_feature (1)..(162): Xaa is any amino acid
MCLKEDVFRLFTTRCISNIDAILGLSTKKAFRIIYDIMKGTKPVILAIIAALVLKLFFFDFIIAQGHSMEPAIQDGSVLVVSRVAYGLQLPSNRYLFRWAQPKIGEVVVFYTPSGEMAVKRCTMAEENGLFFAEGDNSLASYDSRAYGPILADKIIGKVLGY

SEQ ID NO: 61991 - DNA, 1050 bp, Unknown
  Obtained from environmental sample
  misc_feature (1)..(1050): n is a, c, g, or t
atggccgagtcatacctggtttctcggaaacgccaaacttccatgcggcgtagatccatcattttttccttcattttgtttctttttatatttattcccggaagcgtaacatttaccatcttaatggataaaattcagtatgataacgccagacacgaattaatgcaaaccgttgaaatcgaacggcttaagctggaagcatccataaatagcgaaatagccattgctctaaaaatggcagattcattattgatacagtggcatttccttaaccgcgaagacgaagatatgaaacaaattgcattaggggagatagcaggataccgcagggcatttacagggaaaaatgtttattgggtaagcgatattgataaaaaatattattttaacgatgaatatatctacacaatagattcgtcagatgaaagttcatggtggtataactcaattatggcaaatcctgttccttactctttgacggtaaatttcgatgttggaataaaaaaaaccatgttatggattgatgtacccgttcttgataatgatcatgaacctattggcatagtgggaacaggcataaacctctctgattttatcaatgccgtaaatcaggacaattcggggacagaagatgaattatatttttttaatgcagccggagaaataatcacagcaagggatattgaccttgttgaaaaaaaagcaaacataactgtagtgctaggtcaaaccggtgatgaaattcttgccagaacgaaagaattaaaaatcggcgatatcgaatatttcaggataagagccaggaagcaaataattgctgttacttcaatcccggttagctcagttccgagtttaaattggtatataatcgctatacgtcccattactgctataggcttcctgaaaacgggcatgactgccctttttggcgtaatgatgaccgttattttttttattttgatattcttgaatatttttatcgcggaaatgctggaaccgcttaatcaaatggcaagaaccataaatcacacgtttaccgactgggattag

SEQ ID NO: 61992 - protein, 349 aa, Unknown
  Obtained from environmental sample
  misc_feature (1)..(349): Xaa is any amino acid
MAESYLVSRKRQTSMRRRSIIFSFILFLFIFIPGSVTFTILMDKIQYDNARHELMQTVEIERLKLEASINSEIAIALKMADSLLIQWHFLNREDEDMKQIALGEIAGYRRAFTGKNVYWVSDIDKKYYFNDEYIYTIDSSDESSWWYNSIMANPVPYSLTVNFDVGIKKTMLWIDVPVLDNDHEPIGIVGTGINLSDFINAVNQDNSGTEDELYFFNAAGEIITARDIDLVEKKANITVVLGQTGDEILARTKELKIGDIEYFRIRARKQIIAVTSIPVSSVPSLNWYIIAIRPITAIGFLKTGMTALFGVMMTVIFFILIFLNIFIAEMLEPLNQMARTINHTFTDWD

SEQ ID NO: 61993 - DNA, 489 bp, Unknown
  Obtained from environmental sample
  misc_feature (1)..(489): n is a, c, g, or t
ttgactgtaattgatcagcttaccaatatttacaataggcggcatcttgacggcagcttaaaaaaaataattaaattacattcccgtaccggcggcagtttaagcgtgctgatgatagacattgatcattttaaaaaatacaacgacacttacagtcatgacgccggggatgactgcctgagattgacagcatccgccctttctcaatgtgtaaaaagggaagaagattttatcgcaaggtacggcggcgaggaatttgtcgtcgttttgcccaataccgatgaaaatggcgctaagttggttgcggaaagaatgttggaaaaagtacgtgaatgtaatataccccacaaagcaagcgatatagccggttatgttactatctccattggcggtacaaccgatgtcgttaatcatttacagcatggaagcgattacatcaaagccgccgatgaagcgttatatgaatccaaaaagaacggcccgcaatag

SEQ ID NO: 61994 - protein, 162 aa, Unknown
  Obtained from environmental sample
  DOMAIN (1)...(162): GGDEF domain
  misc_feature (1)..(162): Xaa is any amino acid
MTVIDQLTNIYNRRHLDGSLKKIIKLHSRTGGSLSVLMIDIDHFKKYNDTYSHDAGDDCLRLTASALSQCVKREEDFIARYGGEEFVVVLPNTDENGAKLVAERMLEKVRECNIPHKASDIAGYVTISIGGTTDVVNHLQHGSDYIKAADEALYESKKNGPQ

SEQ ID NO: 61995 - DNA, 753 bp, Unknown
  Obtained from environmental sample
  misc_feature (1)..(753): n is a, c, g, or t
gtgagccatacccacgccgaccatgtcaccggcattccgggccttttgatgctctcctcccaggtggacagggacgatcccctgtacataataggcccgcccagaatcgccgaatacattgagagcagccgccgcgtgctggatatgtacatcaattatgaaattatagtaaaagaagtgacggagccgggcgtagtgtttcagggcgacggcttccatatacgcagtttccccctgcggcacacaaaaccctgctttggctacaccctggaagaatacctccgtcccggcgaattccacccggaaaaggccgaagcgctgggggtgccgcgcggcccgttatggtcaaggctgcaaggcggtgaaacggtacaatccgttgacggccgggacgtgcgcccgcaggaggttctcggcctgccgcgcttgggcaggaagttttcctttgttacggacagcctcgccttcccggaaatagcgcctgaggtcgcgggctccgacctctttgtctgcgaaggcatgtttgaacaggagcttgccgaagacgcccacggcaagaagcacatgaccgcggttgaagccgcccaaattgcggcaatgtcaaccaacatcaagaaactggcgctcatccacttcagcccccgttataccgagttcaacctgaaacagcttctcaaggaagcccaggggatattccccgacacggcgcttgcaagggacaaggccgtgttcccgattgagtatgtggactga

SEQ ID NO: 61996 - protein, 250 aa, Unknown
  Obtained from environmental sample
  misc_feature (1)..(250): Xaa is any amino acid
MSHTHADHVTGIPGLLMLSSQVDRDDPLYIIGPPRIAEYIESSRRVLDMYINYEIIVKEVTEPGVVFQGDGFHIRSFPLRHTKPCFGYTLEEYLRPGEFHPEKAEALGVPRGPLWSRLQGGETVQSVDGRDVRPQEVLGLPRLGRKFSFVTDSLAFPEIAPEVAGSDLFVCEGMFEQELAEDAHGKKHMTAVEAAQIAAMSTNIKKLALIHFSPRYTEFNLKQLLKEAQGIFPDTALARDKAVFPIEYVD

SEQ ID NO: 61997 - DNA, 1164 bp, Unknown
  Obtained from environmental sample
  misc_feature (1)..(1164): n is a, c, g, or t
atgaaatcagtctgcatatacaacggaacagttcttacaggcctagccgttatggaacagtgcgcggcattaattgaagacggtcttatttccgatgttttttcgcagaaacggtttgaacaacgcaaatttaacgattccatgcgtctgattgacgccggcggctcttttatcgcaccgggattcatcgatacccacatccacggcattagtggttatggaactgaagacgcaaaaacagaatcaatccttgaaatgtcgcgccttctcgcaaattgnggcgtaactgcttttaatccgacaatctacgcggatacatcagaccgtatgcttgaaacaataaaaaaaataacagccgcgatgggcaaggaagaaggcgcccgcataatggggcttcatcttgaggggccttttatttctcctgaaaggcttggcgtccaaaagccggaaaccgtgcaagccgtcaacatcgatcttatggaacaattttgggatgcgtcggacggtcatattgtcaacatgaccgtggcccccgaattaaagcacatgagggagatggcgctgtactgcggtaaaaaaggaattattcttcaggcggggcatacaaacgcggattatgaaaacatgacggagggaatgcaggcgggaatattacattcaacccatctgttcaacgcgatgagaaggcttgatcaccgtaacccaaacgcggtcggcgcaattttgattcaccctgaaatgtcatgtgaaataatagccgacggtttccatgttcaccccgacttgttcaaactgcttttgcggaataaaccaattgataaaatcgtgcttattactgacggccttaaaccgacggaacagaaggaagggcctttctacgccaacaacgaggaagtatattttaaaggcggcgttttctacagaaaagccgataatgtgatcgccggctcaagtttaacaatgatcaggggaatacggaatcttgtcacggaagggttcagcatgaatgacgcggtaaagaccgccgcttttaatccggctcaaattatgcggtataacaatcagggggcgataataccgggacgtttggcggacataaccgtatttgaccgtaattttaatatcagccttgtaatgattggcggaaaaattgttaaggagtaa

SEQ ID NO: 61998 - protein, 387 aa, Unknown
  Obtained from environmental sample
  DOMAIN (57)...(370): Amidohydrolase family
  misc_feature (1)..(387): Xaa is any amino acid
MKSVCIYNGTVLTGLAVMEQCAALIEDGLISDVFSQKRFEQRKFNDSMRLIDAGGSFIAPGFIDTHIHGISGYGTEDAKTESILEMSRLLANXGVTAFNPTIYADTSDRMLETIKKITAAMGKEEGARIMGLHLEGPFISPERLGVQKPETVQAVNIDLMEQFWDASDGHIVNMTVAPELKHMREMALYCGKKGIILQAGHTNADYENMTEGMQAGILHSTHLFNAMRRLDHRNPNAVGAILIHPEMSCEIIADGFHVHPDLFKLLLRNKPIDKIVLITDGLKPTEQKEGPFYANNEEVYFKGGVFYRKADNVIAGSSLTMIRGIRNLVTEGFSMNDAVKTAAFNPAQIMRYNNQGAIIPGRLADITVFDRNFNISLVMIGGKIVKE

SEQ ID NO: 61999 - DNA, 792 bp, Unknown
  Obtained from environmental sample
  misc_feature (1)..(792): n is a, c, g, or t
atgcgtttagttattcaaaaagattatgaaagggtgagccgctgggcagccgcttatatcgcggataaaataaatacatttaaagaaggcaggccttttgttcttgggcttccgacaggctcaagccctcttggggtttacggggaatttataaaaatgaataaagagggaaaattgtcttttaaaaatgtgcgcacttttaacatggacgaatatgtagggctgcctgaaaatcaccctcaaagttaccattactttatgatggagagtcttttttatcatattgatattgaccaccgtcacatacatattcttgacggcatgacggaagactgcgaaaaagaatgtgaactctatgaaaaaacaatagccgctgaaggcgggatagacctttttcttggcggtatgggaagcgacgggcatattgcttttaacgaaccaggctcttctttgacatcccgcacaagaattaaaacgctgaccgaagagacaaaagcagctaacgcgcggttctttggcggcgacgcggcaaaagtcccaagtaccgcgttgacggtgggcgtaggaacggttatggacgcgcgcaaagttatgattattgtaagcgggcgcaataaggcgcgcgctcttcgcgccgttgtggaagagggggtaaaccacatgtggacgctttcatatttacagatacatcctaaagccgtcattgtatgtgatgaagacgcgacagaagagttaaaagtcggtaccgtccgttattttaagaatatagaaaaaaataatattttagattaa

SEQ ID NO: 62000 - protein, 263 aa, Unknown
  Obtained from environmental sample
  DOMAIN (15)...(248): Glucosamine-6-phosphate isomerases/6-phosphogluconolactonase
  misc_feature (1)..(263): Xaa is any amino acid
MRLVIQKDYERVSRWAAAYIADKINTFKEGRPFVLGLPTGSSPLGVYGEFIKMNKEGKLSFKNVRTFNMDEYVGLPENHPQSYHYFMMESLFYHIDIDHRHIHILDGMTEDCEKECELYEKTIAAEGGIDLFLGGMGSDGHIAFNEPGSSLTSRTRIKTLTEETKAANARFFGGDAAKVPSTALTVGVGTVMDARKVMIIVSGRNKARALRAVVEEGVNHMWTLSYLQIHPKAVIVCDEDATEELKVGTVRYFKNIEKNNILD

SEQ ID NO: 62001 - DNA, 882 bp, Unknown
  Obtained from environmental sample
  misc_feature (1)..(882): n is a, c, g, or t
gtgacaggcatttcaaatttttcccaatttatccgccatccactttttctttccgagacagacgacggtgtttgttgtgaactttgtcctaacaactgcgtaattaaaagtggcagttttggcgcatgtggggtgaggggaaacaaaggcggaaagggtatcattcccttttacgggttcatctccgcgctcgcacttgatccaatcgaaaagaaacccctgtatcattttaaaccgcgcacaaaaatactctcacttggttttgccggctgcaatctccattgccctttttgccagaattggcatatctcccaaaatacggacatacagggaaaatggatgcagcctggcgaaataatttccgccgcgctaaggcaggataccccttccatcgcttacacatactcggagcctcttattcatattgagtatattttagactgcatgatacttgcccacaggcacggaattgccaatgtgctggtaaccaacggctgtatcaaaacggaagccgccgccgaaattttaaaacttaccgacgcagccaatgtggacttaaaaactttttcgcaagaaacatataaaaaaacactaaacggcgatttgcaaaccgtgcttgattttatcgggctttgttacaagaccggagttcatttggaaattacaacccttgtcgtgcctgatttaaatgactcaggagacgaacttgataaagccgcggactttatcgcttccatcagtaaagaaatcccatggcacttaacggcctatcaccccgattaccgatggaacgcgccgccaacggacagagattttcttttacgcgccgccaaagaagctgagaaaaaattagcgtatgtacatatcgggaatattttctaa

SEQ ID NO: 62002 - protein, 293 aa, Unknown
  Obtained from environmental sample
  DOMAIN (85)...(243): Radical SAM superfamily
  misc_feature (1)..(293): Xaa is any amino acid
MTGISNFSQFIRHPLFLSETDDGVCCELCPNNCVIKSGSFGACGVRGNKGGKGIIPFYGFISALALDPIEKKPLYHFKPRTKILSLGFAGCNLHCPFCQNWHISQNTDIQGKWMQPGEIISAALRQDTPSIAYTYSEPLIHIEYILDCMILAHRHGIANVLVTNGCIKTEAAAEILKLTDAANVDLKTFSQETYKKTLNGDLQTVLDFIGLCYKTGVHLEITTLVVPDLNDSGDELDKAADFIASISKEIPWHLTAYHPDYRWNAPPTDRDFLLRAAKEAEKKLAYVHIGNIF

SEQ ID NO: 62003 - DNA, 855 bp, Unknown
  Obtained from environmental sample
  misc_feature (1)..(855): n is a, c, g, or t
ttgagttttccggctgtgaatttgtctttgcggagaaccagaaacagggttttaaaaatactttcctgcaaagaggaactgcccgtcttaaaaacattgatttcttttgatccggtagacggcgataccgaagcctccgcctcattggtgggagttactgttctgtattatgccagccttgtcgctttggggcaaaaacgcgaaaacttaaaacccggcacggcggaagccgagatggacaaaggcggcagtgaagataccgcctccatcatttttacttccggcacaaccggcgagccgaagggcgtaatgctgtgtcacagaaattttttgtgccaactgccggcttttatcaaattttttgaattaaagcccggtgatatttggatttccatgctgcccgtctggcatgtttacgagcggttaatcgaatatgttattttttattacagtacgagcattgcctattcaaaaccgatggctcctatattgatggcggattttcttgccattcgtcctaattggatggtcagcgttccgcgtgtttgggaagcgatcatggacggcattaaccgtaacataaaagccaaaggcagctttagaaaaaaaatgttcgatctggcgtcctcatattcaatgttatacacctattttaaagatttaacttttggccttctgccgaattttcacgggcgtttccgcgtgctggattcgatactgggctttttcccgtggcttttgcttcttcctttggaggggcttctccgcgctgttgcctttaaccggataaaaaaagaattcggcggccgttttaggccggaatttccggcggcggctctcttcccgcgagagtag

SEQ ID NO: 62004 - protein, 284 aa, Unknown
  Obtained from environmental sample
  misc_feature (1)..(284): Xaa is any amino acid
MSFPAVNLSLRRTRNRVLKILSCKEELPVLKTLISFDPVDGDTEASASLVGVTVLYYASLVALGQKRENLKPGTAEAEMDKGGSEDTASIIFTSGTTGEPKGVMLCHRNFLCQLPAFIKFFELKPGDIWISMLPVWHVYERLIEYVIFYYSTSIAYSKPMAPILMADFLAIRPNWMVSVPRVWEAIMDGINRNIKAKGSFRKKMFDLASSYSMLYTYFKDLTFGLLPNFHGRFRVLDSILGFFPWLLLLPLEGLLRAVAFNRIKKEFGGRFRPEFPAAALFPRE

SEQ ID NO: 62005 - DNA, 735 bp, Unknown
  Obtained from environmental sample
  misc_feature (1)..(735): n is a, c, g, or t
ttgggcattcgtctgcaggaaggttacggtcttactgaaaccgccccgttgatttcggcgcgtcagtacaaacgctcgcggcgcggaaccataggccagttaatgccgaacacgtcggcaaggattatagacggcagcggcaagctgatgccgccggggcgcaacgggattatttttgtcaagggcgatcaggtaatgaaaggatactatcaaaaacccgcggtaaccgccgccgttttaagcgaagacggctggtttaacaccggcgatataggcatgctcacctacgacaacgaattgcgcataacaggcagggcgaaggacaccattgttctgcgcggcggcgaaaacgtggaacccgtccccattgagtgcaagttgagggagagtccgtacattcagcagtgtatcgtggttgggcaggaccagaaatccctcgcggcgcttattattccgtggcagcagactattatggattttgcggaagagaattccattcctgttgttgattacgaattgctgttacagcagccggagattaatgagataatcgcttctgatatctccgagcgcataaatctcaagacgggttttaagccttatgaacgaatttttaagtttgttcttttgccgaaaccttttgagcccgggaaggaattgtcggggaagggggagcttctgcggcataatattacggcgctgtacgcgaaagagatttataagttatttaaatag

SEQ ID NO: 62006 - protein, 244 aa, Unknown
  Obtained from environmental sample
  misc_feature (1)..(244): Xaa is any amino acid
MGIRLQEGYGLTETAPLISARQYKRSRRGTIGQLMPNTSARIIDGSGKLMPPGRNGIIFVKGDQVMKGYYQKPAVTAAVLSEDGWFNTGDIGMLTYDNELRITGRAKDTIVLRGGENVEPVPIECKLRESPYIQQCIVVGQDQKSLAALIIPWQQTIMDFAEENSIPVVDYELLLQQPEINEIIASDISERINLKTGFKPYERIFKFVLLPKPFEPGKELSGKGELLRHNITALYAKEIYKLFK

SEQ ID NO: 62007 - DNA, 1038 bp, Unknown
  Obtained from environmental sample
  misc_feature (1)..(1038): n is a, c, g, or t
atggcggagcttctgtccctgtactggaaggacggtaaaaaacccttaagccaccagttgatcaagggacttgcgcaaactattccggcttttgacgaatataaatttgccaagtacaatcgttcaaaagccgttaaacttcgcgacgtattccgcatcgcgagaccgaaaccgaaagatgaagcgcaatccgcgctctggaagcgcgtggtcgccggtgaactggccgttcccgacacatgggaagtcgctatcagcgcctgcggcgatgacaacgaaaagaaaaaggccgagtttacccggctccttaccgagaaagcgcgtgacgaagaaaccggcaaagaattcaacaaactgggcgatttggctttcctgcgcaaccttcggaaaatgaaagaggtcggcgttgacgagaccgccatccggaaatcctttgaagaaaggaattggggctggataatcccttaccagttcattactgccgcgtcgcataaccccgcccttgaagacgtacttgaacaggcgatgttcaagtgtcttgacggacaggaagcgattgaagatacaaccgccctgctggtcgacgtgtccggttctatgaacgggcgcatatccggcaggtcagaggtaaagcggtatgacgtggctgccggtcttgcaattctgcttcgcgaaatatgcaaggacgcgaaactgtattcctttaacgaaaatctgcgtgtagtgccgccccggcgcggttttgccttgcgcgacgaaatttgcaaagaagtagacggcggcacgcacatgtggggggcaatcagagaggctgccgccgacaggcataaccggttgatggtggtcatcaccgacgaacaaacggcggacaacggcaagtacagcgacgccaacgccgatctgctggtcatcatcaatgtcgcttcgtacaagaacggcgtaggctatgaaaaaggcgttgtccatatcaacggctggtccgattccgtcatcgaatggctcagggaatacatgaagggagggtttgaaaaactttaa

SEQ ID NO: 62008 - protein, 345 aa, Unknown
  Obtained from environmental sample
  misc_feature (1)..(345): Xaa is any amino acid
MAELLSLYWKDGKKPLSHQLIKGLAQTIPAFDEYKFAKYNRSKAVKLRDVFRIARPKPKDEAQSALWKRVVAGELAVPDTWEVAISACGDDNEKKKAEFTRLLTEKARDEETGKEFNKLGDLAFLRNLRKMKEVGVDETAIRKSFEERNWGWIIPYQFITAASHNPALEDVLEQAMFKCLDGQEAIEDTTALLVDVSGSMNGRISGRSEVKRYDVAAGLAILLREICKDAKLYSFNENLRVVPPRRGFALRDEICKEVDGGTHMWGAIREAAADRHNRLMVVITDEQTADNGKYSDANADLLVIINVASYKNGVGYEKGVVHINGWSDSVIEWLREYMKGGFEKL

SEQ ID NO: 62009 - DNA, 609 bp, Unknown
  Obtained from environmental sample
  misc_feature (1)..(609): n is a, c, g, or t
gtgtcaatccctttggcctcctccaccgttatgaccccgtccttgccgaccttgtccatggcgtcggcgatcaaatccccgatttccgcgtcgttattggcgcttatagcgccgacttgggcgatctcgttcttgccggagatgggcttggaatccttcttcagcctatcgacgataaccctcaccgccttatcgatcccgcgcttaaccgccatcgcgtcggcccccgccgtcacgttctttatgccaaggcgggctatcacttgcgccaacacggtcgccgtcgtggtcccgtcccccgcagcgtcggatgtcttggaggcgacctccttaaccatctgcgcccccatattctcgaacttgtcttcaagctctatctccttagccacgctgacgccgtccttggtgacgagcggcgacccgaaacccctgtccaagacgacgttgcgtccgcgcggcccgagggtcacgcgaaccgcgtcggccaaggcgtccacacctttgagaagcttttcacgggctgatacgtcgaaagatagctgctttcctgccataatattttactctcctttgcgtgtttttgtttttttgtgtaatgacgtaaattaa

SEQ ID NO: 62010 - protein, 202 aa, Unknown
  Obtained from environmental sample
  SIGNAL (1)...(21)
  misc_feature (1)..(202): Xaa is any amino acid
MSIPLASSTVMTPSLPTLSMASAIKSPISASLLALIAPTWAISFLPEMGLESFFSLSTITLTALSIPRLTAIASAPAVTFFMPRRAITCANTVAVVVPSPAASDVLEATSLTICAPIFSNLSSSSISLATLTPSLVTSGDPKPLSKTTLRPRGPRVTRTASAKASTPLRSFSRADTSKDSCFPAIIFYSPLRVFVFLCNDVN

SEQ ID NO: 62011 - DNA, 999 bp, Unknown
  Obtained from environmental sample
  misc_feature (1)..(999): n is a, c, g, or t
atggcaggaaagcagctatctttcgacgtatcagcccgtgaaaagcttctcaaaggtgtggacgccttggccgacgcggttcgcgtgaccctcgggccgcgcggacgcaacgtcgtcttggacaggggtttcgggtcgccgctcgtcaccaaggacggcgtcagcgtggctaaggagatagagcttgaagacaagttcgagaatatgggggcgcagatggttaaggaggtcgcctccaagacatccgacgctgcgggggacgggaccacgacggcgaccgtgttggcgcaagtgatagcccgccttggcataaagaacgtgacggcgggggccgacgcgatggcggttaagcgcgggatcgataaggcggtgagggttatcgtcgataggctgaagaaggattccaagcccatctccggcaagaacgagatcgcccaagtcggcgctataagcgccaataacgacgcggaaatcggggatttgatcgccgacgccatggacaaggtcggcaaggacggggtcataacggtggaggaggccaaagggattgacacctgtttggacgtggtcgaggggatgcagtttgaccgcggatacgtctcggcctacttcgtgacgaacggcgacacgttggagtgcgtgctcgacgacgcctttatccttatatacgacaagaagatcagcggcatgaaggatatgctccccatactagaaaaggttgcgcagatggggcgggcgttgctcatcatcgccgaggaggtggagggtgaggcgctggcgactttggtgctgaataaactgcgcggcactctgaagatcgccgccgtcaaggcccccggtttcggcgacaggcgtaaggctatgctagaggatatcgcggtgttgaccggcggggcgctcgtatccgaggaggcggggtacaagcttgagaacgcgactgttgatatgttgggcaggctaagcgcattgttattgacaaagataatactaccattatag

SEQ ID NO: 62012 - protein, 332 aa, Unknown
  Obtained from environmental sample
  DOMAIN (23)...(331): TCP-1/cpn60 chaperonin family
  misc_feature (1)..(332): Xaa is any amino acid
MAGKQLSFDVSAREKLLKGVDALADAVRVTLGPRGRNVVLDRGFGSPLVTKDGVSVAKEIELEDKFENMGAQMVKEVASKTSDAAGDGTTTATVLAQVIARLGIKNVTAGADAMAVKRGIDKAVRVIVDRLKKDSKPISGKNEIAQVGAISANNDAEIGDLIADAMDKVGKDGVITVEEAKGIDTCLDVVEGMQFDRGYVSAYFVTNGDTLECVLDDAFILIYDKKISGMKDMLPILEKVAQMGRALLIIAEEVEGEALATLVLNKLRGTLKIAAVKAPGFGDRRKAMLEDIAVLTGGALVSEEAGYKLENATVDMLGRLSALLLTKIILPL

SEQ ID NO: 62013 - DNA, 597 bp, Unknown
  Obtained from environmental sample
  misc_feature (1)..(597): n is a, c, g, or t
gtgcagggcgtcctcaacacgcgccttcttctccttcatctccgactccgtcgccgcgccgatattgatgaccgccacgccgcccgcgagcttggcaagacgctcctgcaacttctcgcggtcataatccgacttcgtatcgtcaatctgcttccttatactgcccacacgcgccttgatgtccgactgcttgccggcgccctctataatggtagtattatctttgtcaataacaatgcgcttagcctgcccaacatatcaacagtcgcgttctcaagcttgtaccccgcctcctcggatacgagcgccccgccggtcaacaccgcgatatcctctagcatagccttacgcctgtcgccgaaaccgggggccttgacggcggcgatcttcagagtgccgcgcagtttattcagcaccaaagtcgccagcgcctcaccctccacctcctcggcgatgatgagcaacgcccgccccatctgcgcaaccttttctagtatggggagcatatccttcatgccgctgatcttcttgtcgtatataaggataaaggcgtcgtcgagcacgcactccaacgtgtcgccgttcgtcacgaagtag

SEQ ID NO: 62014 - protein, 198 aa, Unknown
  Obtained from environmental sample
  misc_feature (1)..(198): Xaa is any amino acid
MQGVLNTRLLLLHLRLRRRADIDDRHAARELGKTLLQLLAVIIRLRIVNLLPYTAHTRLDVRLLAGALYNGSIIFVNNNALSLPNISTVAFSSLYPASSDTSAPPVNTAISSSIALRLSPKPGALTAAIFRVPRSLFSTKVASASPSTSSAMMSNARPICATFSSMGSISFMPLIFLSYIRIKASSSTHSNVSPFVTK

SEQ ID NO: 62015 - DNA, 639 bp, Unknown
  Obtained from environmental sample
  misc_feature (1)..(639): n is a, c, g, or t
gtgggcagtataaggaagcagattgacgatacgaagtcggattatgaccgcgagaagttgcaggagcgtcttgccaagctcgcgggcggcgtggcggtcatcaatatcggcgcggcgacggagtcggagatgaaggagaagaaggcgcgtgttgaggacgccctgcacgcgacccgcgccgcggtggaggaggggatagtcgccggcggcggcgtggcgcttatcagggccgcttccgatctcgacgggttaaagttgaacggcgacgagcagatcggcgtggatatcatccgccgcgcctgcgaggaaccgttgcgtatgatagtgaccaacgcgggcctcgaggcctcggtggtggccaacgacgtcaaaggcggcaaggacgcctacggtttcaacgcctacaccggcaagtacgaggacttggtcaaggccggcgtcatagaccctacaaaggtaacccgcaccgcgttggaaaacgccgcctccatagcgggcttggtgctgactacggagtgcgtgatctgcgacattccggtagagacgtgctccgcccacggcggcggcggtatgccggatatgggcggcatgggcggcatgggtggaatgggcgggatgggcggaatggggatgatgtaa

SEQ ID NO: 62016 - protein, 212 aa, Unknown
  Obtained from environmental sample
  misc_feature (1)..(212): Xaa is any amino acid
MGSIRKQIDDTKSDYDREKLQERLAKLAGGVAVINIGAATESEMKEKKARVEDALHATRAAVEEGIVAGGGVALIRAASDLDGLKLNGDEQIGVDIIRRACEEPLRMIVTNAGLEASVVANDVKGGKDAYGFNAYTGKYEDLVKAGVIDPTKVTRTALENAASIAGLVLTTECVICDIPVETCSAHGGGGMPDMGGMGGMGGMGGMGGMGMM

SEQ ID NO: 62017 - DNA, 339 bp, Unknown
  Obtained from environmental sample
  misc_feature (1)..(339): n is a, c, g, or t
ttgccgcctttgacgtcgttggccaccaccgaggcctcgaggcccgcgttggtcactatcatacgcaacggttcctcgcaggcgcggcggatgatatccacgccgatctgctcgtcgccgttcaactttaacccgtcgagatcggaagcggccctgataagcgccacgccgccgccggcgactatcccctcctccaccgcggcgcgggtcgcgtgcagggcgtcctcaacacgcgccttcttctccttcatctccgactccgtcgccgcgccgatattgatgaccgccacgccgcccgcgagcttggcaagacgctcctgcaacttctcgcggtcataa

SEQ ID NO: 62018 - protein, 112 aa, Unknown
  Obtained from environmental sample
  misc_feature (1)..(112): Xaa is any amino acid
MPPLTSLATTEASRPALVTIIRNGSSQARRMISTPICSSPFNFNPSRSEAALISATPPPATIPSSTAARVACRASSTRAFFSFISDSVAAPILMTATPPASLARRSCNFSRS

SEQ ID NO: 62019 - DNA, 1206 bp, Unknown
  Obtained from environmental sample
  misc_feature (1)..(1206): n is a, c, g, or t
ttggtaacgtggcgcacgcggccgctgccgccgcacttcgcgcacgtgatccgtttgccggatttagagccgctgccgccgcattctgagcacctgtccaagcgcctgacttttatggtcttcttcacgccggcggagatctcttcaagcgtgagcccgagctttacctgcaaatcgttgccccgcgtccccccgtgcccgccgccgcgacgcgtgcgcgaaccgaaagccgaagatgtcgccgaagatagagtccccgccgaagtcgttcatgaacgcccgcagggcgtcggaaaggtcgaaactgccgctgaacccgccgtatccgccgccgccgccgccatgcgccgcctcaaacgcagcgtgtccatatttgtcgtactgcgcacgtttctgcggatccttcaatatttcgtaggcctcggtggcctcgcggaatttctctaccgcgctcttgtctcctggatttttgtcgggatggtacttcacggcgagcttgcggtacgccttctttatatcgtcgtcggaggcgcctttggggacgccgagtatgtcgtaatagtccgattttgccatatcaacccccactgccgctggaaacgaccactcgagcgtgttttattactttgtcattcaaacgatacccgcgctcaaagacctcggcgacgcagtcggccggtatctgagcgtttggcgccttcatcaaagcttcgtggaccatcgggtcgaaaggatctccggtcgccgcgaaagggattagaccgttgcgggtcaatacctcgtcatacttggcgaagattagtttcatcccctcgtagaacggcgcgaactcgccgccgctcccgcccgacttcagggcgcgctcgaaattatcccgcaccccaaccatctccaaaatcaacttctcattggccccggagacgaggcgctcgtactctttgctggagcggcgtttgtagttgtcaaactcggccatcaggcgcagatacctgtccttacccgcctcgacctcttgtcgcaacgccgcaacctcatcggtaccgtttgcaccgtctgcataacagaggccgccggcggctcgggttgagcggcgccgacagcctcaaacctcgttttcgacggttctgcatgttgaacggggtcggacgccttaggcgtatccgtcgtcgctttcatcgactttgtctttctatgctttgtaactga

SEQ ID NO: 62020 - protein, 401 aa, Unknown
  Obtained from environmental sample
  misc_feature (1)..(401): Xaa is any amino acid
MVTWRTRPLPPHFAHVIRLPDLEPLPPHSEHLSKRLTFMVFFTPAEISSSVSPSFTCKSLPRVPPCPPPRRVREPKAEDVAEDRVPAEVVHERPQGVGKVETAAEPAVSAAAAAMRRLKRSVSIFVVLRTFLRILQYFVGLGGLAEFLYRALVSWIFVGMVLHGELAVRLLYIVVGGAFGDAEYVVIVRFCHINPHCRWKRPLERVLLLCHSNDTRAQRPRRRSRPVSERLAPSSKLRGPSGRKDLRSPRKGLDRCGSIPRHTWRRLVSSPRRTARTRRRSRPTSGRARNYPAPQPSPKSTSHWPRRRGARTLCWSGVCSCQTRPSGADTCPYPPRPLVATPQPHRYRLHRLHNRGRRRLGLSGADSLKPRFRRFCMLNGVGRLRRIRRRFHRLCLSMLCN

SEQ ID NO: 62021 - DNA, 444 bp, Unknown
  Obtained from environmental sample
  misc_feature (1)..(444): n is a, c, g, or t
ttgcgacaagaggtcgaggcgggtaaggacaggtatctgcgcctgatggccgagtttgacaactacaaacgccgctccagcaaagagtacgagcgcctcgtctccggggccaatgagaagttgattttggagatggttggggtgcgggataatttcgagcgcgccctgaagtcgggcgggagcggcggcgagttcgcgccgttctacgaggggatgaaactaatcttcgccaagtatgacgaggtattgacccgcaacggtctaatccctttcgcggcgaccggagatcctttcgacccgatggtccacgaagctttgatgaaggcgccaaacgctcagataccggccgactgcgtcgccgaggtctttgagcgcgggtatcgtttgaatgacaaagtaataaaacacgctcgagtggtcgtttccagcggcagtgggggttga

SEQ ID NO: 62022 - protein, 147 aa, Unknown
  Obtained from environmental sample
  DOMAIN (3)...(143): GrpE
  misc_feature (1)..(147): Xaa is any amino acid
MRQEVEAGKDRYLRLMAEFDNYKRRSSKEYERLVSGANEKLILEMVGVRDNFERALKSGGSGGEFAPFYEGMKLIFAKYDEVLTRNGLIPFAATGDPFDPMVHEALMKAPNAQIPADCVAEVFERGYRLNDKVIKHARVVVSSGSGG

SEQ ID NO: 62023 - DNA, 444 bp, Unknown
  Obtained from environmental sample
  misc_feature (1)..(444): n is a, c, g, or t
gtgggggttgatatggcaaaatcggactattacgacatactcggcgtccccaaaggcgcctccgacgacgatataaagaaggcgtaccgcaagctcgccgtgaagtaccatcccgacaaaaatccaggagacaagagcgcggtagagaaattccgcgaggccaccgaggcctacgaaatattgaaggatccgcagaaacgtgcgcagtacgacaaatatggacacgctgcgtttgaggcggcgcatggcggcggcggcggcggatacggcgggttcagcggcagtttcgacctttccgacgccctgcgggcgttcatgaacgacttcggcggggactctatcttcggcgacatcttcggctttcggttcgcgcacgcgtcgcggcggcgggcacggggggacgcggggcaacgatttgcaggtaaagctcgggctcacgcttga

SEQ ID NO: 62024 - protein, 147 aa, Unknown
  Obtained from environmental sample
  DOMAIN (9)...(71): DnaJ domain
  misc_feature (1)..(147): Xaa is any amino acid
MGVDMAKSDYYDILGVPKGASDDDIKKAYRKLAVKYHPDKNPGDKSAVEKFREATEAYEILKDPQKRAQYDKYGHAAFEAAHGGGGGGYGGFSGSFDLSDALRAFMNDFGGDSIFGDIFGFRFAHASRRRARGDAGQRFAGKARAHA

SEQ ID NO: 62025 - DNA, 363 bp, Unknown
  Obtained from environmental sample
  misc_feature (1)..(363): n is a, c, g, or t
ttgcaggtaaagctcgggctcacgcttgaagagatctccgccggcgtgaagaagaccataaaagtcaggcgcttggacaggtgctcagaatgcggcggcagcggctctaaatccggcaaacggatcacgtgcgcgaagtgcggcggcagcggccgcgtgcgccacgttaccaattctttcttcggccagatggttcaggagacggattgccccatctgccgcggcgacgggcagacggtttccgatccgtgcgcggcctgcggcggcagcggcctgcggcaagcggagtcaaccgtgtcggtggacataccgcccggcgtggaggagggcaactacatccgcgacccggctcggccgatctga

SEQ ID NO: 62026 - protein, 120 aa, Unknown
  Obtained from environmental sample
  DOMAIN (15)...(98): DnaJ central domain (4 repeats)
  misc_feature (1)..(120): Xaa is any amino acid
MQVKLGLTLEEISAGVKKTIKVRRLDRCSECGGSGSKSGKRITCAKCGGSGRVRHVTNSFFGQMVQETDCPICRGDGQTVSDPCAACGGSGLRQAESTVSVDIPPGVEEGNYIRDPARPI

SEQ ID NO: 62027 - DNA, 429 bp, Unknown
  Obtained from environmental sample
  misc_feature (1)..(429): n is a, c, g, or t
atgaaaaataatgtatttcgttccattgaattctggcgggcgtccataatgcccttgcctgatcatgccttctttgaattgctgaggaccgttttcggaaaaataaagaccccctttaacaaacaaaatctgattggcgatcttgaaaaattcctttcaaacaatgatattcaaaaaaatattgccgcttacattgacaaaaatgacgcgcgtattattaccgccgtggcggtattgaatgaacccaccactgcggaactggacaccttttttgaccaggattgggaccatacggaattgcaggatatggttataaatcttgaagaaaggtttgttttattccgttttttggaagaaggccatagcgaaagccgccttgcgctcaatccgctactggaaacggtatgtcgccatataccgccgacataa

SEQ ID NO: 62028 - protein, 142 aa, Unknown
  Obtained from environmental sample
  misc_feature (1)..(142): Xaa is any amino acid
MKNNVFRSIEFWRASIMPLPDHAFFELLRTVFGKIKTPFNKQNLIGDLEKFLSNNDIQKNIAAYIDKNDARIITAVAVLNEPTTAELDTFFDQDWDHTELQDMVINLEERFVLFRFLEEGHSESRLALNPLLETVCRHIPPT

SEQ ID NO: 62029 - DNA, 1716 bp, Unknown
  Obtained from environmental sample
  misc_feature (1)..(1716): n is a, c, g, or t
atggttgaaaacccgctgattgttcaaggtgacaggactctgctgcttgatgttcatgcggaaaaggcggaacaggcgagatcggcggttattcctttcgcggaactggaaaaatcacctgaacatatccatacctaccgtataacgccgctgtctctgtggaacgccgcaagcgccgggttcaaacctgaggatatcgcgaaagtccttgccgaatacagccgctattcggtgccttccggtattattgaaagtttttccgataccatgtcccgttacggaaagatcaggatgatcgccgctcctgaaggcgccggagacgccgagatcgaacccaccggggacaatgacatgctgtttctggaaatcgccgataaggcggtactggcggaagtcgaggccgtaaaaacacttgaaaagtatttaataaaaaccggggaaggtttcctcttgaggctggttgacaggggaactgtaaaacaggaacttatcaggaagggatggccggtgcgggacgaagcgccgcttgtttcaggtgacagtatggaaatcaacctgcgggacagatgcctgtccggaaagcctttcgcccccagagattaccaaatcgaggcggcccatgcggtgcttggggacggaaggccggggaccggttacggtgttgtggcgctgccntgcggttccggaaaaaccatcgtcggcatggttataatgtcattgcttaaaacaaatacgctgattctgactacaaatgtcgcggccgtgcaccaatggattgaggagttagttgataaaacagaaataagccgcgaacagatagccgaatattccggcgactcaaagtccgtggcgcctgtcaccattgccacataccagattatcacctggcggcctggccgcgacgccgattttccccatttcaggctgttcagggaacagcattgggggcttataatttatgatgaagtgcaccttttacccgcgcctgtatttcgcgtaacagctgaattgcaggcggtcaggcgtttggggcttaccgcgactttgatccgcgaagacggcgcggaggacgcggtattcagcctggtaggcccgaagcgttacgatgtgccgtggaaggaacttgaaggcaaaggctggattgccgaagcggtctgtacggaaatccgcattgatctgccggaaaaactgaaaataccctatgccgtagcttcacagcgtgaaaaataccgcatcgccagtgagaattcgttaaaggaagaaattgtaacccagctgatcgaaaatcacagcgacgatcagattctcgttatcggccaatacctttcacagctcgattcgctttcgaaactgcttaaagtcccgttaatcaccggaaaaacacctaacgcagagagggaaagaatttacaacgaattcaaacggggagagatcaggatcatcgtggtctcgaaggttgccaattttgccatcgacctgccggacgcatcaatggcgattcaggtttcaggttccttcggttcgcggcaggaagaggcacagcgtctggggcgcatcctgcggcctaaagacaaagacgccaaacaccataacgcgctgttttttacccttgtctcgcgttacacggtagaggaggatttcgcggcaaaccggcataaattcctggccgagcagggctacaaatactctattcaacactggaatacaacaaaatga

SEQ ID NO: 62030 - protein, 571 aa, Unknown
  Obtained from environmental sample
  DOMAIN (199)...(357): DEAD/DEAH box helicase
  misc_feature (1)..(571): Xaa is any amino acid
MVENPLIVQGDRTLLLDVHAEKAEQARSAVIPFAELEKSPEHIHTYRITPLSLWNAASAGFKPEDIAKVLAEYSRYSVPSGIIESFSDTMSRYGKIRMIAAPEGAGDAEIEPTGDNDMLFLEIADKAVLAEVEAVKTLEKYLIKTGEGFLLRLVDRGTVKQELIRKGWPVRDEAPLVSGDSMEINLRDRCLSGKPFAPRDYQIEAAHAVLGDGRPGTGYGVVALPCGSGKTIVGMVIMSLLKTNTLILTTNVAAVHQWIEELVDKTEISREQIAEYSGDSKSVAPVTIATYQIITWRPGRDADFPHFRLFREQHWGLIIYDEVHLLPAPVFRVTAELQAVRRLGLTATLIREDGAEDAVFSLVGPKRYDVPWKELEGKGWIAEAVCTEIRIDLPEKLKIPYAVASQREKYRIASENSLKEEIVTQLIENHSDDQILVIGQYLSQLDSLSKLLKVPLITGKTPNAERERIYNEFKRGEIRIIVVSKVANFAIDLPDASMAIQVSGSFGSRQEEAQRLGRILRPKDKDAKHHNALFFTLVSRYTVEEDFAANRHKFLAEQGYKYSIQHWNTTK

SEQ ID NO: 62031 - DNA, 669 bp, Unknown
  Obtained from environmental sample
  misc_feature (1)..(669): n is a, c, g, or t
atgaaaaaaagcggcattaaatcaccaggagctgaaacagttaatttccgtgaaatacgcatggggaatattgcgcctaacactttgtaccgaagcagccatcctattatggacaatgaacaggagaggattatttctatgctggcggcgaaggagcggattcaaacgataattaatttgagtgacacaaacagcgaaattaaattaaagtcgatctttgcgccatggtacgataaactgcttaaaaacggcagggtaatcgccctaggcatggactttagcaataacagcgagagtttcaataaaaaattgaagaagggactgcaatttattattaataccgagggtccctggctcgttcattgccacgccggagttgaccgcaccggttttgtttcgattgtacttgaaacccttatgggagcgtcgttagacgatattatcaacgattaccttaaatcatttgacagtatatataattcgagcattcttagcgaagttaacaaaggggattctcttgtagtaatgcagcttttatcccatatgggtaattatttgccgataaacgacaggaatttaccggctatcgccgaatattatctgcttcataccgttaaattatctgccgttgaaatagggctgcttaaaggaaaactggcaagaatataa

SEQ ID NO: 62032 - protein, 222 aa, Unknown
  Obtained from environmental sample
  misc_feature (1)..(222): Xaa is any amino acid
MKKSGIKSPGAETVNFREIRMGNIAPNTLYRSSHPIMDNEQERIISMLAAKERIQTIINLSDTNSEIKLKSIFAPWYDKLLKNGRVIALGMDFSNNSESFNKKLKKGLQFIINTEGPWLVHCHAGVDRTGFVSIVLETLMGASLDDIINDYLKSFDSIYNSSILSEVNKGDSLVVMQLLSHMGNYLPINDRNLPAIAEYYLLHTVKLSAVEIGLLKGKLARI

SEQ ID NO: 62033 - DNA, 2535 bp, Unknown
  Obtained from environmental sample
  misc_feature (1)..(2535): n is a, c, g, or t
ttgaagcgggacggcagtacaaagaaaaacgggttcccttcgttcctttcagggcttatgaaggaatccgccgttgatcccctaataaggagcggcgagaaactcaccgaggaatgtcttaccctgctcccccttcgcgatctggtgctgttccccaatacggttgttccggtatttattaccggacagcccggcatggccgccctaacccaggcgctcaggcgggacaaccgcctcttcgccgtctgtcagaaaaagcaggaagacgggaatgatccgagcgaatttgtgtggccggtgggtacggcagtccgtataatccagcacttgcggctgcccgacagcactttccgcgtggtattgcagggcgagtaccgcggcaggattaacgaatttgagccgcatggggaatattcgctggtaaaagtctccccgcttgatataggcagtttcagcgatacaccctcctcccaggacattgcccttctcagagccgtgcaaagggcttttgcgcagtacgcggaactgtcaaaaaaaatcggaacggacacgcttttggctgttgatcgttcggaaaatcccgagcgcgcggcaaacctgatctgcaactcgtctcattttaagacagaaaaaaaaatcgagcttctcgccgttcctgacatcagggaacgccttgaggcggttcttgaaacgcttgaacgggaaaacgagatattcggcatacaaaaaaatatttccggaaaggttaaaagccgcatagataaacaccagcgtgaatactaccttcatgaacagcttaaggagatcaacaaagagcttggcaaggacaaggacagcaaggaagacgaatttacggagttggaaaaacagatcgaagcgaagacccctcctgcggaagttgtcgctaaagcggccaaagaactcaaccgtctccgcaaactccagcccctctcgcccgaagcgggcgtgctgcgcggctaccttgagtggatatccgatcttccctggagtgagacaagcgcggattcgggcgaccttgacgcggcgcagatcattcttgacgaagaccattttaacatgcgcaaggcaaaggaccgcatactggaatttatcgcggtgcggcagctgctcgcttcctcacagtcaacggaaaaaagcgcgataaagggacctattctctgttttatagggccgccgggaacgggtaagaccagtttgggaaaatccgtggcaagggctttggggcggcgttttgtccgtatctcgctcggcgggctgcgggacgaggctgagatccggggccacagaaaaacgtatgtgggggcgcttccaggaaaaataatccagtccatgcggaaggcgggaacgatgaacccggtcatcctgttagatgaaattgacaaattgtcaagcgatttccggggcgatcccgccagcgcgcttctggaggtgcttgacccggagcagaacaactccttcaccgatcattacatggaagtgacctacgatctttccaaagtgctgttcataaccaccgccaactcgctgcacggtattccctatccgctgctggaccgcatggagataatcgaagttccgggttacggtgaaaacgaaaaactctccatcgcgaagcagtttcttgtccccaaggaactcaaggaaaacggcctctcggacgcaaaaataaaatttacggacgatgcccttaagagcattatacgctattggacaatggaatccggagtgcgcggccttgagcgggaaatagcccgctgtatcagacgcgtcgcgcgtcaggctgtcgccgacgggcatggcgcggcgatcagcgcttttaaaaagaccgtcaagagcgagggtctggaaaagctgctgggcaggcggaaatacaaaaacgacgttatgttccgcgaggcgagggtaggggtaagctgcgggcttgcctggacggaaacaggcggcgcgacgctccctgtggaaagcgcgcgctttgacggaagcggcgaagtgcttatgaccggcaacctcggcgacgtaatgaaggaaagcgcccgcatagccctttcctatctgcgcagcgtccggaataattataaatatttagtcaaagatattggcaagaccgattttcacatccatgtccccgaaggggcaatccccaaagacggcccatcggcagggctcgcaatcgcgacttccctgctttcaacgctctgccaaaaagcgccccggcccggaatcgccatgaccggcgagcttactctgaccgggcgggtgctgcctatcggcggcttaaaggagaagctgttagccgccatccgcaaccagctggaaaaagtgcttctgcccgccgacaatcgcggtgaatgggacgagcttgacaaggatataacaactgctattaacgttgaattcgtcgaaaacgcctcggacgcgtttgcgattttgtttgataaagaaattaatttgaagaagacctcacgcatcgaaccttcggttcgcggcgcaaaggcgcggaggacgcaaaggtaa

SEQ ID NO: 62034 - protein, 844 aa, Unknown
  Obtained from environmental sample
  DOMAIN (393)...(529): ATPase family associated with various cellular activities (AAA)
  misc_feature (1)..(844): Xaa is any amino acid
MKRDGSTKKNGFPSFLSGLMKESAVDPLIRSGEKLTEECLTLLPLRDLVLFPNTVVPVFITGQPGMAALTQALRRDNRLFAVCQKKQEDGNDPSEFVWPVGTAVRIIQHLRLPDSTFRVVLQGEYRGRINEFEPHGEYSLVKVSPLDIGSFSDTPSSQDIALLRAVQRAFAQYAELSKKIGTDTLLAVDRSENPERAANLICNSSHFKTEKKIELLAVPDIRERLEAVLETLERENEIFGIQKNISGKVKSRIDKHQREYYLHEQLKEINKELGKDKDSKEDEFTELEKQIEAKTPPAEVVAKAAKELNRLRKLQPLSPEAGVLRGYLEWISDLPWSETSADSGDLDAAQIILDEDHFNMRKAKDRILEFIAVRQLLASSQSTEKSAIKGPILCFIGPPGTGKTSLGKSVARALGRRFVRISLGGLRDEAEIRGHRKTYVGALPGKIIQSMRKAGTMNPVILLDEIDKLSSDFRGDPASALLEVLDPEQNNSFTDHYMEVTYDLSKVLFITTANSLHGIPYPLLDRMEIIEVPGYGENEKLSIAKQFLVPKELKENGLSDAKIKFTDDALKSIIRYWTMESGVRGLEREIARCIRRVARQAVADGHGAAISAFKKTVKSEGLEKLLGRRKYKNDVMFREARVGVSCGLAWTETGGATLPVESARFDGSGEVLMTGNLGDVMKESARIALSYLRSVRNNYKYLVKDIGKTDFHIHVPEGAIPKDGPSAGLAIATSLLSTLCQKAPRPGIAMTGELTLTGRVLPIGGLKEKLLAAIRNQLEKVLLPADNRGEWDELDKDITTAINVEFVENASDAFAILFDKEINLKKTSRIEPSVRGAKARRTQR

SEQ ID NO: 62035 - DNA, 357 bp, Unknown
  Obtained from environmental sample
  misc_feature (1)..(357): n is a, c, g, or t
atgcgtgaggtcttcttcaaattaatttctttatcaaacaaaatcgcaaacgcgtccgaggcgttttcgacgaattcaacgttaatagcagttgttatatccttgtcaagctcgtcccattcaccgcgattgtcggcgggcagaagcactttttccagctggttgcggatggcggctaacagcttctcctttaagccgccgataggcagcacccgcccggtcagagtaagctcgccggtcatggcgattccgggccggggcgctttttggcagagcgttgaaagcagggaagtcgcgattgcgagccctgccgatgggccgtctttggggattgccccttcggggacatggatgtga

SEQ ID NO: 62036 - protein, 118 aa, Unknown
  Obtained from environmental sample
  misc_feature (1)..(118): Xaa is any amino acid
MREVFFKLISLSNKIANASEAFSTNSTLIAVVISLSSSSHSPRLSAGRSTFSSWLRMAANSFSFKPPIGSTRPVRVSSPVMAIPGRGAFWQSVESREVAIASPADGPSLGIAPSGTWM

SEQ ID NO: 62037 - DNA, 411 bp, Unknown
  Obtained from environmental sample
  misc_feature (1)..(411): n is a, c, g, or t
atgcccgtcggcgacagcctgacgcgcgacgcgtctgatacagcgggctatttcccgctcaaggccgcgcactccggattccattgtccaatagcgtataatgctcttaagggcatcgtccgtaaattttatttttgcgtccgagaggccgttttccttgagttccttggggacaagaaactgcttcgcgatggagagtttttcgttttcaccgtaacccggaacttcgattatctccatgcggtccagcagcggatagggaataccgtgcagcgagttggcggtggttatgaacagcactttggaaagatcgtaggtcacttccatgtaatgatcggtgaaggagttgttctgctccgggtcaagcacctccagaagcgcgctggcgggatcgccccggaaatcgcttga

SEQ ID NO: 62038 - protein, 136 aa, Unknown
  Obtained from environmental sample
  misc_feature (1)..(136): Xaa is any amino acid
MPVGDSLTRDASDTAGYFPLKAAHSGFHCPIAYNALKGIVRKFYFCVREAVFLEFLGDKKLLRDGEFFVFTVTRNFDYLHAVQQRIGNTVQRVGGGYEQHFGKIVGHFHVMIGEGVVLLRVKHLQKRAGGIAPEIA

SEQ ID NO: 62039 - DNA, 789 bp, Unknown
  Obtained from environmental sample
  misc_feature (1)..(789): n is a, c, g, or t
gtgggtgaggatgtggagaacatactgctcaagctgatccagaatgccggcggtaatatcgcggttgccgagcgcggcattgtatatatagacgaaatcgacaagatcgcccgcaagggtgaaaatgtttccattacaagagacgtatcaggcgagggcgtacaacaggcgctgttaaaaataatcgagggaacaatagcctctgttccgccgcagggcgggcgcaaacacccgaaccaggaattgatccgcatagacaccacaaacatactttttatctgcggcggggcttttgtgggccttgataaaatgatcgcgcgaagggtggtccagcatcctctgggctttggcactgagggtgataaatccgaaaaaagcataaaagagttgtatgacgccctgcatcccgacgatcttatccactacggcatgatccccgaattcataggcaggcttccgatcaccgtgagccttgatgagcttaaacgcgaggatctcaggcggatcatcaccgagccgaacaacgccatagtaaaacagtaccaggcttccctcgcctatgacgatgtaaagctggaatttaccgaagaggcaatagacgccattgccgatacggcgatcaagcaaaagacgggggcccgcggcctgcgcgccattgtcgaaaaaatgatgatagatattatgttcgagataccgtcgctcaaaggtaacaagcaggtgattatcaccgaggacgtggtcaagaatctgcaatcgcccattatccaccagcttcaaaaaagcgcctaa

SEQ ID NO: 62040 - protein, 262 aa, Unknown
  Obtained from environmental sample
  DOMAIN (1)...(155): ATPase family associated with various cellular activities (AAA)
  misc_feature (1)..(262): Xaa is any amino acid
MGEDVENILLKLIQNAGGNIAVAERGIVYIDEIDKIARKGENVSITRDVSGEGVQQALLKIIEGTIASVPPQGGRKHPNQELIRIDTTNILFICGGAFVGLDKMIARRVVQHPLGFGTEGDKSEKSIKELYDALHPDDLIHYGMIPEFIGRLPITVSLDELKREDLRRIITEPNNAIVKQYQASLAYDDVKLEFTEEAIDAIADTAIKQKTGARGLRAIVEKMMIDIMFEIPSLKGNKQVIITEDVVKNLQSPIIHQLQKSA

SEQ ID NO: 62041 - DNA, 648 bp, Unknown
  Obtained from environmental sample
  misc_feature (1)..(648): n is a, c, g, or t
gtgatgacgcacctgagccgcttctgcgaggaactggtactgtggtctacggacaatttcagtttcgttgagatttcagacgcctacgcgacaggctcttcaatcatgccgcaaaagaaaaaccccgacatggcggagttgattaggggcaagacaggccgtgtttacggcagcctgaccgctctccttaccgtgatgaaaggcctgccgctgtcgtataacaaggacatgcaggaggacaaggaagctgtcttcgacgccgttgacacggtaaagatgagcctgtctgttttccggggaatgtttgagactattacgtttaacacggaaaatatgtacaaaagcgcgctgggcggctacacaaacgccacggacgcggctgactggctggtaaaaaaagggatcccgttcagggaagcccacgaaataaccggcaggcttgtgttatacgctattaaaaaaaaagcgcggcttgaggaattaaccctggacgagttaaaaaccgtgtcgcccgtattcgacgagacgctttatagggcgatctccgttgaagcctgcgtcaacgcgagagcgctgcccggcggtccggcggagaaagcggtattagaacaaataaatagggttcggggttcggggttcggggtgtag

SEQ ID NO: 62042 - protein, 215 aa, Unknown
  Obtained from environmental sample
  misc_feature (1)..(215): Xaa is any amino acid
MMTHLSRFCEELVLWSTDNFSFVEISDAYATGSSIMPQKKNPDMAELIRGKTGRVYGSLTALLTVMKGLPLSYNKDMQEDKEAVFDAVDTVKMSLSVFRGMFETITFNTENMYKSALGGYTNATDAADWLVKKGIPFREAHEITGRLVLYAIKKKARLEELTLDELKTVSPVFDETLYRAISVEACVNARALPGGPAEKAVLEQINRVRGSGFGV

SEQ ID NO: 62043 - DNA, 324 bp, Unknown
  Obtained from environmental sample
  misc_feature (1)..(324): n is a, c, g, or t
gtgggcttccctgaacgggatccctttttttaccagccagtcagccgcgtccgtggcgtttgtgtagccgcccagcgcgcttttgtacatattttccgtgttaaacgtaatagtctcaaacattccccggaaaacagacaggctcatctttaccgtgtcaacggcgtcgaagacagcttccttgtcctcctgcatgtccttgttatacgacagcggcaggcctttcatcacggtaaggagagcggtcaggctgccgtaaacacggcctgtcttgcccctaatcaactccgccatgtcggggtttttcttttgcggcatgattga

SEQ ID NO: 62044 - protein, 107 aa, Unknown
  Obtained from environmental sample
  misc_feature (1)..(107): Xaa is any amino acid
MGFPERDPFFYQPVSRVRGVCVAAQRAFVHIFRVKRNSLKHSPENRQAHLYRVNGVEDSFLVLLHVLVIRQRQAFHHGKESGQAAVNTACLAPNQLRHVGVFLLRHD

SEQ ID NO: 62045 - DNA, 666 bp, Unknown
  Obtained from environmental sample
  misc_feature (1)..(666): n is a, c, g, or t
ttgagcgaaaaattatggggggggcgcttttccggccagaccgacgaactggccttatgctttcattcttccatcgcgtttgactcaaggctttacaggcatgatataaagggcagcatagcccacgcgcagatgctcggcaaacaagggatcatcacaaagcaggattccgagtccatagtaaaatcgcttgagactatattagctgacatcgaaagcggcgttctaaaaatagacatgaacgccgaggatattcattcctttgtcgagtccgagcttgtctcgcgtattggcgatcccggtaggcgtctgcatacgggcagaagccgcaacgaccaggtcgcccttgatatgcggatgtatataaaagaagaaattgacgcgacggccgctctgcttaaccaactgcttgacgcgcttcttgccgcggcaaaaaaaaacaccgcctcaataatgcccggatacacccatctgcaaaaggcgcagccggttacgcttgcccatcatcttctggcctacgcgcagatgttcaagcgggaccgcgaaaggctgaaggactgccgcgaaaggacggatgaaatgccccttggttccggggcgctcgcctcaaccggctatccgcttgacagggaatttgtcagggaaaaactcggcttgcaaggataa

SEQ ID NO: 62046 - protein, 221 aa, Unknown
  Obtained from environmental sample
  DOMAIN (8)...(221): Lyase
  misc_feature (1)..(221): Xaa is any amino acid
MSEKLWGGRFSGQTDELALCFHSSIAFDSRLYRHDIKGSIAHAQMLGKQGIITKQDSESIVKSLETILADIESGVLKIDMNAEDIHSFVESELVSRIGDPGRRLHTGRSRNDQVALDMRMYIKEEIDATAALLNQLLDALLAAAKKNTASIMPGYTHLQKAQPVTLAHHLLAYAQMFKRDRERLKDCRERTDEMPLGSGALASTGYPLDREFVREKLGLQG

SEQ ID NO: 62047 - DNA, 1218 bp, Unknown
  Obtained from environmental sample
  misc_feature (1)..(1218): n is a, c, g, or t
atgagtgataaaattgttttagcgtattcaggcggactggacacgacggtcatcctgccctggctcagggaaaattacaagggctgcgaggttatcgcctgctgcgtcgacgtgggccaatgcaaggattacgccctgattgaagaaaaagcggcaaaaatcggcgttggcaaggtagtaattataaacgccagggatgagtttataaccgactttctgtatcctatggttaaggcgaacgccatatacgaagggaagtaccttctgggaacctccgctgcccggccccttatcgccaagaagctggtcgatctcgcccttgccgaaggggcgaacaccatttcccacggggctacgggcaagggcaatgaccagatacgtttcgaactgaccataaaggcctttgcgccctcaatgaagatcatcgcgccctggcgcttatgggacatcaaatcccgcgaagaggaaataaagtacctgcaggaccgggggattgaagtccccatgaaaactgagcagagctacagccgcgatgacaatatttggcatctgagccacgagggacttgagcttgaagacccctcccaagagccggattacaaaaaattattacaactgacagtcaggccggaagacgcgcctgatacgcccgagtatgtggagcttggctntgagaaaggaatccccgtcagcctgaacgggaaaaaactcgcgcctcttgaaatgctggagtcattaaataaaatcggcggcagaaacggcgtaggcatagtggatcttgtcgagaaccgcgtggtcggcatgaagtcgcgcggcgtgtatgaaacgccgggcggatgcatcgtttacgcggcgcacaaagaactggaaagtttatgccttgaccgccagacgacctcgttcaaggcgacagtcgggcaaaaactggctgaactgatctattccggagaatggtattcgccgttaagggaagcgctgtcggcttttgtggacaaaacccaggagaccgtcaccggctccgtcaagctgaaattgtacaaggggaacatcacgccggcgggcagcaagtcgccgtattcgctgtttaatattgaactgtccagcttcacgaccggaagcctttacgaccacagggacgcggacggcttcatcaaactgcttggtctgcctatgaccgtcagggctttaatgaaaaagtctgtagaggaaaagcgttga

SEQ ID NO: 62048 - protein, 405 aa, Unknown
  Obtained from environmental sample
  DOMAIN (6)...(397): Arginosuccinate synthase
  misc_feature (1)..(405): Xaa is any amino acid
MSDKIVLAYSGGLDTTVILPWLRENYKGCEVIACCVDVGQCKDYALIEEKAAKIGVGKVVIINARDEFITDFLYPMVKANAIYEGKYLLGTSAARPLIAKKLVDLALAEGANTISHGATGKGNDQIRFELTIKAFAPSMKIIAPWRLWDIKSREEEIKYLQDRGIEVPMKTEQSYSRDDNIWHLSHEGLELEDPSQEPDYKKLLQLTVRPEDAPDTPEYVELGXEKGIPVSLNGKKLAPLEMLESLNKIGGRNGVGIVDLVENRVVGMKSRGVYETPGGCIVYAAHKELESLCLDRQTTSFKATVGQKLAELIYSGEWYSPLREALSAFVDKTQETVTGSVKLKLYKGNITPAGSKSPYSLFNIELSSFTTGSLYDHRDADGFIKLLGLPMTVRALMKKSVEEKR

SEQ ID NO: 62049 - DNA, 1017 bp, Unknown
  Obtained from environmental sample
  misc_feature (1)..(1017): n is a, c, g, or t
ttgggttttgagcaaattttcaaaaattcattgacaagcctgcccataggcggcggcaagggcggctcggattttgaccccaagggcaagtcagatcgcgaggttatggcgttctgccagagctttatgacggagttgttccgccatgtaggggagaataccgatgtaccggcgggagatattggcgttggcggacgtgagatcggatacatgtacggccagtacaaacgtttaacgaaccgctctgaaggagtgctgaccggcaagggcctgacttacggcggttcactcgcccgcacagaggcgaccggctacggccttgtctaccttgtggacgagatgctcctccagcatgggaaatctttgcaggataaaaccgttgtagtgtccggctcgggcaatgtcgccatatacgcaaccgagaaagcgcaggctctgggcgctaaagtggtcgccttatccgattcaaacggattcatccacgacgccgaaggcatcgatcttgcggcggttaaggaaattaaggaaataaaacgcggcaggatttcggagtacaagaactaccgccccaaagcggtttataccgaaggcacgggtatctggaatatcaagtgcgatattgccctgccctgcgcgacacagaacgagctgaatgaacaagacgcgaaaacgctggttagtaacgggtgcttcgccgtagccgaaggcgcgaatatgcccagcaccctggaagccaccgaagtatttttaaagaacaaagtgctgtttgcccccggcaaagcggctaacgcgggcggcgtagcgacatcggcgctggagatgtgccagaactccatgaggctttcatggtcatttgacgaggtggatcaaaagctcaagagcatcatggtgaatatttacaacaacattgccgccgcagcgaaagaagccggctccgaggacaattttgtcgtgggggcgaatatcgcgggtttcaagaaagtcgctgaagccatgaggcagcagggtacggtttaa

SEQ ID NO: 62050 - protein, 338 aa, Unknown
  Obtained from environmental sample
  DOMAIN (1)...(79): Glu/Leu/Phe/Val dehydrogenase, dimerisation domain
  misc_feature (1)..(338): Xaa is any amino acid
MGFEQIFKNSLTSLPIGGGKGGSDFDPKGKSDREVMAFCQSFMTELFRHVGENTDVPAGDIGVGGREIGYMYGQYKRLTNRSEGVLTGKGLTYGGSLARTEATGYGLVYLVDEMLLQHGKSLQDKTVVVSGSGNVAIYATEKAQALGAKVVALSDSNGFIHDAEGIDLAAVKEIKEIKRGRISEYKNYRPKAVYTEGTGIWNIKCDIALPCATQNELNEQDAKTLVSNGCFAVAEGANMPSTLEATEVFLKNKVLFAPGKAANAGGVATSALEMCQNSMRLSWSFDEVDQKLKSIMVNIYNNIAAAAKEAGSEDNFVVGANIAGFKKVAEAMRQQGTV

SEQ ID NO: 62051 - DNA, 774 bp, Unknown
  Obtained from environmental sample
  misc_feature (1)..(774): n is a, c, g, or t
atggcttcaactagattgaaagccgtccgattgtccccggcccgaaggctgtcctcagataatttaaaaatcatcgcgctgtttgcgatgacgatctttcacgcggcggatatgctgtttccgtggtggaagcgttatttacctgacgcttccgccgcgctgcttttgttatcctgtacaggtatcggaatgatcgcaatgcccgttatctgttttctggcggttgaaagcgcgtatcatacgaagaattggaaaaaatactggctgagggtaaccatgtgggctgtcccggcgtatttcgcgtatgcgctggcggctcataaaccgttaaacccctttgccgctccatttatcatgcacacaagcgtattatggactataagctgcggtacaggcgcttttttcgcgctgaaatatcagattaaattaaaggtagaacttatgctgctattgctggcgctgggcttttacggcgattggggtatatgcgctgcggccgcgattctgtgtatggcattgacgcggaataactttaacaggcagatgctggcaatgtcattgtgtttcggtatcgggcttgtttatacgtttttgcggcaaggaccggcgatgtccctggtacagtcctgttttttattctcaattcccgtgctgaaacaatacaacggcaaattatataattcaaaaccgctgcctcggttcgctttttactggtattatccggtacatttgcttttgctggcaggaataagacaaatagcaaatagcaggtag

SEQ ID NO: 62052 - protein, 257 aa, Unknown
  Obtained from environmental sample
  misc_feature (1)..(257): Xaa is any amino acid
MASTRLKAVRLSPARRLSSDNLKIIALFAMTIFHAADMLFPWWKRYLPDASAALLLLSCTGIGMIAMPVICFLAVESAYHTKNWKKYWLRVTMWAVPAYFAYALAAHKPLNPFAAPFIMHTSVLWTISCGTGAFFALKYQIKLKVELMLLLLALGFYGDWGICAAAAILCMALTRNNFNRQMLAMSLCFGIGLVYTFLRQGPAMSLVQSCFLFSIPVLKQYNGKLYNSKPLPRFAFYWYYPVHLLLLAGIRQIANSR

SEQ ID NO: 62053 - DNA, 444 bp, Unknown
  Obtained from environmental sample
  misc_feature (1)..(444): n is a, c, g, or t
atgccaaagaagaagtgcatgccgaacataaagccgcgacttttatcctggagaacgggcttatcagggcgacaaaatacgaagagccggatgacagatcgaagaaggggccggatggctatacaaccaattgatcttcagaccctttttacccagcttgacaaggtagcgaaaacacagagcgaccagcgtgaaggcgccgcgctgcatcaggctattcatggcgcgcagcttcagcgcaggacggaagatcaaataaaagctgtaaaccaggcgcagaatatgggtgaagacggcgccgagaaagtaaaagacagagggccgcaggctaatgacggcggcaagggtaaaaaacaggaaggtgagaagcctcagcaggaggaagcaaaggcggcagttattcatgaccccagcctgggcaggaatatagacataagcctgtaa

SEQ ID NO: 62054 - protein, 147 aa, Unknown
  Obtained from environmental sample
  misc_feature (1)..(147): Xaa is any amino acid
MPKKKCMPNIKPRLLSWRTGLSGRQNTKSRMTDRRRGRMAIQPIDLQTLFTQLDKVAKTQSDQREGAALHQAIHGAQLQRRTEDQIKAVNQAQNMGEDGAEKVKDRGPQANDGGKGKKQEGEKPQQEEAKAAVIHDPSLGRNIDISL

SEQ ID NO: 62055 - DNA, 555 bp, Unknown
  Obtained from environmental sample
  misc_feature (1)..(555): n is a, c, g, or t
atgaaggggaaagatatattgttccttggttgtggattgaacgaagacgatgaaattttaacattttgtgctaatggggataattatgctatttatccttgtggctgtaaagagaagacacaagaaattgctcgaaaattaggacgtaaagatattatcccaattttatatccacctcaaaacgaacatatttttcttaaaatcattcttgaacatattgtcaattgtgttacacagaaagaaaacgatacttttatgaaaacactcatagagcaggcaaagaatctgcaaggcaaggtcgcagatgcacaaaatgaacttggtgaaaagtgtataataggttcttcagaggacaatcgtataacagtaaaaatgtcaggaaaatatgatgttgtagatttcaaagtagatgattcttatgttgattactcaaaggaagatttagaaaaatctattctttttgcacttcaaagtgcaaaagaacaagtagatgaaacaatagacgatattatgggcgaggcgaccaaagatatgcctatgtttgatagtttttaa

SEQ ID NO: 62056 - protein, 184 aa, Unknown
  Obtained from environmental sample
  DOMAIN (90)...(181): Uncharacterised BCR, YbaB family COG0718
  misc_feature (1)..(184): Xaa is any amino acid
MKGKDILFLGCGLNEDDEILTFCANGDNYAIYPCGCKEKTQEIARKLGRKDIIPILYPPQNEHIFLKIILEHIVNCVTQKENDTFMKTLIEQAKNLQGKVADAQNELGEKCIIGSSEDNRITVKMSGKYDVVDFKVDDSYVDYSKEDLEKSILFALQSAKEQVDETIDDIMGEATKDMPMFDSF

SEQ ID NO: 62057 - DNA, 552 bp, Unknown
  Obtained from environmental sample
  misc_feature (1)..(552): n is a, c, g, or t
atgacagaacaactgattgaaattggcggcaggcttagggggctcagaagcctcatgggcatatcgacggagaaaatggccgaagaccttaagcttgaaatcagggagtacctggcgtttgaacgcggtgagcacgatttttcgtttagctttctttttaatgcggcaaacattttaggcgtggacattgtggatattatcagcggggaaacgccaaaattgaccacatgctgtcttgtaagaaaaggcgaggggtttgatataaggcgccgcgaagcctacgactacaagcatcttgcttttacattcagaaagaaaaaagccgagccctttttagtaacggtggagcccaacagcgacgaagtagaattgcacacacatgaaggtcaggaattcaactacatgatttccggcagtatggaatttcacattgacaatatggtatacgagcttaacgaaggcgacagcgtgtattttgattcaagcataccgcatgcgatgaaagctacaggcaaacatccggctgaatttatagccgttgttattaaataa

SEQ ID NO: 62058 - protein, 183 aa, Unknown
  Obtained from environmental sample
  DOMAIN (111)...(181): Cupin domain
  misc_feature (1)..(183): Xaa is any amino acid
MTEQLIEIGGRLRGLRSLMGISTEKMAEDLKLEIREYLAFERGEHDFSFSFLFNAANILGVDIVDIISGETPKLTTCCLVRKGEGFDIRRREAYDYKHLAFTFRKKKAEPFLVTVEPNSDEVELHTHEGQEFNYMISGSMEFHIDNMVYELNEGDSVYFDSSIPHAMKATGKHPAEFIAVVIK

SEQ ID NO: 62059 - DNA, 1167 bp, Unknown
  Obtained from environmental sample
  misc_feature (1)..(1167): n is a, c, g, or t
atgaatgtaggcggagctggaacagaaatagaagaagtatgctcttctctggccgccgcagggtatgcagtcaagttcagcggatatagtgcccttgacttgtacttccggtttccggccctgccttttttatggatcgaaaccaacgcggacattggcgtccttgcgcgttacatcgacaatttacgcttcccaggcgtagatattgccgatgcggctgttgaaactgccagtgctacctgctactttcgctgttttgaaagcgacgagcgaagcaaagcgtcctttcccattctttcactgacttacgattggcagaccagacgtttccaggatccgcttgggatatatccactgctgagagatcttcgcgatcgcaagtttgaaatcgactctagcttcgccgtgcaatcgcagatcggcaacagtcgcatcgttatggaagcggctttgcttcttgcccgttacggattttgcgcggaaacgtttgccgctactacggcacaaaaccagccgcccaggccggaagcgcagaggttttttcttagctgtcttatgctttcagccaggccggagcttgggctgggactgcttaagaaaacgggcttcctaaaagagttctggccggagcttgcctctttaaatgacgtggatcactcaaaggaattccaccctgagggtaatgtgtggaaccacaccctggaaacattccgctacagaaaaccaacagcatccggcgcttttgacctgcgcctttctttagcccttctcttgcatgacacgggcaagccaatctcagcgtctttcggaaaccaccgctttgacgggcacgcggagcttggtgctctggcggcggcgcgctttctggaacgcctggaattcgagccatcactaatccaggacattttctaccttgtaagaaaccacatgctccccgccgccctaaaacggctgcctcttgtaaaaaccaaagaaatcatggcctctccccttttccccaccctgctggaactttaccgctgcgacgaatcatcgtcattcaagggcttgaacgacttttatgaaaataccgccgcctatcaggcatatcttaaaaacataaagaacccctaccgatccaaagacgggaaaaagattaggtctctagcagaaaaatacaaaatctga

SEQ ID NO: 62060 - protein, 388 aa, Unknown
  Obtained from environmental sample
  DOMAIN (229)...(360): HD domain
  misc_feature (1)..(388): Xaa is any amino acid
MNVGGAGTEIEEVCSSLAAAGYAVKFSGYSALDLYFRFPALPFLWIETNADIGVLARYIDNLRFPGVDIADAAVETASATCYFRCFESDERSKASFPILSLTYDWQTRRFQDPLGIYPLLRDLRDRKFEIDSSFAVQSQIGNSRIVMEAALLLARYGFCAETFAATTAQNQPPRPEAQRFFLSCLMLSARPELGLGLLKKTGFLKEFWPELASLNDVDHSKEFHPEGNVWNHTLETFRYRKPTASGAFDLRLSLALLLHDTGKPISASFGNHRFDGHAELGALAAARFLERLEFEPSLIQDIFYLVRNHMLPAALKRLPLVKTKEIMASPLFPTLLELYRCDESSSFKGLNDFYENTAAYQAYLKNIKNPYRSKDGKKIRSLAEKYKI

SEQ ID NO: 62061 - DNA, 480 bp, Unknown
  Obtained from environmental sample
  misc_feature (1)..(480): n is a, c, g, or t
ttgaagtgctgggactatatcaagtgtagccgaggtgaacccatgcggacagtcattcaaagagtcaggcgcgcccaagtgaggagcggcaaccaatgcgcgtcaatcggcgtcggcgtcttgctgctggttggccttgaaaaaggggacacgagcgaaacaacggcctggtgcgccaacaaaattgcagggctcaggatattcggggacgccgacggcaagatgaacctgccactggcggacatcggcggcgaaatattggcggtgagccaattcacgctagcggggtgcatagacaaggggagaaggccatctttcgactcggccatgccgccaggcgaggcgcgcacgttgttcgatgtctttgtgtcgcagctaaagaacctttgtttgaatgtgaagacgggcttttttcaggagcacatggaagtggagctggtcaacgatgggccggttacgtttgtcttagatagaaaatag

SEQ ID NO: 62062 - protein, 159 aa, Unknown
  Obtained from environmental sample
  DOMAIN (41)...(158): D-Tyr-tRNA(Tyr) deacylase
  misc_feature (1)..(159): Xaa is any amino acid
MKCWDYIKCSRGEPMRTVIQRVRRAQVRSGNQCASIGVGVLLLVGLEKGDTSETTAWCANKIAGLRIFGDADGKMNLPLADIGGEILAVSQFTLAGCIDKGRRPSFDSAMPPGEARTLFDVFVSQLKNLCLNVKTGFFQEHMEVELVNDGPVTFVLDRK

SEQ ID NO: 62063 - DNA, 330 bp, Unknown
  Obtained from environmental sample
  misc_feature (1)..(330): n is a, c, g, or t
gtgagaatattccctgggacagccatttgtgtagtccttgcagccgaagggtaccctggccccccgcagaagggcgcggacatagagatcaaatcccccaagtgttccataatccacgcgggtacagcaaagtcgccacgcggctggaaggttggcggcgggcgcgcaatcaaccttgcggtcagagctggcagtttggaagaagctaggggcatggctcttgaggatttgacccaagtgggctggccagggatgcaagtccgcagggacatcgggctaaaagcgctgctgcatgctcgctcaggaaaaacagttgaagacccttggtga

SEQ ID NO: 62064 - protein, 109 aa, Unknown
  Obtained from environmental sample
  SIGNAL (1)...(14)
  DOMAIN (7)...(96): Phosphoribosylglycinamide synthetase, C domain
  misc_feature (1)..(109): Xaa is any amino acid
MRIFPGTAICVVLAAEGYPGPPQKGADIEIKSPKCSIIHAGTAKSPRGWKVGGGRAINLAVRAGSLEEARGMALEDLTQVGWPGMQVRRDIGLKALLHARSGKTVEDPW

SEQ ID NO: 62065 - DNA, 1800 bp, Unknown
  Obtained from environmental sample
  misc_feature (1)..(1800): n is a, c, g, or t
atgttctattttgtagacaaaaccccaaactgccattacaataaaaatcattacgccatgtcatatattaacaagaacagggaagtcctgcttaatcaatatccgggtctctgggaagatattaattccaaaagcgatgataacgaattaaaagatattattgtagaaacggcaaagacgggcgatcctacattacaaattaacggaatgtatattcactctcctcgcgatccgttacgtgaaggtcagcgtcttgcgcaggcttgcggagaaaacgcaggcggcgaaaaaaaagccgttgtgattctcggtttcgggcttggttacgccgctcaagcggctgcggaaatggggcattgcgtaattgtggcggaaaaacataaggacctgctgataaaagcgcttgaggttagagatttcagcgagttccttggtaagaacagaataattttcgtaatcggcggaagcggagaggcgataacaagcgctctttcaatagcggatgaaataatctctacaggaaaaacggaagcgaaaaaaacagcgccgtacatcattaacaacaaagcgctgacagcttttgacgagcagtggtataaacaggtagaggacaaaattcgttcatggacgatgagggacgatatcaacaccgccacgcacaagcgtttcgggcagaggtgggtgcgtaatttctcgcgtaacatcgaagctatccgtgattatccggggatttcccgattgtcaaattttgcgtcggcggacgctgaaactaaaccgctccccgtatttcttgccgctgcgggaccgagtttagacaaaattaaacctttgttacacgacatttatgaaagatgcgttattgtcgccgtagacacaaaccttcgcttttttgtaaaaaacaacattcagcccgattttgttcttgtagtagaccctcaattttggaacagtcgtcatcttgatcgatgtatccgcaaagaaaataatttgcaaacagcgttgattgccgaacctgccgtttatccgcccgtattaaaacttcctttcaaaaataaatttctttgcggttctatgcttccgcttggaaaatttatcgaacgcaaagttgacgaaaaaacaaaactgggcgcgggcggttctgtcgcttccacggcgtgggatttcgcccgcttcctcggcgctttggaaatttggatagccggattagacctttcgtttcccgatttgaaaacgcatttccgaggcgcgcgttttgaggaactttccaattccggttcaaatcgttttaaccccgtcgaaaaatggatagtgcgggcattgcgcgacggttttccattcaaagcgccttccgttcacggcggacaagttacaacagacagacgtctttctctctacgccgtctggttcgaggcgcaatttacgcaaaacaaacaaattcaaaactacagcctgttccacgaaggactggcaataaaaggactccaaccttcggacagccaaaaaatattagccctgccgaaacgccgggaagaaatcgaccgccgtattcagcggacattttccgaaatagaaaaagattttaacgccctcgaagaaaaacacgccagagcggaacgttatgacaaagcggttaacgctctgacgcgcggattggaaagtataaaaacagccgctgaagaaggagcggaaattgccaaagacagcgaatttaaggaaatagcggattttttgtcggcgtgtgtggagaaagagcggtataatgcgtatttaaaggaagtattgaaattgtatttggcataa

SEQ ID NO: 62066 - protein, 599 aa, Unknown
  Obtained from environmental sample
  DOMAIN (245)...(404): Protein of unknown function DUF115
  misc_feature (1)..(599): Xaa is any amino acid
MFYFVDKTPNCHYNKNHYAMSYINKNREVLLNQYPGLWEDINSKSDDNELKDIIVETAKTGDPTLQINGMYIHSPRDPLREGQRLAQACGENAGGEKKAVVILGFGLGYAAQAAAEMGHCVIVAEKHKDLLIKALEVRDFSEFLGKNRIIFVIGGSGEAITSALSIADEIISTGKTEAKKTAPYIINNKALTAFDEQWYKQVEDKIRSWTMRDDINTATHKRFGQRWVRNFSRNIEAIRDYPGISRLSNFASADAETKPLPVFLAAAGPSLDKIKPLLHDIYERCVIVAVDTNLRFFVKNNIQPDFVLVVDPQFWNSRHLDRCIRKENNLQTALIAEPAVYPPVLKLPFKNKFLCGSMLPLGKFIERKVDEKTKLGAGGSVASTAWDFARFLGALEIWIAGLDLSFPDLKTHFRGARFEELSNSGSNRFNPVEKWIVRALRDGFPFKAPSVHGGQVTTDRRLSLYAVWFEAQFTQNKQIQNYSLFHEGLAIKGLQPSDSQKILALPKRREEIDRRIQRTFSEIEKDFNALEEKHARAERYDKAVNALTRGLESIKTAAEEGAEIAKDSEFKEIADFLSACVEKERYNAYLKEVLKLYLA

SEQ ID NO: 62067 - DNA, 726 bp, Unknown
  Obtained from environmental sample
  misc_feature (1)..(726): n is a, c, g, or t
ttggagatactgcgctatttccctgaaaattcgatagatatgatttttgccgatccgccttatatgctgtcgaatgacggatttacttgccaaaacgggaaaatggttaatgtgaacaaagggaaatgggacaaaagcaatggttttgaaaacgatacggcgtttcataatgagtggatttccgcttgcagacgtgttttgaaacctgaaggaacaatttggatttcggggacatatcacagtatttatcaatgcggctatcttctacaaaaaaatgattttcatattttgaatgacataacatggtttaagcctaacgcatcgcctaacttgagctgccgtttttttacagcgtcgcacgaaactcttatttgggctcgcaaagataaaaaagcaaaacacacatttaattacgatgaaatgaaaaacggattattccccgaagataaattaaaaaatgaaaatacgcaaatgaggtctgtttggtcaataccaactactaaaggcaacgaaaaggaacacgggaaacacccgacgcaaaaaccgttagaccttctaaaacgcgttgtacttgcgtcgacaaatgaaaacgccgtcgtactcgatctattttgcggaagcggaaccacaggagctgcctgcaaatgtttaccggacaggttttttatcggtattgaaattgataaaacatattgcgaattggcgaaaaaaagattaagcgaataa

SEQ ID NO: 62068 - protein, 241 aa, Unknown
  Obtained from environmental sample
  DOMAIN (12)...(237): DNA methylase
  misc_feature (1)..(241): Xaa is any amino acid
MEILRYFPENSIDMIFADPPYMLSNDGFTCQNGKMVNVNKGKWDKSNGFENDTAFHNEWISACRRVLKPEGTIWISGTYHSIYQCGYLLQKNDFHILNDITWFKPNASPNLSCRFFTASHETLIWARKDKKAKHTFNYDEMKNGLFPEDKLKNENTQMRSVWSIPTTKGNEKEHGKHPTQKPLDLLKRVVLASTNENAVVLDLFCGSGTTGAACKCLPDRFFIGIEIDKTYCELAKKRLSE

SEQ ID NO: 62069 - DNA, 453 bp, Unknown
  Obtained from environmental sample
  misc_feature (1)..(453): n is a, c, g, or t
atggaaaaagagctattttatgttaatggtctgaaattttcatgtaaacgttgttcttcctgctgccgctacgatcaagggtttgtgtatctttcaaaaaaagaccttagtaaattgagctccgcgctgaaaatggacgaaaaggacgtaatcagcgaatattgcatatgggtaaaaaaccggaacggcgattctgttctttcgttaaaagaaaagtcaaattatgactgtattttatgggattccggttgtactgtctattcggcgcgtccgcttcaatgcgtaacttttccgttttgggaatcgataatcgcagatgtgcgatgctgggaaagcgcggcaaagagttgtccgggtatgaattcgggagaattgcatacgatggcggaaatagaaaaaaccggagcgttacggtcaagtgaaccgataatttgtaaaacagggggagattga

SEQ ID NO: 62070 - protein, 150 aa, Unknown
  Obtained from environmental sample
  DOMAIN (13)...(122): Uncharacterised protein family (UPF0153)
  misc_feature (1)..(150): Xaa is any amino acid
MEKELFYVNGLKFSCKRCSSCCRYDQGFVYLSKKDLSKLSSALKMDEKDVISEYCIWVKNRNGDSVLSLKEKSNYDCILWDSGCTVYSARPLQCVTFPFWESIIADVRCWESAAKSCPGMNSGELHTMAEIEKTGALRSSEPIICKTGGD

SEQ ID NO: 62071 - DNA, 1470 bp, Unknown
  Obtained from environmental sample
  misc_feature (1)..(1470): n is a, c, g, or t
atgactaagcctgactacggcgataaagatccgataaccgctctcgcgactgcgttaggcgaaagcgctcttgccattgtcagaacatccggtacaaacggcgacggcaaaagcgccatcgatctgcttgcggatattttctcaaggccgcaagctctgctctcagctgccggaaacacgatagtccacggctggatagtcgaaccgctaactaaaaaaaagctggatgaagttctcgtctccgtataccgcgccccgcacagttacacaggcgaggacagcgcggatatttcctgtcacggcggtattgctgcggtaaaagccgttttagcggcccttaaaaaggcaggttttcgtgaggcccttaaaggggagttcacttttcgcgcttttatgaacggcaagcttgatcttactcaggcggaatcggtgatggagcttgtcgcggcaaagacaggccgcggccgtgagcaggcggtaaggcggctcagcggagttttggagcgggaaatatccgccattaaagagacgcttgttgaagtcctggcaggcgcggaaatatatctggattacagcgaggatgaatttatatcgcctgacgaagaaagcgaaggcgcgcttccaaatagagcactggcagaaaaggcggccggaaggctaaaggttctttctgagctatggaaccgcgaaagaatctacaccgaaggcgctttggcggttttagcggggttgccgaacgcgggaaaatcaagcctatttaattacctaatccgcgaggatcgctctattgttactgacgttcccggcactaccagggactggatcgaagctgttatttctctcgatgatattccgctccgtttggctgacacagcgggcttgcggaagatgggcaataacgcgtcaaacccgaaagaaattgacgaagcggaaagaatcggcgtggaacggagcatggaacttctggaaaaggccgatcttgttctttatgcagttgacggcgttaaaggcttcaccgacgatgacagggattttttggcgaagcgcagcgaaacgcaaaacgataagacgcttatactactctggaacaaagcggatctagtacccactcctgcttttcccgacaaaaagactcaatttcttccggtaagcgctaaaaccggcgagggcattcctgaaatgttgcgcctaatggcaggccttttgggaaaaaactcactgccgtcatcatcttccgaagaccaactgcttgaggccgcggggccgggcagtataaggcagaaagagcttattgattctgccttaagcgaaatagaggaagccctgtccctggccgaccgggaagaaagccttgaccttatcgccccgctcattcgttccgccgttaacgctttgggagaaattacaggcgaagtttcaaacgcggatattttgagggttatgttcagccgtttttgcgtggggaagtaa

SEQ ID NO: 62072 - protein, 489 aa, Unknown
  Obtained from environmental sample
  DOMAIN (237)...(366): GTPase of unknown function
  misc_feature (1)..(489): Xaa is any amino acid
MTKPDYGDKDPITALATALGESALAIVRTSGTNGDGKSAIDLLADIFSRPQALLSAAGNTIVHGWIVEPLTKKKLDEVLVSVYRAPHSYTGEDSADISCHGGIAAVKAVLAALKKAGFREALKGEFTFRAFMNGKLDLTQAESVMELVAAKTGRGREQAVRRLSGVLEREISAIKETLVEVLAGAEIYLDYSEDEFISPDEESEGALPNRALAEKAAGRLKVLSELWNRERIYTEGALAVLAGLPNAGKSSLFNYLIREDRSIVTDVPGTTRDWIEAVISLDDIPLRLADTAGLRKMGNNASNPKEIDEAERIGVERSMELLEKADLVLYAVDGVKGFTDDDRDFLAKRSETQNDKTLILLWNKADLVPTPAFPDKKTQFLPVSAKTGEGIPEMLRLMAGLLGKNSLPSSSSEDQLLEAAGPGSIRQKELIDSALSEIEEALSLADREESLDLIAPLIRSAVNALGEITGEVSNADILRVMFSRFCVGK

SEQ ID NO: 62073 - DNA, 768 bp, Unknown
  Obtained from environmental sample
  misc_feature (1)..(768): n is a, c, g, or t
atgatcgcgagggcatccgatttttctacctcaaccgactcaggcggccgcgcgcgaattccgaattttgacaatacctacaaaaatgagcgttctcccacggtttacacggttctttcgggcgaagatatgtcttttatggcatacaataccaacggccgtaatcttgactactccgcctttgacgtgggcggtatttacggggcaagcgatcctaaaacactcagggcgtttcttttctccgacaggggattataccgccccggagacgaggtgcggatagggcttgtgatcaaaaacgacagctgggcgggaaatctgggcggcacccctcttgaatatcgcataacagacccgcgcggcgcggaaattagcaacaagcggatcaaattatcttccgaaggagttgaggaaatccgctttagcacccaggactggtctccgaccgggacttatacggcttcggtttatgtaatccgggaatggtgggaacagagaacgagggatgactatacattcctcggctctcaacccgtgaaagtagaagaatttttgccggacactttgaatgtttccgctgtttttgatccggttcccgcaggacgggtggatcgcgcccggcgaattaaaagcgaaggtgtcggtgcgaaatctttttggaaccgctgcctcgggcaacgaggtaaaagcgcagatcaatttgtctccgggacatcagtacttccgccaataccgcgattatcagttcagggatccatatcttggtaa

SEQ ID NO: 62074 - protein, 255 aa, Unknown
  Obtained from environmental sample
  DOMAIN (2)...(241): Alpha-2-macroglobulin family N-terminal region
  misc_feature (1)..(255): Xaa is any amino acid
MIARASDFSTSTDSGGRARIPNFDNTYKNERSPTVYTVLSGEDMSFMAYNTNGRNLDYSAFDVGGIYGASDPKTLRAFLFSDRGLYRPGDEVRIGLVIKNDSWAGNLGGTPLEYRITDPRGAEISNKRIKLSSEGVEEIRFSTQDWSPTGTYTASVYVIREWWEQRTRDDYTFLGSQPVKVEEFLPDTLNVSAVFDPVPAGRVDRARRIKSEGVGAKSFWNRCLGQRGKSADQFVSGTSVLPPIPRLSVQGSISW

SEQ ID NO: 62075 - DNA, 402 bp, Unknown
  Obtained from environmental sample
  misc_feature (1)..(402): n is a, c, g, or t
atgaaaatagtcctggacgctaatatatttgtatcttcatttttctggggcggtaatccacggtcagtcctgaaaagggttatagcaggaatagatgaattattcataacaaaagaaatattggatgaaattgaaactgtaatgggaagacctaaatttcacgcggataaagaaaaaatagtttattttattaattcaattgaagaaattggaactaaaattgtacccaaaaaacggattaaaaatggcagtagggataaagcagataataaatatttagaatgtggaataacggcggatgttgattatattatatccggggatatacatttgttggaattaaaggaatatgaaaatataaagatagtaacagtaaaacattatttaggaataatgcaatag

SEQ ID NO: 62076 - protein, 133 aa, Unknown
  Obtained from environmental sample
  DOMAIN (3)...(122): PIN domain
  misc_feature (1)..(133): Xaa is any amino acid
MKIVLDANIFVSSFFWGGNPRSVLKRVIAGIDELFITKEILDEIETVMGRPKFHADKEKIVYFINSIEEIGTKIVPKKRIKNGSRDKADNKYLECGITADVDYIISGDIHLLELKEYENIKIVTVKHYLGIMQ

SEQ ID NO: 62077 - DNA, 1659 bp, Unknown
  Obtained from environmental sample
  misc_feature (1)..(1659): n is a, c, g, or t
atgaataatgaacatccggctttattgggggatgaggcggttgcgttaggggcaattcactcaggtgttagcgcggcttacggttatccgggaacgccctcgacggagatacttcaatacctcattgacgaatttgagaaggggccgaacaatagttcggggccgatagcccgttggtgttccaacgagaaaaccgcgcttgaagcggggcttggcgtttcattcgccgggcggcgggctatagtcaccatgaagcacgtcgggttgaatgtggcctccgatccctttatcaatgcggctcttttaggtattaaaggcgggtttgttgtcgccgttgccgatgatccgggcatgcacagttcccagaacgaacaggattcccgcttctacgcggcgttcgcgatggttccctgccttgagccgcgcagccagcaggaagcctatgatatgacgcgtgaggcgtttaaagtttccgagcgttttcaggttccggtattactgcgcctttctacccgtctttcccacgcgcgcgccgcgattaccacgcgggacgctgatccgcaaaagcctgtttcaaaaactatggaaaaaagccgctggatgctgctccccgcctttgcccgcaagaactacgcctctcttatcgataagcaaaaggaaatccgggagtggtcggcctcgcatccggcgaataaacttgaacttgcaggaaattccgatttggctgtaattacctcaggcctcggcgggaattactacgaggaaaacctcgttgatttgaccgttacgcgaaacggaaagccgccggcaaggctgcatattggcgcgtaccccctgcccgaagaaaagatccgcttactgtgctccgcttccaaaaaagtcatggttatagaggaaggccagccttttatagaagaaaaactctggggcatcctgccgcaagacgtaacaattttgggcaggttaaataatacgcccaatgaaacaatggctatcccccgtaccggcgaactcgaccccgacaatgtgcgtctggcgctgggcctgccgccgcggccatcagcagttgttgccggctttgacgcccttcccgggcgtccgccccagctctgcaagggctgcccccacgctgacagttatgagactatcaaaaaggttgtggaggaactggatccgcgggaaggccaccccgacgtggggattaactcggacatcggctgttattcgctcggcgccgcgccgccctaccaggttcccgaaagcatagtctgcatgggcgcctcagtgggcatggcaaaaggcgcggccgacgccggactgcgctacagtatcgcggtaatcggcgactccacgttcatccattccggtataaccgcccttatcgacacagtggcgtccgatacccccatgacccttatcatacttgacaactccatcgtggcgatgacaggctgccagccgaccatggttccgtcagaaagtttgcgcagtctgctcctcggctgcggggtaaagcaggaacacctgctggaactggaagcgagaaaacagcttattgaggaaaactcaggcaggcttaaaaaagaaattgaataccggggcctttcggtggtggtattcaaacgcgaatgtctggaagcggcgaggaagaagaagtag

SEQ ID NO: 62078 - protein, 552 aa, Unknown
  Obtained from environmental sample
  DOMAIN (16)...(235): Pyruvate flavodoxin/ferredoxin oxidoreductase, thiamine diP-binding domain
  misc_feature (1)..(552): Xaa is any amino acid
MNNEHPALLGDEAVALGAIHSGVSAAYGYPGTPSTEILQYLIDEFEKGPNNSSGPIARWCSNEKTALEAGLGVSFAGRRAIVTMKHVGLNVASDPFINAALLGIKGGFVVAVADDPGMHSSQNEQDSRFYAAFAMVPCLEPRSQQEAYDMTREAFKVSERFQVPVLLRLSTRLSHARAAITTRDADPQKPVSKTMEKSRWMLLPAFARKNYASLIDKQKEIREWSASHPANKLELAGNSDLAVITSGLGGNYYEENLVDLTVTRNGKPPARLHIGAYPLPEEKIRLLCSASKKVMVIEEGQPFIEEKLWGILPQDVTILGRLNNTPNETMAIPRTGELDPDNVRLALGLPPRPSAVVAGFDALPGRPPQLCKGCPHADSYETIKKVVEELDPREGHPDVGINSDIGCYSLGAAPPYQVPESIVCMGASVGMAKGAADAGLRYSIAVIGDSTFIHSGITALIDTVASDTPMTLIILDNSIVAMTGCQPTMVPSESLRSLLLGCGVKQEHLLELEARKQLIEENSGRLKKEIEYRGLSVVVFKRECLEAARKKK

SEQ ID NO: 62079 - DNA, 774 bp, Unknown
  Obtained from environmental sample
  misc_feature (1)..(774): n is a, c, g, or t
ttgatgtttataaacccgccgccgtttaactttttccttacaattggcgcggtaatagtattctcaatatcaacaatttatgttaaagaaagagaaaatataattttagatattattaatacttttattacaggcgtaatcaccctgtatttttcctggtatataggcaaactgcggttggggctggaattaagcactaccatactggaagatgaacgcgacagttactttgatcaaagtataatagacgaattaacccaactgaaaaaccgccgcgattttcagcaaaccttcaatagatacctgtccaattacagaacttccgataattggctctgcatcgccatccttgatatagatttcttcaaactctacaacgatcattacggccaccccggcggcgacgaatgtctgcgctccgtaggcaggattttgaacagtttgaaagactcgcatgacgtttatgcggcaagggtgggcggcgaggaattcaccctgctgtggttcgagaacgaagtttcgcatgtggacgttgttgtttcccatttacagaaattaattaaggaactgaagattccccatgaaaaatcaaaagtcgcgccttatgtatctatcagtatgggagtttatatagaaaaatgcggcgcgcccaccgatatgcagactatgtatgatatggctgacaaagcgctgtacaacgccaaagaaggcggtcgtaattgcgcggttattcatggtaataatattgagcaatacaagataacccccgcataa

SEQ ID NO: 62080 - protein, 257 aa, Unknown
  Obtained from environmental sample
  DOMAIN (76)...(241): GGDEF domain
  misc_feature (1)..(257): Xaa is any amino acid
MMFINPPPFNFFLTIGAVIVFSISTIYVKERENIILDIINTFITGVITLYFSWYIGKLRLGLELSTTILEDERDSYFDQSIIDELTQLKNRRDFQQTFNRYLSNYRTSDNWLCIAILDIDFFKLYNDHYGHPGGDECLRSVGRILNSLKDSHDVYAARVGGEEFTLLWFENEVSHVDVVVSHLQKLIKELKIPHEKSKVAPYVSISMGVYIEKCGAPTDMQTMYDMADKALYNAKEGGRNCAVIHGNNIEQYKITPA

SEQ ID NO: 62081 - DNA, 759 bp, Unknown
  Obtained from environmental sample
  misc_feature (1)..(759): n is a, c, g, or t
ttggcaaaacaaaacgaagaagctctggaaatttttgtaaaaacggtaaaagaaaaaaacagtcccttcttctatctcccgcaaacagcggaaatttccgttataaaaatcactcccgcgggtacggacttcaccctctcttttaaaacggaaaacaaaacctctttacaacagccgcttttttccggcccgcttaatgtcttcataccgataccgggaaaagtgcaggcagaaaatgccgctctcgccattgccgctgtaaaaaccgcttttcctcagattaacgaggactcaataagacagggattaaaaagtttaaaaattcccgcccgctttgaaaaaatcgctccgcttttcattattgacggggcgcacactccggaaagcctcttcctgtgcattgaaactttttgccttctttacggtgaaggaggcattctcatcttcggctgcgctgcggacaaggacgcggcggcaatggcgaaaatagcgcattcacatttttccaaaataataattacaacaccgggaacatttaaaatcagcaacccgccgcaggtttacgaagcgttcacagcgcaggcgggacgggaaaaaacgcagcttgttacagacatacaggaagccgtaaaagaagcggttagttttgcgcgaaaagaaagagaaaagcgtcttccgatacttgggacagggtcattttatctggcatcagagataagaaaaaatatcgaacttatcaactctatggacaatttttaa

SEQ ID NO: 62082 - protein, 252 aa, Unknown
  Obtained from environmental sample
  misc_feature (1)..(252): Xaa is any amino acid
MAKQNEEALEIFVKTVKEKNSPFFYLPQTAEISVIKITPAGTDFTLSFKTENKTSLQQPLFSGPLNVFIPIPGKVQAENAALAIAAVKTAFPQINEDSIRQGLKSLKIPARFEKIAPLFIIDGAHTPESLFLCIETFCLLYGEGGILIFGCAADKDAAAMAKIAHSHFSKIIITTPGTFKISNPPQVYEAFTAQAGREKTQLVTDIQEAVKEAVSFARKEREKRLPILGTGSFYLASEIRKNIELINSMDNF

SEQ ID NO: 62083 - DNA, 936 bp, Unknown
  Obtained from environmental sample
  misc_feature (1)..(936): n is a, c, g, or t
atgagtgatgatatcgaatatgaagatatagaagacgacgttgtttttgaggacgagcctaaggtaaacaaaatgtatacaggcgccgatgccggagttgaatctattgctcctgatactcccatttacaggttaaggcttttatattcacatgaaacttttcttgccgtttaccgtgaagacaatttaaattcggatacaatggtgatagtgcctacccgctacgggcgcgatcttgcgcaggtaatcggctctgtacaagggaaacttccgcaggtttcggaaatcgcctggattgatcgcatagcgacgcccgaagatttggaaaaatcacataacaacagtaagctggaaaaagacgcgttcaatatctgcagaaaaaaaattgaaaaccataaacttgaaatgaaactggttcttgtgcattatcttctggaagaacctaaaatactctttttctttactgccgaaaacagagtggactttcgcgagcttgttaaagaccttgtaagcgtttttaagatgcgtattgaactgcgtcagattggtgtgcgggatgaagccagagtgataggtggtcttggggtctgcgggcgcggttattgctgtcacagtgtttccgataaacttaagccggtttcgattaaaatggcaaaagatcaaaaactctctcttaattccgtaaaaatttcaggtccctgcgggcggcttttatgctgcctgttttatgaatatggtttttacagtgaacagcagcgcaatcttccccaggaagggatgaagattaattataacaatgaatcatggaaaattgcggaagtaaatcctgtaacaggccagatcaggttaagtaccgatgacggccgcatgatgactgtccctgtctgtaaattcgagcgtactgaaaactattggcagattaaaaattgtccatag

SEQ ID NO: 62084 - protein, 311 aa, Unknown
  Obtained from environmental sample
  DOMAIN (95)...(182): PSP1 C-terminal conserved region
  misc_feature (1)..(311): Xaa is any amino acid
MSDDIEYEDIEDDVVFEDEPKVNKMYTGADAGVESIAPDTPIYRLRLLYSHETFLAVYREDNLNSDTMVIVPTRYGRDLAQVIGSVQGKLPQVSEIAWIDRIATPEDLEKSHNNSKLEKDAFNICRKKIENHKLEMKLVLVHYLLEEPKILFFFTAENRVDFRELVKDLVSVFKMRIELRQIGVRDEARVIGGLGVCGRGYCCHSVSDKLKPVSIKMAKDQKLSLNSVKISGPCGRLLCCLFYEYGFYSEQQRNLPQEGMKINYNNESWKIAEVNPVTGQIRLSTDDGRMMTVPVCKFERTENYWQIKNCP

SEQ ID NO: 62085 - DNA, 420 bp, Unknown
  Obtained from environmental sample
  misc_feature (1)..(420): n is a, c, g, or t
atgatcttgcggcagactgcggacgaaatcggtcctttgcgggatcttcctgtttccgaagaaactgtaaatattttaatggacgaagtccgtaatacgggcgatgttttgcgaagccgccctttcccggaagagataatgcgctacaagcaggcggtgcgtaattttatgaactatgttgtaaaaaacagttacgctttggagcacgaggaagggataccgaattttttaaggcccggtttttcaggcaaacgcggcactcccgaagcgatgaaaggaaaaatgtacaccaaaattcaggttattgataaaaaacttgaggatttggcggcaatgcttctttccggacagaaacagcagatggagttggtttcacggcttgaggaaatacgcggccttctggtagacttattgcaatag

SEQ ID NO: 62086 - protein, 139 aa, Unknown
  Obtained from environmental sample
  DOMAIN (2)...(139): Protein of unknown function (DUF327)
  misc_feature (1)..(139): Xaa is any amino acid
MILRQTADEIGPLRDLPVSEETVNILMDEVRNTGDVLRSRPFPEEIMRYKQAVRNFMNYVVKNSYALEHEEGIPNFLRPGFSGKRGTPEAMKGKMYTKIQVIDKKLEDLAAMLLSGQKQQMELVSRLEEIRGLLVDLLQ

SEQ ID NO: 62087 - DNA, 1698 bp, Unknown
  Obtained from environmental sample
  misc_feature (1)..(1698): n is a, c, g, or t
atgtcaacagatgataaaaaaataatttactccatgcacaaagtttcaaaaaagcatggaacaaaacaggttcttaaagatatcagcatctcctacttttacggcgcgaaaatcggcgttatcggtcttaatggatcgggtaaatccagtcttttaaaaatactcgccggtgtggacactgagtttgccggagatacttcaatcagtcccggattttcaatcggtttccttgaacaggagccgtaccttgaaccgggcaaaaccgttaaggaaatagtgtccgagggggctaaagagcttgtcgccctccttgcggagtttgacaaggtaagcgaagcgtttggggagcctgacgcggattacgacaaacttggcgtaaagcaggcggaattgcagaaaaaaatcgagaccgccgacggctggaatttggacagccgccttgaacttgcaatggaagcccttcgctgtcccgcgggcggtgaagttgtcgatcatctttccggcggggagaggaggcgcgtcgctctctgccgcctgctgctgcaaaagccggacattcttttgcttgatgagccgactaaccacttggacgcggaaaccgtagcctggctggagcggcacttgcgcgattacgcgggtacggtcatcgcggttacgcatgaccgctactttttggataatgtcgcgggctggatactggaacttgacaggggagagggaatcccctggaaaggcaattattccggctggcttgaacagaaagaaaaacgcatggagcaggaagagaagggagagagcgacagacgtaaaactcttcagcgagagcttgaatggatacgcatgagtcccaagggacggcacgctaagagcaaggcgcgtatcacccaatacgaaaaactatttcaggatgatgaaagggagcgttccaaaggcgcggcgcaaaataataaaatcacaattccggcgggtcctcatcttggtaaattggtaattgaggccgaaggcttgtcaaaatctttcggggaaaaactgttgttcgacaacatgagtttcacggtgccgcccggagcgtgtgtaggcattatcggacctaacggcgccggaaagactacattgttcaaattgataacgggaagcgaaaagccggacgccggagttctgcgtttgggagacagcgtaaaactcggctacgcagaccagatgcgcgccggccttgacggcgaaaaaacagtttgggaacagctttcagacgggcttgaccttatcaaacttggttcgggccagggcgcgcgtgaagtgaattcccgcgcctattgcgcttggtacaatttttcgggagcggatcagtcaaaaaaagtgggagtcctttccggcggggagcgcaaccgtttgaacctcgcgatgatgctaaaagagggagcgaatgttcttcttcttgacgagccgaccaatgatctggacgtaaacactttgcgcgcccttgaggaagcgcttgattctttcgccggtgtcagtcttgtaatcagccacgaccgctggttccttgaccgcatcgtcacgcacatcctcgcctttgaagacggcgaggtagtctggtacgacggcaactggtccgaatacgccgaatggcgcagagaaaaactgggctccgccgccgacagcccgcataggtatgtttatcgaaaattggaaaggtaa

SEQ ID NO: 62088 - protein, 565 aa, Unknown
  Obtained from environmental sample
  DOMAIN (356)...(528): ABC transporter
  misc_feature (1)..(565): Xaa is any amino acid
MSTDDKKIIYSMHKVSKKHGTKQVLKDISISYFYGAKIGVIGLNGSGKSSLLKILAGVDTEFAGDTSISPGFSIGFLEQEPYLEPGKTVKEIVSEGAKELVALLAEFDKVSEAFGEPDADYDKLGVKQAELQKKIETADGWNLDSRLELAMEALRCPAGGEVVDHLSGGERRRVALCRLLLQKPDILLLDEPTNHLDAETVAWLERHLRDYAGTVIAVTHDRYFLDNVAGWILELDRGEGIPWKGNYSGWLEQKEKRMEQEEKGESDRRKTLQRELEWIRMSPKGRHAKSKARITQYEKLFQDDERERSKGAAQNNKITIPAGPHLGKLVIEAEGLSKSFGEKLLFDNMSFTVPPGACVGIIGPNGAGKTTLFKLITGSEKPDAGVLRLGDSVKLGYADQMRAGLDGEKTVWEQLSDGLDLIKLGSGQGAREVNSRAYCAWYNFSGADQSKKVGVLSGGERNRLNLAMMLKEGANVLLLDEPTNDLDVNTLRALEEALDSFAGVSLVISHDRWFLDRIVTHILAFEDGEVVWYDGNWSEYAEWRREKLGSAADSPHRYVYRKLER

SEQ ID NO: 62089 - DNA, 672 bp, Unknown
  Obtained from environmental sample
  misc_feature (1)..(672): n is a, c, g, or t
ttgggtgatacgcgccttgctcttagcgtgccgtcccttgggactcatgcgtatccattcaagctctcgctgaagagttttacgtctgtcgctctctcccttctcttcctgctccatgcgtttttctttctgttcaagccagccggaataattgcctttccaggggattccctctcccctgtcaagttccagtatccagcccgcgacattatccaaaaagtagcggtcatgcgtaaccgcgatgaccgtacccgcgtaatcgcgcaagtgccgctccagccaggctacggtttccgcgtccaagtggttagtcggctcatcaagcaaaagaatgtccggcttttgcagcagcaggcggcagagagcgacgcgcctcctctccccgccggaaagatgatcgacaacttcaccgcccgcgggacagcgaagggcttccattgcaagttcaaggcggctgtccaaattccagccgtcggcggtctcgatttttttctgcaattccgcctgctttacgccaagtttgtcgtaatccgcgtcaggctccccaaacgcttcgcttaccttgtcaaactccgcaaggagggcgacaagctctttagccccctcggacactatttccttaacggttttgcccggttcaaggtacggctcctgttcaaggaaaccgattga

SEQ ID NO: 62090 - protein, 223 aa, Unknown
  Obtained from environmental sample
  SIGNAL (1)...(17)
  misc_feature (1)..(223): Xaa is any amino acid
MGDTRLALSVPSLGTHAYPFKLSLKSFTSVALSLLFLLHAFFFLFKPAGIIAFPGDSLSPVKFQYPARDIIQKVAVMRNRDDRTRVIAQVPLQPGYGFRVQVVSRLIKQKNVRLLQQQAAESDAPPLPAGKMIDNFTARGTAKGFHCKFKAAVQIPAVGGLDFFLQFRLLYAKFVVIRVRLPKRFAYLVKLRKEGDKLFSPLGHYFLNGFARFKVRLLFKETD

SEQ ID NO: 62091 - DNA, 480 bp, Unknown
  Obtained from environmental sample
  misc_feature (1)..(480): n is a, c, g, or t
atgaaagcgtattcaagctgcgtgggcgaggggccgttcgccgttgaaatgtccggcgatgaagccgcggctttgcgcgaggccggagccgaatacggcgcggcaaccggaaggccgcgcagggtaggcgggtttgacgtgccggcaagcaaatacggcgttcaggttcagggagccgatgaaatcgccttgaccaagctggacgtgcttgcgtacctcgataaaatacccgtctgcactgcctatgaggttgacggggtaaaaaccgactgcttcccctcaggcagcgcacttatgaaggcaaagcctgtaattgagtatttggacggtttcaagactgacatatcaaaatgccgcaaagtgaaagatttgccggacgcggcaattaaatatattaaatttattgaagacgctgtcggctgccgcattaaatacgtgtctgtcggagccgggcgcgatgactatctgaaaatgagctga

SEQ ID NO: 62092 - protein, 159 aa, Unknown
  Obtained from environmental sample
  DOMAIN (1)...(157): Adenylosuccinate synthetase
  misc_feature (1)..(159): Xaa is any amino acid
MKAYSSCVGEGPFAVEMSGDEAAALREAGAEYGAATGRPRRVGGFDVPASKYGVQVQGADEIALTKLDVLAYLDKIPVCTAYEVDGVKTDCFPSGSALMKAKPVIEYLDGFKTDISKCRKVKDLPDAAIKYIKFIEDAVGCRIKYVSVGAGRDDYLKMS

SEQ ID NO: 62093 - DNA, 489 bp, Unknown
  Obtained from environmental sample
  misc_feature (1)..(489): n is a, c, g, or t
atgacggcgagattatcattcacggcagcgcaggcgaccgcgctgggctatgccatgcggggcgggaaaatatacgtccgcgacaacgccggatacagggttggcattcacatgaaagaatacaaggaaaaaaaaccggtaatcctcattggcggcagggcgggaagtttcctgggcgaataccttgccggaggagtcattgcggttcttggcataggctgccatcatgagattcctgtctggtattttaccggaaccggaatgcatggcggaaacatattcatcagaaccgataaagagctttcttcgcttcccgcgcaggtcgttgaggatgtagctaatgatgatgatctgcaggagattgcgccgtatgtcagcgagtttacgggttattttggcatggacacccaccagcttatgaaagacagatattatgtgttaaaacccaacgcgaagaacccgtataaacagctatctacagcgaattag

SEQ ID NO: 62094 - protein, 162 aa, Unknown
  Obtained from environmental sample
  DOMAIN (1)...(131): GXGXG motif
  misc_feature (1)..(162): Xaa is any amino acid
MTARLSFTAAQATALGYAMRGGKIYVRDNAGYRVGIHMKEYKEKKPVILIGGRAGSFLGEYLAGGVIAVLGIGCHHEIPVWYFTGTGMHGGNIFIRTDKELSSLPAQVVEDVANDDDLQEIAPYVSEFTGYFGMDTHQLMKDRYYVLKPNAKNPYKQLSTAN

SEQ ID NO: 62095 - DNA, 825 bp, Unknown
  Obtained from environmental sample
  misc_feature (1)..(825): n is a, c, g, or t
atgtgcggcatttttggttatgttgcaagtcaggacgctgttcccattatagtcgagggattgaaaaaacttgaataccgcggctatgactcggccggtatcgcggtttatggacagaacgggctgggcgttgtaaagcagaagggacgcctggccgcgctggaagcgcgactggcggaaaagccgctcgccggccccatagggatcggccatacccgctgggccacgcacggggaaccctcggatgtaaactcccatcctcatgtgggaagcaggaacaaaatcgccgttgttcataacggtataatagagaactataagcaattaaaggaacgccttgagcactggggggtaaatttcgcctcacaaaccgacagcgaggtaatcgcgcagcttgcggaacattattataacggggatttgctggagacggtcatccatgtctcaaacgctttggaaggctcttatgcgttaggtgtcatgtgcgccgacgatcctgacattcttatcgccatcaaaaaagacaatccccttataatcggcgaatcggatcatgggaattttatcgcttccgacgtgcccgccgtcttaaagcatacgaacagggtttattatcttaacgacaaggagatcgccgtactgcggaaagacagcgtcgagttttttaatattgacaaagaaccgcttgaaaaacacgcggaaataataacatggaatcttgacagcgcggaaaagggcggctatccgcattttatgcttaaagaaatcatggagcagccgaaaatcctccgtgaaacgattaactcggtggtaaaatcgagataa

SEQ ID NO: 62096 - protein, 274 aa, Unknown
  Obtained from environmental sample
  DOMAIN (2)...(193): Glutamine amidotransferases class-II
  misc_feature (1)..(274): Xaa is any amino acid
MCGIFGYVASQDAVPIIVEGLKKLEYRGYDSAGIAVYGQNGLGVVKQKGRLAALEARLAEKPLAGPIGIGHTRWATHGEPSDVNSHPHVGSRNKIAVVHNGIIENYKQLKERLEHWGVNFASQTDSEVIAQLAEHYYNGDLLETVIHVSNALEGSYALGVMCADDPDILIAIKKDNPLIIGESDHGNFIASDVPAVLKHTNRVYYLNDKEIAVLRKDSVEFFNIDKEPLEKHAEIITWNLDSAEKGGYPHFMLKEIMEQPKILRETINSVVKSR

SEQ ID NO: 62097 - DNA, 765 bp, Unknown
  Obtained from environmental sample
  misc_feature (1)..(765): n is a, c, g, or t
gtggaaacggagcttgccagcgaattccggtacaaggacgccgttattgacgaaagaacgctggttattttgatcagccagtccggtgaaaccgcggatactatcgcggcaatgcgggaggcaaagcggaaaggcgccgttaccctgtcaatcgtcaatgtcatcggcagcactatcgccaaagaatccgattactgcatgtttacgacggcaggtccggagattgccgtggcgacgacaaaagccttctcggcgcagcttgtactgctgtatattctggcaatatggttcgccgccaaattgggaaagttatcgccccatgaggcacagagactaatggccgaaatagaagccctgccggataaaacggcggatttgcttaaacagatcgacgccattcaaatgtacgcttctacctgcgtcggatgcaagagcatattcttcatcggcaggaatattgattacgccatcgcgctggaaggttctctaaaactcaaagaaatttcctatattcactcagaagcctacgcgggcggtgaattgaagcatggcactatttccctggttgaacaggacacgctggttgtcgctatctccaactgtgccccgctatacggcaaaattatgagcaatgcggagcaggtgataagccgcggcgcgaaagtgttgcttatcggcaattgcccgaacgcaaaacaggacgataaactctttcatatcgctttaccggaaagccttgatttatttctccttccctgtcggtaa

SEQ ID NO: 62098 - protein, 254 aa, Unknown
  Obtained from environmental sample
  DOMAIN (1)...(99): SIS domain
  misc_feature (1)..(254): Xaa is any amino acid
METELASEFRYKDAVIDERTLVILISQSGETADTIAAMREAKRKGAVTLSIVNVIGSTIAKESDYCMFTTAGPEIAVATTKAFSAQLVLLYILAIWFAAKLGKLSPHEAQRLMAEIEALPDKTADLLKQIDAIQMYASTCVGCKSIFFIGRNIDYAIALEGSLKLKEISYIHSEAYAGGELKHGTISLVEQDTLVVAISNCAPLYGKIMSNAEQVISRGAKVLLIGNCPNAKQDDKLFHIALPESLDLFLLPCR

SEQ ID NO: 62099 - DNA, 570 bp, Unknown
  Obtained from environmental sample
  misc_feature (1)..(570): n is a, c, g, or t
atggaaagcgctttaattgtttcaaactcagaaaaagacataaacttatttaccgggtttttggaagcggcttccattcatcaggttacttcttcgcggtcatgtgacagcgcccgcaggcttattctaaaacaggattttgattttattattgtcgactcgccgcttgaggatgaatccggtgaaaatttttcccggaataccgccgccaaaggcgtatcccaggtgatcctccttgtagagagcgaatcttttgactcggcatccgccgcttgtgaggaagacggcgttttgatcatcgcaaaacctgtagataaatctcttctatggtccgcgctgtcgctggtcagatcggttcaaagcaggataaaacgggtgaggactgaaaacacgcagcttaaacaaaaaattgaggacttacgcattattgaccgcgcaaaatggatattaatatcatccatgaagatgagcgaacaggaagcgcacaggtacatagaaaaacaggcgatggatatgcgtttatcacgaagaaatatcgcggaagagatactgaagcggtatgagaattaa

SEQ ID NO: 62100 - protein, 189 aa, Unknown
  Obtained from environmental sample
  DOMAIN (2)...(114): Response regulator receiver domain
  misc_feature (1)..(189): Xaa is any amino acid
MESALIVSNSEKDINLFTGFLEAASIHQVTSSRSCDSARRLILKQDFDFIIVDSPLEDESGENFSRNTAAKGVSQVILLVESESFDSASAACEEDGVLIIAKPVDKSLLWSALSLVRSVQSRIKRVRTENTQLKQKIEDLRIIDRAKWILISSMKMSEQEAHRYIEKQAMDMRLSRRNIAEEILKRYEN

SEQ ID NO: 62101 - DNA, 888 bp, Unknown
  Obtained from environmental sample
  misc_feature (1)..(888): n is a, c, g, or t
atgctctcacacggcttttatcctgtacgcaaacattttgaaagccaaagggttttcaaaacaaaacatacacagggggttcttatgagagaacaaatcggggatgaaagcgtctttctgcggattgaggaatttaagaaagggctaatccagtttacggacagcactaacgctatgcgccttgtcaaagagcatgggcaggatatccgctacaatgccgcatggaaaaaatgggtcgtctggaacggcaagtattgggagatggacgagggcggggttttaattcacgaaaaagggcttgaaatggtgcggaatatctacgacgagcttaagaaaaccgccgattacagggaacggatggacatcgaaaaagcggcaatgatgagcgagagcgtaaggcggcggaaggcttttgtagaggcggcgacatgggtttccgctttgcgggttaaaaccgacgagcttgatcctaacccatggctccttaatgtgaagaatgggactgtcgatattagaagcggcgaattcagggagcataggcaggaggacatgattacgaaaattgccaacgtggattatgaccctgcggcggactgcccgatgtggaagaagtttgtccgtgaaatcatggactataaggcggacataataaaatttgtccagactgcggctgggtggtctttgtccggcgacatttcagagcaaacgatgtttattctatacggcactggagcgaacggcaaatccacttttttgaatacgataatgtacctattgggcgattacgctatagcaacgcctacggaaacatttatgaaaaaaacaggggataactattctaatgacgtggcgcgtctgcggggtactcgcgtttgtaactactactga

SEQ ID NO: 62102 - protein, 295 aa, Unknown
  Obtained from environmental sample
  misc_feature (1)..(295): Xaa is any amino acid
MLSHGFYPVRKHFESQRVFKTKHTQGVLMREQIGDESVFLRIEEFKKGLIQFTDSTNAMRLVKEHGQDIRYNAAWKKWVVWNGKYWEMDEGGVLIHEKGLEMVRNIYDELKKTADYRERMDIEKAAMMSESVRRRKAFVEAATWVSALRVKTDELDPNPWLLNVKNGTVDIRSGEFREHRQEDMITKIANVDYDPAADCPMWKKFVREIMDYKADIIKFVQTAAGWSLSGDISEQTMFILYGTGANGKSTFLNTIMYLLGDYAIATPTETFMKKTGDNYSNDVARLRGTRVCNYY

SEQ ID NO: 62103 - DNA, 645 bp, Unknown
  Obtained from environmental sample
  misc_feature (1)..(645): n is a, c, g, or t
atgacgtggcgcgtctgcggggtactcgcgtttgtaactactactgaagttgagcaggggcggcggctgtccgaaccgttaataaaaaagattaccggaaatgacgaaatgacggcgcggtttttgtacggggagttttttaatttcaaaccgactttcaagatttttatggctactaaccataagcctgttataaaggggactgaccacggaatttggcggcggataaagctaattccttttaatgttaggataccgcaagaaaaacaggataaacaccttgagcagaaattaaaacaggaggcaagcggcattttgaactggcttttggaagggatagcgatatggaaacaggaagaattgaggccgccgaaatctgtaatgtttgctactgacgaataccgtggggagatggacgttattggaaatttcattcaggaaaaatgtatccagaaaaaagacgaggcggtaacgttaaaacgtttgtacaaggcttactccgactggtgcgaggaaaacaacgaacacgctgtaagcgagagattttttaccctgcgtctgaaggaaatggggtttgaacaggatagaacgtctacagaaagattttgggtggggatgggattacagataacagataacaaataa

SEQ ID NO: 62104 - protein, 214 aa, Unknown
  Obtained from environmental sample
  DOMAIN (1)...(193): Poxvirus D5 protein-like
  misc_feature (1)..(214): Xaa is any amino acid
MTWRVCGVLAFVTTTEVEQGRRLSEPLIKKITGNDEMTARFLYGEFFNFKPTFKIFMATNHKPVIKGTDHGIWRRIKLIPFNVRIPQEKQDKHLEQKLKQEASGILNWLLEGIAIWKQEELRPPKSVMFATDEYRGEMDVIGNFIQEKCIQKKDEAVTLKRLYKAYSDWCEENNEHAVSERFFTLRLKEMGFEQDRTSTERFWVGMGLQITDNK

SEQ ID NO: 62105 - DNA, 858 bp, Unknown
  Obtained from environmental sample
  misc_feature (1)..(858): n is a, c, g, or t
atggacgagatcatcaagaagtcgtcctcgccctccagccagagcgagagcagggtggttacgattctgttttcagatataagaagttttacaaaaatttccgagaacacccccgccagggaacttgttgatttccttaacacgtatttctccgcgatgggagatcaaattaccggcgagggcggcaatatcgacaagttcataggcgacgcgataatggctatcttcggcgcccccaaaacgctggagaattcggcggcaagcggcgtaagggcggctatacggatggttaaatcccttgttaacgttgacacctcaagcattaccctgccggaggggggatttggcgcgggcattggccttaactgcggcgagtgcgttgtcggcaacataggctttcagaacaagatggactacacggtgataggcgacaccgtcaatctcgcctcgcggcttgagagcattaccaagtattaccatcagacgatcatcgtatcggaatatatttacagcgccgccaaagaccatttcattttccgcaaaaccgacagcgtgcgggtcaagggcaaagaccagcccgtgggcctttacacggtgtacgacgccttccgcggcgaggaaaaagaaggaacgccccccgttctcgttatagaccgggaagccctggatcaatacaacaagggccttaagctcttcgctatgcgcgaatttgaaaccgccaaacagtattttaacaaagccctttccattgaggaaaaagccggacactcggattacctggcgtccctgtatctttcccgcatcgacgatttccaggtaacccctccccgcccgactgggacgggactattancatga

SEQ ID NO: 62106 - protein, 285 aa, Unknown
  Obtained from environmental sample
  DOMAIN (221)...(254): Tetratricopeptide repeat
  misc_feature (1)..(285): Xaa is any amino acid
MDEIIKKSSSPSSQSESRVVTILFSDIRSFTKISENTPARELVDFLNTYFSAMGDQITGEGGNIDKFIGDAIMAIFGAPKTLENSAASGVRAAIRMVKSLVNVDTSSITLPEGGFGAGIGLNCGECVVGNIGFQNKMDYTVIGDTVNLASRLESITKYYHQTIIVSEYIYSAAKDHFIFRKTDSVRVKGKDQPVGLYTVYDAFRGEEKEGTPPVLVIDREALDQYNKGLKLFAMREFETAKQYFNKALSIEEKAGHSDYLASLYLSRIDDFQVTPPRPTGTGLLX

SEQ ID NO: 62107 - DNA, 840 bp, Unknown
  Obtained from environmental sample
  misc_feature (1)..(840): n is a, c, g, or t
gtggaaatgcagttgtttaagggtttcgagtccgcgcgatttcttaaatcccgtcccgctgtccggaacataccgattattatgtttaccaatcccggagaaacaagggataaattctgggggcagcaggccggagctgatatctacattgaaaagacctccgaaaattttgaatatctttccagacagatacggcagttgttagacgaaagccgtccggttgattacgaacggattaagaaggaaggcgagaagataaccgataattccattgttgaaatggtaaacaacctttttgataacaagttgttccaggcgacgcttacctcgctgcttgccgaattatcgagcaaggtcagctcccttgaagaaaccgttaaaggcgtcttcgcgctcttaaaaaacgcctgccggtcggagatgtgttccataatgataaaggacgcggacgacgcccttgtggtatacaacgccaacaacgcggggtatacggaggcgattgcggaagattttaaagccatcaccatcgccgattttaacacccgcttttccgattataaggttgactccaaagaggtacatgattttttcccagcgggggagaaaaatgaaagaatcgaatcctatattctgatcccgcttacaagctcgggcgaggaattcgcgacggttcatatcggcacttccgttaaagaatatttttctccccttattctggagaatattaacgcgtttctttccgcggcgagtccgataatagcgaacgccctgcatctgaagcagatggaaaaccctgcaaaagaaaacaggggccgccttttgcccgctatgttcccatag

SEQ ID NO: 62108 - protein, 279 aa, Unknown
  Obtained from environmental sample
  misc_feature (1)..(279): Xaa is any amino acid
MEMQLFKGFESARFLKSRPAVRNIPIIMFTNPGETRDKFWGQQAGADIYIEKTSENFEYLSRQIRQLLDESRPVDYERIKKEGEKITDNSIVEMVNNLFDNKLFQATLTSLLAELSSKVSSLEETVKGVFALLKNACRSEMCSIMIKDADDALVVYNANNAGYTEAIAEDFKAITIADFNTRFSDYKVDSKEVHDFFPAGEKNERIESYILIPLTSSGEEFATVHIGTSVKEYFSPLILENINAFLSAASPIIANALHLKQMENPAKENRGRLLPAMFP

SEQ ID NO: 62109 - DNA, 615 bp, Unknown
  Obtained from environmental sample
  misc_feature (1)..(615): n is a, c, g, or t
atgaggtctgctaatccgattgagtacccggagtacgaagaaaaagtaaacgaattaatcaaaaaatgcgaaacaggcgaagctgtcgttacagggcgctgtacgattaaaggttttccagccgtaatcggcattatggacagccgttttatgatggcaagcatgggcagcgttgtcggagagaaaattacaagagccattgagtacgccaccgcgaacaaactgcccgcgattattttttccgcgtcgggcggggcgcgtatgcaggaggggattatctcccttatgcagatggcaaaaacttcaggcgctgtagcgaaacatacgaacgccggccagctttacatttccgtaatcacagacccgacgacgggaggcgttaccgcttccttcgcaatgcttggggatataatcctcgcggagccgggcgttacgcttgggtttgccggtaagcgcgtaattcaggataccataggcgcggtattgcccgaccgtttccagacttccgagtttgttcacgaacacgggtttgtagacgccgtttatcaccgccgcgatttgccggacatgatagcgaaaattatcgccctgcacggctataaaggaggacaatga

SEQ ID NO: 62110 - protein, 204 aa, Unknown
  Obtained from environmental sample
  misc_feature (1)..(204): Xaa is any amino acid
MRSANPIEYPEYEEKVNELIKKCETGEAVVTGRCTIKGFPAVIGIMDSRFMMASMGSVVGEKITRAIEYATANKLPAIIFSASGGARMQEGIISLMQMAKTSGAVAKHTNAGQLYISVITDPTTGGVTASFAMLGDIILAEPGVTLGFAGKRVIQDTIGAVLPDRFQTSEFVHEHGFVDAVYHRRDLPDMIAKIIALHGYKGGQ

SEQ ID NO: 62111 - DNA, 810 bp, Unknown
  Obtained from environmental sample
  misc_feature (1)..(810): n is a, c, g, or t
atgatggctttgaacatgcagcaaaaactggaccttttaaaaaacctcgggcggcctacaatacgcgattacattcctcttgttttcaaggattttattgaactgcacggcgaccgctatttcagcgacgacccggcgctcttaggcggcatctgtctgttaaacggcatacccgtaacggttgtttcacaggtgcgcgcgaaagatatcgccgaattgcaaaggatcaacttttccatgcctcatcccgaaggataccgcaaagcattacgcctcgcgaagcaggctgaaaaattccgccgcccagtcatctgctttatcgacactcccggcgcttactgcggagtcggcgcggaagagcgcggccaaggggaggcgattgcgcataaccttcatgattttatgatgttaaaaacaccggtaatttccgttgttcttggagaaggcggctcaggaggggcgcttgccctcggcgtatgcgacgagcttgccatgctggaaaacgccctctattcggttatttcgcccaaaggcttcgcttctatattatggaaagacggttccagggaaagggaagccgccgagatgataaagatcaccgcggaagaccttaaatctttcggcatctgcgacgccatcatcgccgaacctgaaggcggcgcgtccaaggatgtaaaccttaccgcgacgaatattgccgcgtgggttaagcctacgctggatcgcctgtctaaagaaaaccttgacaacttgccggaaaaacggtatcagaagtacaggaagtttggagtttttcaagagaagaaataa

SEQ ID NO: 62112 - protein, 269 aa, Unknown
  Obtained from environmental sample
  DOMAIN (2)...(97): Acetyl co-enzyme A carboxylase carboxyltransferase alpha subunit
  misc_feature (1)..(269): Xaa is any amino acid
MMALNMQQKLDLLKNLGRPTIRDYIPLVFKDFIELHGDRYFSDDPALLGGICLLNGIPVTVVSQVRAKDIAELQRINFSMPHPEGYRKALRLAKQAEKFRRPVICFIDTPGAYCGVGAEERGQGEAIAHNLHDFMMLKTPVISVVLGEGGSGGALALGVCDELAMLENALYSVISPKGFASILWKDGSREREAAEMIKITAEDLKSFGICDAIIAEPEGGASKDVNLTATNIAAWVKPTLDRLSKENLDNLPEKRYQKYRKFGVFQEKK

SEQ ID NO: 62113 - DNA, 693 bp, Unknown
  Obtained from environmental sample
  misc_feature (1)..(693): n is a, c, g, or t
atgggcgacgcccagatgggggctcaggcgcgactgatgagccaggccctccgcaagctgaccgccaccataggcaagtcgcgtaccatcctgatcttcataaaccagatccgcatgaaaatcggcgttttcatgggaaacccagaaacaacgacaggcggcaacgccctgaaattttattcttccgtgcgccttgaagtgcgcaagaccgagaccatcgaagtatcaaaagacacggacgccatcggcaaccgcgtgagggttaaagttgtcaaaaataaagtagccccgccgttcaggcgcaccgagcttgaactgattttcggcaaggggatttcatactacggaagccttcttgacgcggcggtcaagtacaattttatcgaaaaaaaaggcgcgtggtactcttacggagaggaaaaagtggggcagggcagggacaatgcccgcgactaccttgaacagcacccggatttcgccgttgaactggaggtaaaactgcgcaagcagatcttccccggcagggagtttcaggtggcaaaaccgccttcagccgcgaaatcggcggctaaacctgatgcgaaaccgcaaaaccccgcgccggcagctccggccgcgccaccccagcaaggccccggccgcccgcgcaagcttgcctccggcggcaccctgtcggacgaagcattattctaa

SEQ ID NO: 62114 - protein, 230 aa, Unknown
  Obtained from environmental sample
  DOMAIN (1)...(173): recA bacterial DNA recombination protein
  misc_feature (1)..(230): Xaa is any amino acid
MGDAQMGAQARLMSQALRKLTATIGKSRTILIFINQIRMKIGVFMGNPETTTGGNALKFYSSVRLEVRKTETIEVSKDTDAIGNRVRVKVVKNKVAPPFRRTELELIFGKGISYYGSLLDAAVKYNFIEKKGAWYSYGEEKVGQGRDNARDYLEQHPDFAVELEVKLRKQIFPGREFQVAKPPSAAKSAAKPDAKPQNPAPAAPAAPPQQGPGRPRKLASGGTLSDEALF

SEQ ID NO: 62115 - DNA, 1308 bp, Unknown
  Obtained from environmental sample
  misc_feature (1)..(1308): n is a, c, g, or t
atggacgaactgctaaaggctattaaaacaaaaatagccgagatgaagaaaatcgagttgactggcttcactaataccgaaacggcaacggcgtattttcaggaaaaggaattgatacttgagggaattgtaaaaacccttgagactgtcacggttcaggaaacaagcgaggtcgaagcccttaaaagcacggtcaagtcgctgcgggaagaaatcaaggggcaagagaaaagcccaagagagctttcaaggcgtgagcttctttatagcctgggcaaagggattgcggcggcatggtcgggcaatcacaaggttttggcagatctggcgttttcacccaatatgaaaagcgataactggactaaccctaaagatgtttcatggagcgaaaaaggctggacagtttcaaaggccgctttgggcgatccgatggggaatatgtcgcccaataacgaacagtatttgataaaccccatctatgaaacggaaataatgacagaggccgctaaaaaatctgtaatgatgaaccttgtccggcatcgcccgatgatggggccgtctatcttccttcccacaagagaccggggcggggttcagcttaactggttgactgcttacggccaaaaaatcgaggggagcaagccgaagggggctgagcgtgtagagctaaaagcctatacattggcggggtacattccgtggttcgatgaatttgaagaggacgtttttgtcgatttgggggctatgttcgtggatgaatttcttgaaacctacgggcaggaatttgacaggcaatgcctgttggccgacaacgatccgttcacaggggctatgaagtgtgccgatgttactgaggtaacaatcaagggaaacaccatagaggatttgacttggaaggatttccgagatgccgtctacaaggttccggcagaggaaaggaaagactgcgcgtggttcatcaatgaaacaatcctaaaccatgtagccaatatcgaggacaccacaggccgaccgatttggcggcggccgacggaggctatgccggggcggttggacttgtacccatatcacgaggtttccatccttccgcagattgcggacatcgaggaagaccaggcgtttgcgatatttatgaatccgaagcggatacagcacggaaacaggcggggcatcgagcttaaaaagtttgacgccactactgaaagccttgaatatggggaattgtttttgcgtttccgcaagcgtgatggctttctcgttacaaggccgaaagggaatatggtcattctcaaaactaaagcgtcttaa

SEQ ID NO: 62116 - protein, 435 aa, Unknown
  Obtained from environmental sample
  DOMAIN (152)...(432): Phage capsid family
  misc_feature (1)..(435): Xaa is any amino acid
MDELLKAIKTKIAEMKKIELTGFTNTETATAYFQEKELILEGIVKTLETVTVQETSEVEALKSTVKSLREEIKGQEKSPRELSRRELLYSLGKGIAAAWSGNHKVLADLAFSPNMKSDNWTNPKDVSWSEKGWTVSKAALGDPMGNMSPNNEQYLINPIYETEIMTEAAKKSVMMNLVRHRPMMGPSIFLPTRDRGGVQLNWLTAYGQKIEGSKPKGAERVELKAYTLAGYIPWFDEFEEDVFVDLGAMFVDEFLETYGQEFDRQCLLADNDPFTGAMKCADVTEVTIKGNTIEDLTWKDFRDAVYKVPAEERKDCAWFINETILNHVANIEDTTGRPIWRRPTEAMPGRLDLYPYHEVSILPQIADIEEDQAFAIFMNPKRIQHGNRRGIELKKFDATTESLEYGELFLRFRKRDGFLVTRPKGNMVILKTKAS

SEQ ID NO: 62117 - DNA, 612 bp, Unknown
  Obtained from environmental sample
  misc_feature (1)..(612): n is a, c, g, or t
ttgactttaggaagtttatttgacggcattggcgggtttccgcttgccgctgtaaagcaaggaatattgccagtgtgggcaagcgaaattgaggctgcccctatcagcattactaaacggcattttccagccatgcggcatttgggagacatcaagaaaataaacggcggggaaatcgagccggtggacataatcacattcggttcgccttgccaagatttaagcatatcaggccgccgggcggggctggatggggagcgttcagggctgtttttacaggcggtgcgcgtcataaaggaaatgagggttgcaacaaaaaacacctgtccagcaagaattatttgggaaaatgtgcctggagcctttagtgcaaataagggaagggactttcaaacggtcattcaggaaattgcggggattgccgagcagggagtttcattcctagaccttcggcaaaaatcggctggctggctgctggggcggtcatgggagatagctggtcgctggcctggcgggtcatggatgcctcatactggggcttgccccagcgtcnccgccgcatctaccttgtcgcagattttacaggaaaatgtgccggcgaaatacttttaa

SEQ ID NO: 62118 - protein, 203 aa, Unknown
  Obtained from environmental sample
  DOMAIN (1)...(200): C-5 cytosine-specific DNA methylase
  misc_feature (1)..(203): Xaa is any amino acid
MTLGSLFDGIGGFPLAAVKQGILPVWASEIEAAPISITKRHFPAMRHLGDIKKINGGEIEPVDIITFGSPCQDLSISGRRAGLDGERSGLFLQAVRVIKEMRVATKNTCPARIIWENVPGAFSANKGRDFQTVIQEIAGIAEQGVSFLDLRQKSAGWLLGRSWEIAGRWPGGSWMPHTGACPSVXAASTLSQILQENVPAKYF

SEQ ID NO: 62119 - DNA, 612 bp, Unknown
  Obtained from environmental sample
  misc_feature (1)..(612): n is a, c, g, or t
atgggagatagctggtcgctggcctggcgggtcatggatgcctcatactggggcttgccccagcgtcnccgccgcatctaccttgtcgcagattttacaggaaaatgtgccggcgaaatacttttaagcccggaatgcgatacaagggataatagaaagggcgaaaacgcaaggggtagaattgccggaaatactgaaagcggcgataaagaatatgttatagatattggttattcatcggacaggattcagataaaccctcaattatctgtaacattaaaggctaacggcggcggtaatggttcaaaaacagggttgtattatcttcctgtaaataaccatgatactgtcggctgtttgtgcgctagggacagtaagggcgttggcaatcaatatgtcaaagaaaataaatgtatttgtaatgataaatatgaaatccgaagattaacgcctctggaatgtgaacgcttgcaaggctatccggactattggacggaatacggacatgacgggaaaaggatttctgataatcagcggtataaggcgcttgggaatagcgtggctattccatgcgtggagttcatattgagacaaatagcaatgagcaagtag

SEQ ID NO: 62120 - protein, 203 aa, Unknown
  Obtained from environmental sample
  misc_feature (1)..(203): Xaa is any amino acid
MGDSWSLAWRVMDASYWGLPQRXRRIYLVADFTGKCAGEILLSPECDTRDNRKGENARGRIAGNTESGDKEYVIDIGYSSDRIQINPQLSVTLKANGGGNGSKTGLYYLPVNNHDTVGCLCARDSKGVGNQYVKENKCICNDKYEIRRLTPLECERLQGYPDYWTEYGHDGKRISDNQRYKALGNSVAIPCVEFILRQIAMSK

SEQ ID NO: 62121 - DNA, 663 bp, Unknown
  Obtained from environmental sample
  misc_feature (1)..(663): n is a, c, g, or t
ttggtaatcctcatagagcaccagtcaagcataaacgaaaatatgcccttgcgtttcctaatatacatatcaaaagtatatgaaaagataatagaccccaaaagcatttataagcattatttgatgaaaatcccccgaccagagttcatagttctctacaacggcacggacaaatacccaaaagaaaaaacattgaaactatccgatgcttttgaggaactaggcataaaaaaagccccagagttggaattatccgtaagggtgctaaacattaacaagggtcacaacccaaagctggaacgtagaagcaagaacttagctggttattcgttttttgtggcaaaggttagggaatttcagtccattggcaatccattaaaacaagcaatagaaaaggcagtccgtcattgcatagataaaggtatattgcgagattatttgagaaaaaattcatcggaggtcgttaatatgtttagcgtagagttcaatttgaaagatgccatcgccgtagccagagaggaaggcgaagagagaggcatagagaaaggcgaagccaggggcgaaaaaaaaggcattaaaaagttgcttgcccttttggaaaagggtattcctttggcggaagccaaacgaaggcttggggttaatagaaaatttgccacctaa

SEQ ID NO: 62122 - protein, 220 aa, Unknown
  Obtained from environmental sample
  misc_feature (1)..(220): Xaa is any amino acid
MVILIEHQSSINENMPLRFLIYISKVYEKIIDPKSIYKHYLMKIPRPEFIVLYNGTDKYPKEKTLKLSDAFEELGIKKAPELELSVRVLNINKGHNPKLERRSKNLAGYSFFVAKVREFQSIGNPLKQAIEKAVRHCIDKGILRDYLRKNSSEVVNMFSVEFNLKDAIAVAREEGEERGIEKGEARGEKKGIKKLLALLEKGIPLAEAKRRLGVNRKFAT

SEQ ID NO: 62123 - DNA, 966 bp, Unknown
  Obtained from environmental sample
  misc_feature (1)..(966): n is a, c, g, or t
gtgcttagatttttaattctatctatacttcttctcgccgcatttctcttgaccgtgtttcacggttcagcagagatagcggcttttgatgtaataaaaatcctctttggttccgcagatacaagctctgcccagtggcgtattgtttgggattttcgcctgccccgtgcattagcggcaactcttgccggagcctcgctctctttgagcgggcttttattgcagagcatttttagaaacccgcttgcaggtccttttgtgctcggcataagttctggtgcatcacttggagttgcgttttttttgctcgcgggttttgggctaggctcgctgggtttgctctctgcggctgctttgggagctatggcagttctcgcttttatagccacattctcaaaatttatccccggcaaaacaagtcttttggtgcttggtttaatggcaggttattttgcagatgccattgtttcaattttaatacacggcacacattcagaagccttgcgaggttttatctcttggggttttggttcttttggcaggttgcgttgggaagagttgccgtatttcgcaggctgcgttttgcttgggcttgcgttgtctgttttttgcgtgaagtatttgaacgcgatagctcttggcgatgacggtgcaaaaagtttgggtataaatgttaagcaaaagcgactgctttcgcttttggcagcagcggtgttagctgcaaccgccacttcgttttgcggtccgataggctttataggaatggcaactccgcatttggcgaggggatttttcaatagcgataatcagagaattttaattcccgcttcgcttttgacaggtgctttgcttgcgcttgcggcagggcttttgtcgcaggggttgtggggaattccgccgcttccgttaaatgcggtggctagtttgatgggcgcgcctgtggtgatttgggtgttggtgaggtaa

SEQ ID NO: 62124 - protein, 321 aa, Unknown
  Obtained from environmental sample
  SIGNAL (1)...(24)
  DOMAIN (10)...(321): FecCD transport family
  misc_feature (1)..(321): Xaa is any amino acid
MLRFLILSILLLAAFLLTVFHGSAEIAAFDVIKILFGSADTSSAQWRIVWDFRLPRALAATLAGASLSLSGLLLQSIFRNPLAGPFVLGISSGASLGVAFFLLAGFGLGSLGLLSAAALGAMAVLAFIATFSKFIPGKTSLLVLGLMAGYFADAIVSILIHGTHSEALRGFISWGFGSFGRLRWEELPYFAGCVLLGLALSVFCVKYLNAIALGDDGAKSLGINVKQKRLLSLLAAAVLAATATSFCGPIGFIGMATPHLARGFFNSDNQRILIPASLLTGALLALAAGLLSQGLWGIPPLPLNAVASLMGAPVVIWVLVR

SEQ ID NO: 62125 - DNA, 1644 bp, Unknown
  Obtained from environmental sample
  misc_feature (1)..(1644): n is a, c, g, or t
atgatagcaaaagaataccccgccttatccgatcccgccaatcttatcaggctggggaatgaaggttcacaagattactggaaccttacctattccatggatgaaattgccaaaatttttgatatcgcctacatttattatgtcaggcggagcggggacacttttgaattcgtgctttcttccgaatatacccccgatatgagccttgacgaagtgttctcaaaatacgaacggcatgacattccgcagcagatgaatgacgcatataagacaggaactctgcgaataagccccgccccttttactaacgtatggggcacttttgtatcggcatatatccccataatgagcaacggtacaatagcaggcatattgggggccgattatgaaatctccaaaatcaagcgttttgaattagaggctcaaatatcgttgatagtttcggttattatcgccgctgtgatggcgtttttgctttccatgtccctcatcaaaccggttgtcaggcttttcggcgtattaaaagcaattgcctcaggagaccttacccaacgcattgaagcaaaaggtaaagacgaaattgccacaatgactaaactcttaaaagaaacacaagaaggcataaaaaaccttattataattatcaaaaatcaatcgggaacgctgtccgacatcggcgataatcttgccgccaacatgaccgaaaccgccgccgcagtaaaccaaattaccgccaacattcagagcatcaaaatccgtgtcatcaaccagagcgcaagcgtaagcgaaacacacgccactatggaacaggttgtaaacaacatcaacaaactaaactgccatgttgagaatcaaagcaacaacatatcccagacgtcgtccgcaattgaacaaatggctgctaatattaattcagttacagcaacccttgtaaaaaacgccgaaaatgtaaagtcgttaaaaggcgcttcggaaataggccgcgccggattgcgtgatgtcgcctcggacatacaagaaatagcccgcgaatccgaagggcttatggaaattaattcggtaatgcaaaatatagccagccagacaaatttactttcgatgaacgccgcgatagaggcggctcacgccggagacgcgggaaggggttttgccgttgtcgccgaagaaatccgcaaactggcggaaagttccggcgaacagtccaagatcataggaggagtgcttaagaagataaaagaatcgatagatactataacaaagtcaacagataacgttcttaataaatttgaagctattgattcaagcataaatactgtagcccgtcaggaagaaaacatccgaagcgcgatggaagagcagaacgagggcagcaatcttcttttgaaaaacacaggcggtttgaacgagatcacccttcaggtaaagagaggttcccatgaaatgcttgaaggcgcaaaagaagttatacaggaaagcaacaatctggaaaaattatcgcaggaaatttcaggcggcatgaacgaaatggcgacaggcgcgggtcaaattaatgtggcggtaaaccacgttaacgaaataagcgcgaaaaaccgcgagggtatagagtctttgattaaggaagtttcaaggttcaaagtggagtaa

SEQ ID NO: 62126 - protein, 547 aa, Unknown
  Obtained from environmental sample
  DOMAIN (141)...(210): HAMP domain
  misc_feature (1)..(547): Xaa is any amino acid
MIAKEYPALSDPANLIRLGNEGSQDYWNLTYSMDEIAKIFDIAYIYYVRRSGDTFEFVLSSEYTPDMSLDEVFSKYERHDIPQQMNDAYKTGTLRISPAPFTNVWGTFVSAYIPIMSNGTIAGILGADYEISKIKRFELEAQISLIVSVIIAAVMAFLLSMSLIKPVVRLFGVLKAIASGDLTQRIEAKGKDEIATMTKLLKETQEGIKNLIIIIKNQSGTLSDIGDNLAANMTETAAAVNQITANIQSIKIRVINQSASVSETHATMEQVVNNINKLNCHVENQSNNISQTSSAIEQMAANINSVTATLVKNAENVKSLKGASEIGRAGLRDVASDIQEIARESEGLMEINSVMQNIASQTNLLSMNAAIEAAHAGDAGRGFAVVAEEIRKLAESSGEQSKIIGGVLKKIKESIDTITKSTDNVLNKFEAIDSSINTVARQEENIRSAMEEQNEGSNLLLKNTGGLNEITLQVKRGSHEMLEGAKEVIQESNNLEKLSQEISGGMNEMATGAGQINVAVNHVNEISAKNREGIESLIKEVSRFKVE

SEQ ID NO: 62127 - DNA, 501 bp, Unknown
  Obtained from environmental sample
  misc_feature (1)..(501): n is a, c, g, or t
atgccccgcgacggaaagaatatggatatcagcggtttttcaaaactcggcatggccgcctgtgttgttgaagtttccattgaccttgtagaatgtatcccaaaaatcaggggggtatggcttggaattgacggcgggaaaattatttcggaaaacagggcaagaagaaacattacccggggagcaacacaggcattaggctgggcgtttgcggaaaatatcgaatattcagaaggaatgctacctaaaaacaaatatgataaatttgtcatttcatcctatgtcgatattcccgtattaaatattgattttctgcccacagaaagtcaggaaccaaagggaattggggaactgccgtttacctgcatacccgcagcttttttacaggctgtctctcaagcaatggatcactgttataaaactatacctctaagaagaaaagaaatttgggaaatagcgcggcttaaaaacagcgatacgcaaatacaggggcagaaatga

SEQ ID NO: 62128 - protein, 166 aa, Unknown
  Obtained from environmental sample
  misc_feature (1)..(166): Xaa is any amino acid
MPRDGKNMDISGFSKLGMAACVVEVSIDLVECIPKIRGVWLGIDGGKIISENRARRNITRGATQALGWAFAENIEYSEGMLPKNKYDKFVISSYVDIPVLNIDFLPTESQEPKGIGELPFTCIPAAFLQAVSQAMDHCYKTIPLRRKEIWEIARLKNSDTQIQGQK

SEQ ID NO: 62129 - DNA, 762 bp, Unknown
  Obtained from environmental sample
  misc_feature (1)..(762): n is a, c, g, or t
gtgaagtcggttgggttcgtcttctccacgaaagttgatttgagcaacctatcgcggctcatcagcgttgagacgtgcccgcttccgggggttgacggcaagggttgccggacggtcaggcagagcgagtacaatgttcgggaggacatcctcggggcgaaatcggttgcttatagagtgatgttcaacgagattatcggttacgggcaacgagtaaaagttacgcttaaatttgcggataaggcggagtttaaaggggcgcaagagacttatattattgaaacgaagccggaattcatggtggagagagcgggagtgttcgggcagatgtacaccctcaacgcgaacggtgtggtctacgacgcgcgtcaggcggtgaaagttgacggcgacaggcagtttgcgctggagttttcggcggaaccgtccgatccggggatttcggttatgcggagcatggtgagcgtatcgcccacgccgcctaggttcttgtacgccataaacggtaacaaaatattaatcaaccttgggatggagccggagaaactctacaaagtggtgttgaacccgtctaagatcacagaccgcgccggacgcgttcttacgaacaaaaagccgagttcgttttacgtgtatttgcccaaggtcaggcctaacgccaaatgggatcgcgggttcgggatagtggagcggctcggcccgcagcaatttccgataacggcctccggcgtttcgagtctggatttcagggtgcacagatag

SEQ ID NO: 62130 - protein, 253 aa, Unknown
  Obtained from environmental sample
  misc_feature (1)..(253): Xaa is any amino acid
MKSVGFVFSTKVDLSNLSRLISVETCPLPGVDGKGCRTVRQSEYNVREDILGAKSVAYRVMFNEIIGYGQRVKVTLKFADKAEFKGAQETYIIETKPEFMVERAGVFGQMYTLNANGVVYDARQAVKVDGDRQFALEFSAEPSDPGISVMRSMVSVSPTPPRFLYAINGNKILINLGMEPEKLYKVVLNPSKITDRAGRVLTNKKPSSFYVYLPKVRPNAKWDRGFGIVERLGPQQFPITASGVSSLDFRVHR

SEQ ID NO: 62131 - DNA, 1938 bp, Unknown
  Obtained from environmental sample
  misc_feature (1)..(1938): n is a, c, g, or t
atgggatcgcgggttcgggatagtggagcggctcggcccgcagcaatttccgataacggcctccggcgtttcgagtctggatttcagggtgcacagatagatccgttgcacacggcgttcggcgatttcccctcctcgcagatcgaagtgagcgaaacttccatgccaccggggccgggcgaggagcctccctctatggattcaaaatacggcgagagcacgcgctggaattacccgtcttacgttcagaagcacataagaatgctcggcagcccgcattactccggaattgtggatcttgacaaagggggaatgggcaagattaacagcgtagacctgaagccgatgttcgccgccgtcagcggcaaggacaaggcggggacgtatttggtgggctttaggctgcttgacggggcacagaagcgctactacgcgaaggtaaccgtaacggatttgtgcctcagcgctgttgagtctaagtcgaagggcaacaaagtgatgtttgccgtcacgagctattcgagcgacaagccggtcgccgacgcgtctataaagatagacggcctgatcaatgacgagatggtgacgcttgctcagggcaagaccggatcggacggatttttctcgttcgagcacaccaaggccactatggaaaaactgaacagctcgacggtgaggagagttgtggtctccaagggggacgacgtattggttatcaataccgaaaacgacagaagcggcacggtgaacgtcttttcggacaaccactggagcaaaaacgacgaanggtggcttaattggccgagcagcggcacggtgtttaaggcggagaaaccggcggtgcgcgggttcgtgcgcgccgagcgtcccatataccgcccggaggacagcgtcttcataaaggggtatgtgagggagctgctctacggcgcaatcaatctgcccgctgaaaagaacgcttacaccattaaggttagcaacccgtcgtctacttactttgagcggaaggttacgctgaatgagttcggcgcttttcacgtgaaggtcgcgccgcctaccggcgacaacgtgcccacgggaacctacgatgtatcgctttataagactgtcagaggcgagagcgaaagacggattgccggcacggatttcttggttgacgcctaccgtattccgcgtttcgaggttagggtcagcggcgccgaccgcgttcccaacgacgggccggcgctggtgcgggccacgggcacatactacgcgggcggacgcctcgtggacagggacgtcgcgtggaaggtgacggcgtacccctacgaccacacgccgcgcgggtttgccaactacattctgtcgagcgacagccgctacggcgcctcgcaggaacccgctcggcagagcgtatcggaggagagcgggaaaacggacggaaacggcacagccgtcctaacgcttaacccgcaggcggcgacggcggggaacccgacgaagtacgtggtggaggcgacgatcaccgacgccgatatgcagacggtgtcggcgcggcacacggttatcgcgctgccgccgtttatcctcggcgtacgcgccaataggcacataacgagcgggaacacgatatccgcccgcgtcgccgccatcggcgtcaacgactcattaatcgccgggcagaaggtaacagtggagttgaaacgggtcacgtgggcctcttacctgatagactcggatttctcatccggcaagccgaagtacataaccaacgagacggttgacttggtcgaggagaggtcggtggttacggaggcgaacccgacggcgatcgagttcaagaatcaaaagccgggcgtgtacgtattggcgttgtcgtcgcgcgacaggcttgggcggttgcagacggtcaagatcgacctatacctcgccggcggcgagcagcagcaggcgtga

SEQ ID NO: 62132 - protein, 645 aa, Unknown
  Obtained from environmental sample
  DOMAIN (149)...(454): Alpha-2-macroglobulin family N-terminal region
  misc_feature (1)..(645): Xaa is any amino acid
MGSRVRDSGAARPAAISDNGLRRFESGFQGAQIDPLHTAFGDFPSSQIEVSETSMPPGPGEEPPSMDSKYGESTRWNYPSYVQKHIRMLGSPHYSGIVDLDKGGMGKINSVDLKPMFAAVSGKDKAGTYLVGFRLLDGAQKRYYAKVTVTDLCLSAVESKSKGNKVMFAVTSYSSDKPVADASIKIDGLINDEMVTLAQGKTGSDGFFSFEHTKATMEKLNSSTVRRVVVSKGDDVLVINTENDRSGTVNVFSDNHWSKNDEXWLNWPSSGTVFKAEKPAVRGFVRAERPIYRPEDSVFIKGYVRELLYGAINLPAEKNAYTIKVSNPSSTYFERKVTLNEFGAFHVKVAPPTGDNVPTGTYDVSLYKTVRGESERRIAGTDFLVDAYRIPRFEVRVSGADRVPNDGPALVRATGTYYAGGRLVDRDVAWKVTAYPYDHTPRGFANYILSSDSRYGASQEPARQSVSEESGKTDGNGTAVLTLNPQAATAGNPTKYVVEATITDADMQTVSARHTVIALPPFILGVRANRHITSGNTISARVAAIGVNDSLIAGQKVTVELKRVTWASYLIDSDFSSGKPKYITNETVDLVEERSVVTEANPTAIEFKNQKPGVYVLALSSRDRLGRLQTVKIDLYLAGGEQQQA

SEQ ID NO: 62133 - DNA, 1083 bp, Unknown
  Obtained from environmental sample
  misc_feature (1)..(1083): n is a, c, g, or t
atgaacgactacaccaaccgtgacaagaacaactatggtgataccgatgtaggtaaaaccgctctgccaaaattcattgaaaaactggaagtttgccgagcattattccacggttttgattattcagtgtttatgacaactgacagcgatcttgttcgtgcgaaaaccatcacgggtggtgtaaacttcctgtcgagtatagaaaaaccaaaacttggcgctgttaagaaaaattatgatgaacattattcaatggcagccgagtttgcaaataaataccctgaaccacctagcaataaagatttatttatcaaagaatctatgcttcttcggcaagcattatcactctgccgttcactgcttacagaggaacagcgatttgaagcagcatattttgaagcagtacgcaccattcttactcgtattacaggagacggcaaacttctgtcgccgaaagaaataaatgatcgtatcaatgaattattgaaagcaagtattcaaagtaaaggtgtaatcaacttattcgcaaatgaagaattctctctatttgctccaaagttccttgatgaaatttccaaaatgaaagaacgtaatatcgcagtcgagattttaagaaaactacttgccgaacaagtatctctatatcgccgtacaaaccttgttaaatcagagaaattttccgaaatgctttcaaattcaatgaagaggtatataaacggattaatttccaatgaacaagtcatcgccgaattgctaaaaatggcaaaagatatggcaaatgcccacgctgagggcaatgcgatgggcttaaatgatgaggaattagcgttctatgacgcgctgactcaccctgaagccgttaaagacttttataaaaacgagcaacttgtggcgatgactcatgaactaacagatttgctccgcaaaaaccgcactattgattggcaaaaaagagaatcctcccgtgccggtatgcggcgtatggtcaaaaaattgttaaaaaaatacgagtatccgccggaaggcatggaagacgcaattgccactgttgttgggcagtgtgaaatgtgggcggataattaa

SEQ ID NO: 62134 - protein, 360 aa, Unknown
  Obtained from environmental sample
  misc_feature (1)..(360): Xaa is any amino acid
MNDYTNRDKNNYGDTDVGKTALPKFIEKLEVCRALFHGFDYSVFMTTDSDLVRAKTITGGVNFLSSIEKPKLGAVKKNYDEHYSMAAEFANKYPEPPSNKDLFIKESMLLRQALSLCRSLLTEEQRFEAAYFEAVRTILTRITGDGKLLSPKEINDRINELLKASIQSKGVINLFANEEFSLFAPKFLDEISKMKERNIAVEILRKLLAEQVSLYRRTNLVKSEKFSEMLSNSMKRYINGLISNEQVIAELLKMAKDMANAHAEGNAMGLNDEELAFYDALTHPEAVKDFYKNEQLVAMTHELTDLLRKNRTIDWQKRESSRAGMRRMVKKLLKKYEYPPEGMEDAIATVVGQCEMWADN

SEQ ID NO: 62135 - DNA, 774 bp, Unknown
  Obtained from environmental sample
  misc_feature (1)..(774): n is a, c, g, or t
ttggtgcttcgtgaaagcctgcccaacgcgacctacatagggttcacaggtacgccaatttcaagcaaagaccgatccaccattgaggttttcggaaattatattgacatctacgatataactcaggctgtagaagacggcgcaacccgtcctgtgtattatgagagccgcgttatccatttgaaactggacgaagacattctgcggctcattgacgccgagtacgacattatggcgcagaacgccgagccttatgcaatcgaaaaaagtaaaaaagaactaagccggatggaatctatcctcggcgcggaagagactatcaccgctttatgtgaagacatcatcaagcattatgaggaaaaccgccagcacgaattgacaggcaaggcaatgattgtcgcctattcccgccccatcgcgataaaaatttatcgtaaactgctgcaaatgcgtcctgggtggacagaaaaaatcggagcggttatgacttccgccaataacgaccctgaagattggcaaaaaataattggtaacaaacatcataaaaatgaaatggcaaaaaaattcaaggacgatagttcgccattaaaaattgcgattgtggtggatatgtggctgacaggctttgatgtgccgtctctttccacaatgtatgtttataaacctatgcgcaggacacaatctaatgcaggcaatcgcccgcgtaatcgtgtttcttcgcataaaatcggcgacaccgtagtctacaaagaaggcggattggtagttgattaa

SEQ ID NO: 62136 - protein, 257 aa, Unknown
  Obtained from environmental sample
  misc_feature (1)..(257): Xaa is any amino acid
MVLRESLPNATYIGFTGTPISSKDRSTIEVFGNYIDIYDITQAVEDGATRPVYYESRVIHLKLDEDILRLIDAEYDIMAQNAEPYAIEKSKKELSRMESILGAEETITALCEDIIKHYEENRQHELTGKAMIVAYSRPIAIKIYRKLLQMRPGWTEKIGAVMTSANNDPEDWQKIIGNKHHKNEMAKKFKDDSSPLKIAIVVDMWLTGFDVPSLSTMYVYKPMRRTQSNAGNRPRNRVSSHKIGDTVVYKEGGLVVD

SEQ ID NO: 62137 - DNA, 882 bp, Unknown
  Obtained from environmental sample
  misc_feature (1)..(882): n is a, c, g, or t
ttggcggcgttgtcaatcaggagcaatgatatggggaaaataattaaacggctattggtatttatcataggagttccggcatttgtttttgttattaattatcttccgttcatgaggcatcttccttttaacattgtcacaataatcttttccactctgggtgccgttgaatttgccgcgatacttgaaaaaaagcaactgcgcgtttcaaaaattgaagcggttattttgggtttatttatgcctttggtttttacattaatcgtatgttttaattttccacaatggataattcctttatttgtcatggcgggcgtaagctgggtaatactgtcattagtatttacaagtcaggcaaatatggaaaatgtgataaaccgtcttgccggatgtttttctgtaatgatttatcccggcctgtttatggcatggattgtaaaaatgagcgtatgggaaatttcaggtgccatccttctttttatattaatttctttcgctaacgattccgcggcatggcttgcaggttcgcttttaggagcaaaaaacaaaggaatatttcccgcaagcccgaataaaagcatagcgggctttataggcggtttaatcggttctgtaataatttccaccggagcggtacttttgactccatctgtttttcagggaaacataagctttgtcaaagtaacaatacttggcgttattaccgccattttcggaagtctaggagatctggcggaatccgcaattaaaagaagcgccgatgttaaagattccggcaatctgatgcttggacgcggcggaatcctggactcaattgattctgttgccttctcggccccggtatactttctgcttttcaatttattttttattaattcctga

SEQ ID NO: 62138 - protein, 293 aa, Unknown
  Obtained from environmental sample
  DOMAIN (15)...(289): Cytidylyltransferase family
  misc_feature (1)..(293): Xaa is any amino acid
MAALSIRSNDMGKIIKRLLVFIIGVPAFVFVINYLPFMRHLPFNIVTIIFSTLGAVEFAAILEKKQLRVSKIEAVILGLFMPLVFTLIVCFNFPQWIIPLFVMAGVSWVILSLVFTSQANMENVINRLAGCFSVMIYPGLFMAWIVKMSVWEISGAILLFILISFANDSAAWLAGSLLGAKNKGIFPASPNKSIAGFIGGLIGSVIISTGAVLLTPSVFQGNISFVKVTILGVITAIFGSLGDLAESAIKRSADVKDSGNLMLGRGGILDSIDSVAFSAPVYFLLFNLFFINS

SEQ ID NO: 62139 - DNA, 702 bp, Unknown
  Obtained from environmental sample
  misc_feature (1)..(702): n is a, c, g, or t
atgcaaaaaccggttcatgtcggtatcattatggatgggaacggccggtgggcaaagcagcgcggtcttgcccgtacccaaggacaccttgaagggttatcggccgccaagcgggttgtaaaagcggcttcggaaatgggcataaaatatttgacgctttatgcgttttcaaccgaaaactggaagcgcactgccgaagaagtaggatttatcatgggtcttataaaacagtatcttcgctctgagtttgattttagccaaaaaaataaaatccgcgtacgccataccggagacatgacaggactgccaaaagatattcaaaaagaaattacagatacaataagagacacttcagattttgacggactacaggttgtgcttgctttaaattacggaggcagggacgaaattacaagagcattccgtaaatttgcggcagacggcaaagacatatcaacattacgcgaagaagatatttgcgcgtatctggataatccagacatacccgatcccgatttaattatccgcagcgccggcgaataccgtacaagcaatttcttgctttgggaaggagcgtattcagagctttatatttcaaaaaaattttggccggactgggacaaggaagatttagaggccgctatagaagattatatggggcgggaccggcgttttggcggcgttgtcaatcaggagcaatga

SEQ ID NO: 62140 - protein, 233 aa, Unknown
  Obtained from environmental sample
  DOMAIN (10)...(227): Putative undecaprenyl diphosphate synthase
  misc_feature (1)..(233): Xaa is any amino acid
MQKPVHVGIIMDGNGRWAKQRGLARTQGHLEGLSAAKRVVKAASEMGIKYLTLYAFSTENWKRTAEEVGFIMGLIKQYLRSEFDFSQKNKIRVRHTGDMTGLPKDIQKEITDTIRDTSDFDGLQVVLALNYGGRDEITRAFRKFAADGKDISTLREEDICAYLDNPDIPDPDLIIRSAGEYRTSNFLLWEGAYSELYISKKFWPDWDKEDLEAAIEDYMGRDRRFGGVVNQEQ

SEQ ID NO: 62141 - DNA, 555 bp, Unknown
  Obtained from environmental sample
  misc_feature (1)..(555): n is a, c, g, or t
atgcaaagcgtcatttcctcccacgaagaaaagatgaaaaaatcggtggcaagcctgaaagaaggatttgcctccttaagaacaggccgtgcttcagcggcgttgtttgacaggttgcgcgtggattgttacggagaaaaatcgcctttgaaccaggttgcgaatatttccgtaccggaagcccgccttatcgtcattcagccgtgggataaaagccttatcggagaaattgaaaaggcaatccgctcttcagaactttcacttaacccgtcaaacgacggtaaggtaatccgtatctccgtccctccccttacggaggagcgccgcaaagagcttgtcaaactcgcgaaaaatcaagctgaacaatcaagggtttccatacgcaacatacgcagggacggcaacgacgaactgaaaaaatttcttaaagattccaagattaccgaagacgaagaatccaaagatacggcggaacttcaaaaattaaccgattcctacatcgctcaggttaatcaggttttggaagaaaaagaaaaagagataatggaagtgtaa

SEQ ID NO: 62142 - protein, 184 aa, Unknown
  Obtained from environmental sample
  DOMAIN (18)...(182): Ribosome recycling factor
  misc_feature (1)..(184): Xaa is any amino acid
MQSVISSHEEKMKKSVASLKEGFASLRTGRASAALFDRLRVDCYGEKSPLNQVANISVPEARLIVIQPWDKSLIGEIEKAIRSSELSLNPSNDGKVIRISVPPLTEERRKELVKLAKNQAEQSRVSIRNIRRDGNDELKKFLKDSKITEDEESKDTAELQKLTDSYIAQVNQVLEEKEKEIMEV

SEQ ID NO: 62143 - DNA, 888 bp, Unknown
  Obtained from environmental sample
  misc_feature (1)..(888): n is a, c, g, or t
gtgcattttcatgacggttctgtagtaaccgccgccgatgtaaagttcagcctggatacggctattgccgttggttttaacggtatgaacaacattaaaaatgtggcagctatttctgataaaaacgtaaggataacccttaaagcgcctgacccggagtttctcccttttttaacaactggaattgtcaagaaagataataacgatcgtgaaaaaaatgttataggaaccggtccatttatcatcgaaagttttacgccgcagagagatcttgtgttaaaaaaatttgacggttattggcagaggcatcttgcccagccgcaggatgtgccgcttcttgataaagtaactatcgtgttcttcgcgaatgttgaagcgttgatgattgccttaagaagcggtaatattgacggcgcgaatcttgtcggctcttttgccgcccagcttgaccacagatattttgaagttattgacagttattcagcggcagtacagcttctggctcttaataattcagttccccctcttgatgatattcgcgtgcgcagggctataaattacggcgttgacatacatgggataattgacggcgctttctttggaaaaggcgctccttcgggcagcccaataatcccgggattatcaacatattatgacgcatcccttggttacccgtatgaaccgcanacggcgcgcgagcttcttgcagaggcaggttttaatgatacccgcaaactttcacttgaaattactgtagcttccgagtacaccatgcatgtcgataccgcgcaggtaattgtaggccagcttgaacaaattggaattgccgcttccgttaaacttgtcgactgggaacacatggctttccgacgtttacagggggcataa

SEQ ID NO: 62144 - protein, 295 aa, Unknown
  Obtained from environmental sample
  DOMAIN (1)...(295): Bacterial extracellular solute-binding proteins, family 5 Middle
  misc_feature (1)..(295): Xaa is any amino acid
MHFHDGSVVTAADVKFSLDTAIAVGFNGMNNIKNVAAISDKNVRITLKAPDPEFLPFLTTGIVKKDNNDREKNVIGTGPFIIESFTPQRDLVLKKFDGYWQRHLAQPQDVPLLDKVTIVFFANVEALMIALRSGNIDGANLVGSFAAQLDHRYFEVIDSYSAAVQLLALNNSVPPLDDIRVRRAINYGVDIHGIIDGAFFGKGAPSGSPIIPGLSTYYDASLGYPYEPXTARELLAEAGFNDTRKLSLEITVASEYTMHVDTAQVIVGQLEQIGIAASVKLVDWEHMAFRRLQGA

SEQ ID NO: 62145 - DNA, 414 bp, Unknown
  Obtained from environmental sample
  misc_feature (1)..(414): n is a, c, g, or t
ttgaacaaattggaattgccgcttccgttaaacttgtcgactgggaacacatggctttccgacgtttacagggggcataattatcaggcgacagttatttccctggacagccagattgtatccgcgcgcaatttccttgcccgttacagatcagataacagcggcaattttatcggtttttataacgcggattttgacagggtttatgacgctattcttacggaaacggacgaagttaaaagaaaacatctttatttggaagcgcagcgcataataacatcaaatgccgcaagcgtatatctgcaggatattctctattacaaagttttccgcgccggcgcttttgacggcgtgaaaaattatccgttattggtggttgacttctctgcaatttacgggataaagaaaaattga

SEQ ID NO: 62146 - protein, 137 aa, Unknown
  Obtained from environmental sample
  misc_feature (1)..(137): Xaa is any amino acid
MNKLELPLPLNLSTGNTWLSDVYRGHNYQATVISLDSQIVSARNFLARYRSDNSGNFIGFYNADFDRVYDAILTETDEVKRKHLYLEAQRIITSNAASVYLQDILYYKVFRAGAFDGVKNYPLLVVDFSAIYGIKKN

SEQ ID NO: 62147 - DNA, 564 bp, Unknown
  Obtained from environmental sample
  misc_feature (1)..(564): n is a, c, g, or t
ttgaattttatactgagaagaatcgttattgcgttaattacggtctttcttgtctctattttttgttttcttgctttcagcgttatccgcggtgaccctgccagtttcctcgcgggaattgacgcttcgcaggaacaattatcagcgttacgtgaagaattgggccttaacaggaatgttattacccgctaccttgactggctttcgggttttctttcaggcagggcgggcgtctcgttaagtttccgcggagaggcggttccttctcttataaaaacgcgtcttccggttaccttaactttatccctgctttcgcttttttttattttgttgatttccatacctgtatctctcttaacagtggaccgcgagggaaacttacttgacagcattgtaaatttttttacagccgcgggattaagcacgccgggtttttttatgggactgctttttatttttttcttcggttttggcttaaactttttatccccggcgaatatattaattacaatgagaattttttcggctttatacgctgtctttgctttcccgcccttgcaatag

SEQ ID NO: 62148 - protein, 187 aa, Unknown
  Obtained from environmental sample
  SIGNAL (1)...(27)
  misc_feature (1)..(187): Xaa is any amino acid
MNFILRRIVIALITVFLVSIFCFLAFSVIRGDPASFLAGIDASQEQLSALREELGLNRNVITRYLDWLSGFLSGRAGVSLSFRGEAVPSLIKTRLPVTLTLSLLSLFFILLISIPVSLLTVDREGNLLDSIVNFFTAAGLSTPGFFMGLLFIFFFGFGLNFLSPANILITMRIFSALYAVFAFPPLQ

SEQ ID NO: 62149 - DNA, 321 bp, Unknown
  Obtained from environmental sample
  misc_feature (1)..(321): n is a, c, g, or t
gtgataatggcaagaagcaagggcgcgggcggactttatatcctgagccgccacgttttaaaaaacgccctgcttccggcggttacaatattcgccatgataatcgcggaagttttttcgggcagcatcatcattgaacaggtatttacaattcctggaattggcagactattaattacggcgataagctcaagagattatccgctaattcaatccctaatggtttacatagcgtttattatcatcacggctaacactcttgctgatattgcaatcatgattatagatccaaggataagagaggcaaaggacatcagatga

SEQ ID NO: 62150 - protein, 106 aa, Unknown
  Obtained from environmental sample
  misc_feature (1)..(106): Xaa is any amino acid
MIMARSKGAGGLYILSRHVLKNALLPAVTIFAMIIAEVFSGSIIIEQVFTIPGIGRLLITAISSRDYPLIQSLMVYIAFIIITANTLADIAIMIIDPRIREAKDIR

SEQ ID NO: 62151 - DNA, 546 bp, Unknown
  Obtained from environmental sample
  misc_feature (1)..(546): n is a, c, g, or t
atgagaataactaatttaaggattggagccgttatcggcattatcattgtaaagatgtccctgttaagtcttatctgggttccgcataattacaaccaaatggattattcaaaacgtcttatgcctccgtccgccatgcatcttcttgggaccgacaactttggcagggatattttttcgcgcataatggcggggggaagaaattccctgctccttgcgatatgcaccgtaacgggagccgcggctcttggaagtttgcttggtcttttggcaggctttctcggtggaattacaggtgaaatcataatgcgctttattgacactcttaattcttttcctggaatagtccttgcccctccttctggtcgcggtaatggaacacagccaattcagcctgtttatcgcgctcctcattctttttacgccgagttacacccgtattatgcgcacgggggctttgcaatacagggacgcttcctttgtacaatcggaaaaaatactgggtgcgggcttttttcgcataacgttcattcatatcctgcctaa

SEQ ID NO: 62152 - protein, 181 aa, Unknown
  Obtained from environmental sample
  misc_feature (1)..(181): Xaa is any amino acid
MRITNLRIGAVIGIIIVKMSLLSLIWVPHNYNQMDYSKRLMPPSAMHLLGTDNFGRDIFSRIMAGGRNSLLLAICTVTGAAALGSLLGLLAGFLGGITGEIIMRFIDTLNSFPGIVLAPPSGRGNGTQPIQPVYRAPHSFYAELHPYYAHGGFAIQGRFLCTIGKNTGCGLFSHNVHSYPA

SEQ ID NO: 62153 - DNA, 447 bp, Unknown
  Obtained from environmental sample
  misc_feature (1)..(447): n is a, c, g, or t
ttgcccctccttctggtcgcggtaatggaacacagccaattcagcctgtttatcgcgctcctcattctttttacgccgagttacacccgtattatgcgcacgggggctttgcaatacagggacgcttcctttgtacaatcggaaaaaatactgggtgcgggcttttttcgcataacgttcattcatatcctgcctaatcttgccccatcactcctttccgcttcggtactggggctttcaaacgcaattctggcggaagccgccatgagctatcttggaatgggaatacagccgcctgaaccttcttgggggcggatgttatttgaagcacaagcatggtttttcaacgccccgtggtgcgccgtggcccccggcatttttataatgcttactgttatcgcttttcatctgttaggcgaaggtatccgtaaaaggtttggaggttga

SEQ ID NO: 62154 - protein, 148 aa, Unknown
  Obtained from environmental sample
  misc_feature (1)..(148): Xaa is any amino acid
MPLLLVAVMEHSQFSLFIALLILFTPSYTRIMRTGALQYRDASFVQSEKILGAGFFRITFIHILPNLAPSLLSASVLGLSNAILAEAAMSYLGMGIQPPEPSWGRMLFEAQAWFFNAPWCAVAPGIFIMLTVIAFHLLGEGIRKRFGG

SEQ ID NO: 62155 - DNA, 984 bp, Unknown
  Obtained from environmental sample
  misc_feature (1)..(984): n is a, c, g, or t
ttggaggttgaagtgccgcatttattggaagtgaataatttaaccgccggaattaaaaaggacggaaaaatttttcaaatactgaaggatgtcagtttttcaattgacgagggggaaattgtcggtcttgcaggagaatcgggttgtggtaagagcatgaccgccctgtcaattccaaacctcctaccccaaccagtaaaaatcctcggcggtgaaataagtcttgatcacataccgcttacttccctgagcgagaaagaattgagttacataagaggaaaggaaatttccgttatttttcaggatataaggcagtcgttaaatccactgattagggttggcggacaaatcactgaaatgctggaacttgccggcagtactgacaagacagcgaacaaaactcaggcgcttgaaactcttgtctcccttggctttgaagaaactgaaaaaatttacaacgcttatcctcatcagctttccggcggaatgtgccagcgtgttatggcggcaattgccgcaataggctgtccgcgtcttttaattgcggacgagccgtcaagcgcccttgatacggaaagtgaagagaaaatactttcgcttcttgcgaaaatgaaccgtgaatacaaaatgtctgtcctgattatctcccatgatctttcaataatacgcagattttgcagccgttatattgttatgtatgccggaagaattgtcgaagaaggcgcgtcatcggatttttcctccgccctccatccgtatacaaacgcgcttgtcaacgcaattccttcaaaagaaaaaaggggcggcaagctgaaaaatattccgggaaaggttccgtcaattgaagatgatctgcccggctgtcctttcgcgccgcgctgtaaaaaagcccaaaagcgctgtcatgacgcgtttcctccgttagctgaaattaacggcaggcgcgcctattgtcattttcccgagaccggagaaacactgtga

SEQ ID NO: 62156 - protein, 327 aa, Unknown
  Obtained from environmental sample
  DOMAIN (238)...(301): Oligopeptide/dipeptide transporter, C-terminal region
  misc_feature (1)..(327): Xaa is any amino acid
MEVEVPHLLEVNNLTAGIKKDGKIFQILKDVSFSIDEGEIVGLAGESGCGKSMTALSIPNLLPQPVKILGGEISLDHIPLTSLSEKELSYIRGKEISVIFQDIRQSLNPLIRVGGQITEMLELAGSTDKTANKTQALETLVSLGFEETEKIYNAYPHQLSGGMCQRVMAAIAAIGCPRLLIADEPSSALDTESEEKILSLLAKMNREYKMSVLIISHDLSIIRRFCSRYIVMYAGRIVEEGASSDFSSALHPYTNALVNAIPSKEKRGGKLKNIPGKVPSIEDDLPGCPFAPRCKKAQKRCHDAFPPLAEINGRRAYCHFPETGETL

SEQ ID NO: 62157 - DNA, 759 bp, Unknown
  Obtained from environmental sample
  misc_feature (1)..(759): n is a, c, g, or t
atgggtagttacaagcttgataatttgctggcagaccgggggtccaggaaaatataccgcgacggggacaaagtcataaaactcagggacgagggatttcccgcgccggacgttctttccgaagcgcacaatcttgccgtggtgggggagacagcgctcaaggttccgcgcctggttgaggtaacgaaaattgacggcaagtgggctgtaatttgggaatatgtcgagggaacttctcttgataaattgatggaaaaaaacaaggacaaagaggatcagtatatcgaacgctttgttgacattcagcttgatatgcacagtcacagcgcgacaaggcttcccctgcttatcgaaaagatggagcgcaagataaaatcctccgagcttgactcaacagcccgctacgaaattttgggaaggctggcgagcatgcccaaacacaccaaactctgccacggcgattttaaccccggcaatgttgtcattaccgacaaggacgaggcgtatatcatcgactggtgccacgccactcagggcaacgcctcggcggacgcggcgcacacttacctgctgttccgtcttgccggcagcgacgcgctggcggacaagtaccttgcgctgttctgcaaaaagagtaatacctcgaaacaatatgtggagaagtggctttccattgttgcggcttcccagcttccgagagcgaaaccgggggagagggagtttttgctgcattgggctaatgttgttgaatacgcgtaa

SEQ ID NO: 62158 - protein, 252 aa, Unknown
  Obtained from environmental sample
  DOMAIN (5)...(242): Phosphotransferase enzyme family
  misc_feature (1)..(252): Xaa is any amino acid
MGSYKLDNLLADRGSRKIYRDGDKVIKLRDEGFPAPDVLSEAHNLAVVGETALKVPRLVEVTKIDGKWAVIWEYVEGTSLDKLMEKNKDKEDQYIERFVDIQLDMHSHSATRLPLLIEKMERKIKSSELDSTARYEILGRLASMPKHTKLCHGDFNPGNVVITDKDEAYIIDWCHATQGNASADAAHTYLLFRLAGSDALADKYLALFCKKSNTSKQYVEKWLSIVAASQLPRAKPGEREFLLHWANVVEYA

SEQ ID NO: 62159 - DNA, 813 bp, Unknown
  Obtained from environmental sample
  misc_feature (1)..(813): n is a, c, g, or t
atggtaggaaccagccagggaatctttgcgttcagtgccaccagcataggagcttcccacctcaagataggaaagccatgtcaggattactcggcgcacctcatcgctggcaagacagctatcgcggcagttgccgatggtcatggcggtgaatcgtattttcgcagtgacagaggcgcgcaattcgcagtagaaacagcattaaaatgtatcgaagaattcatcacgttcaaaaaccatccactgcatgatccgtgtagtttattaagtactcttgaaaaaagcatcatcgccggatggcacgaaaaaatagcagaagatgtaaaaaattaccccacagacacagatatttttgccagcgacgacgatatatgcagtcaatacggaactactttaatagcggcggcaattaccgaacactactggtttgcgattcagattggcgatgggaaatgcgtcatcattgataaggacaataaggtgtctcagcctgtcccctgggacgagcgttgtttcttaaacataactacatcgctttgcgatgcagatgccagcaagctgtttcgccactattacaacgagacaccccctctcgccgttttcattgaaagcgacggtattgacgactcatttccggtaaatgaaaacgaaaagcacctggcccgtttttacctgagcgtgtatgacaattttgcaaaagaaggactgaaagaaggcgaagcccagctacgggaaatgctccctatgttttctaaaaaggggtcgggcgatgatgtaagcataggcggtattataaggggcattaaggagtaa

SEQ ID NO: 62160 - protein, 270 aa, Unknown
  Obtained from environmental sample
  misc_feature (1)..(270): Xaa is any amino acid
MVGTSQGIFAFSATSIGASHLKIGKPCQDYSAHLIAGKTAIAAVADGHGGESYFRSDRGAQFAVETALKCIEEFITFKNHPLHDPCSLLSTLEKSIIAGWHEKIAEDVKNYPTDTDIFASDDDICSQYGTTLIAAAITEHYWFAIQIGDGKCVIIDKDNKVSQPVPWDERCFLNITTSLCDADASKLFRHYYNETPPLAVFIESDGIDDSFPVNENEKHLARFYLSVYDNFAKEGLKEGEAQLREMLPMFSKKGSGDDVSIGGIIRGIKE

SEQ ID NO: 62161 - DNA, 2811 bp, Unknown
  Obtained from environmental sample
  misc_feature (1)..(2811): n is a, c, g, or t
atggatcgaggtgcgggccgggggcaagacctggcctttcagctggagaggcttcccaatattgacgagaagcgttaccaaaaggaacagggcgttcttgtcagcgtcaacgacaggcttcctctggacaccgatgtgctaatggtattaaaagccggggcgcgttcagagtcaggctggcttggctcaaaagaagaaaaaacctggaacttccataccctgctgcccttcaaattcgaagatgtttccgttcgcacttattcaagcccccgaacccaggaagctgattccattcccatttcacttggattcagccaggaagtggaacccgaaggcgctgaaagatatttttccgttgagggctttttgccgctgaaaaaagaaaatgtccatgtttacggaagcagggttgtcattaacaacctggggctggaataccagacaaattatacggtgcgaatttccgcgggccttaaagacctgttcggacgagagctgggcagggcggaaactgttgcagcggaaatcggcgaggcgaacagctatgtgtatttccgcaactcgcgcgcccgtatgctggaagccggttacccaccaaaaataatctgggaagcgcagaacccggtttcaatacgaagccggattgcccaggcgcaaaacccctacgaaatgttccccctgtcgggcctttcggaaatggacatgtcaaaactgccgcaaaattcaaaacattattttatggaagacctttcccccttccttaacgccgcgggcaaaggaagcgtcactatgcaatgggaataccgtaccaagtcctcctgggagaaaggaagaatctataataatgacgaatggcttaccgtccaggttaccaatatcggcataacgctccgttacggctataatatggctctgatatgggcgacccatctttcggacgggaccgccgtccccaacgccgatgtggaactcatggaaggcggcaaggttgttctcgccggcaaaaccgacgcgaatggccttgcggtatttaattttcccaaaggcgattttatttcaaagttttccgaaccgcagagcggttattggaacaatacgtttggcaatggctttcgcgtccgggtaagcgaaggttccgggccaacccaggacagggcggagttcattcccaatgacagccataacctctggcgtttcagcatagaggcgtatgaaagcccctttatcatggaaaaggagcgcccggtaattttcctttttaccgaccgcggcctgtacaggcccggcgaaacggttactttccgcggtattgacaggaatctaatcaacgggcagtacacggcgtacaagggacagtataaaattgaggtcagtaccggggcgtacaaggctccggtgatcgcgacgctggaagggaataccaccgganacgggggctctttcggttctttcactttgccgtcgaacctcgatcctggccagtacaggctcatttaccgccgcgccgggacagcgggctccggccaggagcgtgaacaggaagactcagtcgcgtttaccgtcgccaattttgaacgcctccgttttgaatcctcgctgcggtttaccgatcccgttgtctatcagggagaaaaactcagcgcctcccttgccgcttcctggcttgccgggggcgggctttcaggtgcgccctacacatggtatctgacgcgggaacccgcttctgtcattccgggcgggacagaaggcccctggcgctattggaatttcgggcctgaatcagatgacgggcgatcctttgtcgggcgcggagaaggcacgcttggccctgacgggaaaacaggcatcagcaacgatacatccggcgagggcattgaaggcgcggcctaccgctaccggcttgaaacttcggtgcaggacgcggcccgccaggaaatatccgcccgcgcctctgttctggttcatcccgcttctttttacattgccgcgcgccttgattcgggaacaataagaacccctaccgacagtggcagcgactctggggcctatttccttaacgcggggcagccggcgacattaagctgggcgcttgtttcgcctaacggagacggtgttggaactagtctgactagtcaagatttatcgatacagcttgtccgccatgaatggaaacaggcgcggcaacagggagcgggcggcaggatcaacctggtatgggaacgtgttgaggaaatcgccgcgcagcgaaacgtaaaaattacaaccgggaacaattccggtgtgttcaattttacaccggacaagagcggcctttgggaactcaggctttccggccgcgatcagaagcagcggatagccgctacccgttcccgcttttacgtcaccggcgcgggatgggtgcgctgggattctgatgacgtagataccataaccctcaacaccgaccgccaaagttacgcgcccggacagacggcgaaaataatggtgcgctctccgcttgaaaaaggcaaatatttgttaacgctggaacgcgaaaatgtcatatcccagaagatcatcgagcttaacggttccgccctgaccatcgatattcctattgaggaatcgtatgtgccgataatctacgccgcgcttagttcctatacggttcgttccgccgctgtgcagaacagctactacgaacctgatctggacaaacccaggggattttcggcgttacgccgatttatattgacaatgaaagcaggcattaccaaatcgagattgataccggcaggaacgcctaccgcccggcggaacaggcggaagtaa

SEQ ID NO: 62162 - protein, 936 aa, Unknown
  Obtained from environmental sample
  DOMAIN (287)...(595): Alpha-2-macroglobulin family N-terminal region
  misc_feature (1)..(936): Xaa is any amino acid
MDRGAGRGQDLAFQLERLPNIDEKRYQKEQGVLVSVNDRLPLDTDVLMVLKAGARSESGWLGSKEEKTWNFHTLLPFKFEDVSVRTYSSPRTQEADSIPISLGFSQEVEPEGAERYFSVEGFLPLKKENVHVYGSRVVINNLGLEYQTNYTVRISAGLKDLFGRELGRAETVAAEIGEANSYVYFRNSRARMLEAGYPPKIIWEAQNPVSIRSRIAQAQNPYEMFPLSGLSEMDMSKLPQNSKHYFMEDLSPFLNAAGKGSVTMQWEYRTKSSWEKGRIYNNDEWLTVQVTNIGITLRYGYNMALIWATHLSDGTAVPNADVELMEGGKVVLAGKTDANGLAVFNFPKGDFISKFSEPQSGYWNNTFGNGFRVRVSEGSGPTQDRAEFIPNDSHNLWRFSIEAYESPFIMEKERPVIFLFTDRGLYRPGETVTFRGIDRNLINGQYTAYKGQYKIEVSTGAYKAPVIATLEGNTTGXGGSFGSFTLPSNLDPGQYRLIYRRAGTAGSGQEREQEDSVAFTVANFERLRFESSLRFTDPVVYQGEKLSASLAASWLAGGGLSGAPYTWYLTREPASVIPGGTEGPWRYWNFGPESDDGRSFVGRGEGTLGPDGKTGISNDTSGEGIEGAAYRYRLETSVQDAARQEISARASVLVHPASFYIAARLDSGTIRTPTDSGSDSGAYFLNAGQPATLSWALVSPNGDGVGTSLTSQDLSIQLVRHEWKQARQQGAGGRINLVWERVEEIAAQRNVKITTGNNSGVFNFTPDKSGLWELRLSGRDQKQRIAATRSRFYVTGAGWVRWDSDDVDTITLNTDRQSYAPGQTAKIMVRSPLEKGKYLLTLERENVISQKIIELNGSALTIDIPIEESYVPIIYAALSSYTVRSAAVQNSYYEPDLDKPRGFSALRRFILTMKAGITKSRLIPAGTPTARRNRRK

SEQ ID NO: 62163 - DNA, 1101 bp, Unknown
  Obtained from environmental sample
  misc_feature (1)..(1101): n is a, c, g, or t
atgccctgtaagctattccctgtcactgagaaccgtattgtttcccctgtatccccggctgcgttcgcgggaagcggagcgtgtatcaaagctgatcatgacgcttccataaaaaagcggggggtaaaaatggccgggccgccggttaaatcggcaattttaattgtcaatctccataaagaaaacgccgactccgctgccgaagaaatccggcgggaacttgaaagcgggggagtgcaggcaaccctcttcgcctttgaagggcgccccgcgccccccccccaaggactatgggatatcgcttttagcctgggaggcgacggaactgtcctttatgcggcgcggatcctcgcccatacgggcacgccaatcctccccgtacaccttggaaccctgggatttatcgccggcgtggaaaggcatcaatggcttggggtttacaggcactggcttacaggggaatcaaggctttcccggcgctgtatgctggaattttccattgaaaggggcggtaaatatgccgttaataataatgtatgcctgaatgacgtagtgatttcacctttggggattgcaaagctgatacgtttgcaggcaagaacagaggttgcccccggcgaatttgcggaaattggctgctatcgatcggacgggcttataatcgctactcccaccggttccacggcgtattccatggcggccggcgggccaatactggatccggagatggaagcgcaaattatcagcccaatctgcccctttaccatgtcgaacagaccgctggtgcttccgtcacggcagacattacagataacggtctgcatggaacagcggagcggggtgctgctgaccagcgacgggcaggaaacctttgatctggaacctggtgatttagtcaccataaaacattcgccccattacgcgcttctgattaccgccgggtattcgtcgtattacagagcgctggcggataaactggcctggtttcccgaaggggacacgttctccgaagggggacccgcctccgaaggagtcgtcgtctccgaaggagtcgtcgtctccgaaggagacgcaacctccgatggaggtgatcatgcttga

SEQ ID NO: 62164 - protein, 366 aa, Unknown
  Obtained from environmental sample
  DOMAIN (51)...(313): ATP-NAD kinase
  misc_feature (1)..(366): Xaa is any amino acid
MPCKLFPVTENRIVSPVSPAAFAGSGACIKADHDASIKKRGVKMAGPPVKSAILIVNLHKENADSAAEEIRRELESGGVQATLFAFEGRPAPPPQGLWDIAFSLGGDGTVLYAARILAHTGTPILPVHLGTLGFIAGVERHQWLGVYRHWLTGESRLSRRCMLEFSIERGGKYAVNNNVCLNDVVISPLGIAKLIRLQARTEVAPGEFAEIGCYRSDGLIIATPTGSTAYSMAAGGPILDPEMEAQIISPICPFTMSNRPLVLPSRQTLQITVCMEQRSGVLLTSDGQETFDLEPGDLVTIKHSPHYALLITAGYSSYYRALADKLAWFPEGDTFSEGGPASEGVVVSEGVVVSEGDATSDGGDHA

SEQ ID NO: 62165 - DNA, 1092 bp, Unknown
  Obtained from environmental sample
  misc_feature (1)..(1092): n is a, c, g, or t
atgaagattgaagcttactcgccgaccatcaggcgaaaggaaatggacgctgtcctcaccgcaatggtggaggatcagatcggtccgggcgagagatcccgccttctcctgcaaatagccaaagaacatatccgtttcgattatgccctcgcgttgcgaagtcccgccacagcccttcacctggcacttaaagccctggaacttaaagagggggacggagtgctggtttccgcgctttccccgcgttattacgtccagacgcttgccgattttcgcctaacgcccctgttctgcgacgtatcgtattcttttccctgcataagccgcgagagcgttgaaaaagcgataacggcaaaaccggacggagtggagccccgctgcattatccttcaccatactttaggcttcgtgccggacgcggcgtctatcgccgggcttggcattcccgttatagaggatatttcccaaagttacagcccgcctctcccccaggaaggcgcagaccagaccgcagccgaaaacgcgggcgcggcttcacagaattctcccgccactatccatggggtgtttgccattttgggccttgaggaaagggatatgcttacaggcggcggaggggcgatcctttttgccatgaacagaaaggacggccagatactgcgcgccttctcaaatatcccgcccgagtactgtctgcccgacattaacgcggccctggcgtccgtgcaattcagggaggcgccgcgcaatatggcaaggcgtcaggaaattgccagggcctatacccaggcaagcctccgtaccaaacataagcgtttcgttccccttgagggctcaggcgaatactgcaattatgtttttcccctggtgctggagacaggcatgaaggatgtcgcggcctatgcccgcaaaaaagaaattatcgtggaaaacgcctttgagcaaagtctgaccggggcgggggttattgattcggttttatgccctgtaagctattccctgtcactgagaaccgtattgtttcccctgtatccccggctgcgttcgcgggaagcggagcgtgtatcaaagctgatcatgacgcttccataa

SEQ ID NO: 62166 - protein, 363 aa, Unknown
  Obtained from environmental sample
  DOMAIN (8)...(360): DegT/DnrJ/EryC1/StrS aminotransferase family
  misc_feature (1)..(363): Xaa is any amino acid
MKIEAYSPTIRRKEMDAVLTAMVEDQIGPGERSRLLLQIAKEHIRFDYALALRSPATALHLALKALELKEGDGVLVSALSPRYYVQTLADFRLTPLFCDVSYSFPCISRESVEKAITAKPDGVEPRCIILHHTLGFVPDAASIAGLGIPVIEDISQSYSPPLPQEGADQTAAENAGAASQNSPATIHGVFAILGLEERDMLTGGGGAILFAMNRKDGQILRAFSNIPPEYCLPDINAALASVQFREAPRNMARRQEIARAYTQASLRTKHKRFVPLEGSGEYCNYVFPLVLETGMKDVAAYARKKEIIVENAFEQSLTGAGVIDSVLCPVSYSLSLRTVLFPLYPRLRSREAERVSKLIMTLP

SEQ ID NO: 62167 - DNA, 495 bp, Unknown
  Obtained from environmental sample
  misc_feature (1)..(495): n is a, c, g, or t
atgattttgctttcagggggatttatggctgatgctaaacaattagttacttttcagttgggtgaagagctgtatggcattaatataatggatgtcaaagaaatagtccgggttcagacaatccgggccattcctaacgctcctacttatgtagaagggatattcaacctaagaagcgaaataatccccattataaacctgcataaacgcttccacctgaaaaaattggccagctcggaggaagacgagttgttgtccggttttgttatccttgatattgacggcatgaaactggggatcatcattgaccgcatatccagggttataacaatcgaaaaagaagatatacagcccccgccccaaatgttttcagggattggagcggaatacataataggagtagtgcgccaggataccggttatttgattatcctggatattcgggacttatttaatcccaaggaactccaaaagatcgccgagctgagacgctag

SEQ ID NO: 62168 - protein, 164 aa, Unknown
  Obtained from environmental sample
  DOMAIN (14)...(155): CheW-like domain
  misc_feature (1)..(164): Xaa is any amino acid
MILLSGGFMADAKQLVTFQLGEELYGINIMDVKEIVRVQTIRAIPNAPTYVEGIFNLRSEIIPIINLHKRFHLKKLASSEEDELLSGFVILDIDGMKLGIIIDRISRVITIEKEDIQPPPQMFSGIGAEYIIGVVRQDTGYLIILDIRDLFNPKELQKIAELRR

SEQ ID NO: 62169 - DNA, 738 bp, Unknown
  Obtained from environmental sample
  misc_feature (1)..(738): n is a, c, g, or t
gtgcgcgaacggcctgaaccgccaccgccgccgcctgaacctgaaccagaaccggaaccagaaccggaaccggtgataatagttgaagttcctcctccgcctccaccgccgccgcctgaaccgccgccgccgccactgccaccaccgccgtcgccgccggtaaatattacaatatttaactatataacgcctcctgatccgccgcctccgcctccggcgcctgtgcctgaaccgaggccttccagcgcggaattggataatcttgcatggctgtccatgctggccttagagtcccgcaaagatccgcctcctcctcctctgcctgaaccgccgccgccgttgccgactcctccgccgccgcctccgcccgcgccgccgcctccaccgccgccgcctcctcctccgccgccaccgccgcctccgcaatttgtgcctcagccgtattatgtgcctcagccgtattatccattgcctttcataaacgaagtccaggttatacccggtttcccggatccaaacaacggaaggatatacatgcttcaggttggctctttctacagcgaagccggcgccgccctcgcataccagcagcttgtgtcggcgggattcaacgccgcttgggagcattcgcataatgcgtacagggtgcttgtcgttggcattccggcccaaagcgtatatgccacaatttaccgccttgggtctatgggcttcaggcagatatgggtcagggagtaa

SEQ ID NO: 62170 - protein, 245 aa, Unknown
  Obtained from environmental sample
  misc_feature (1)..(245): Xaa is any amino acid
MRERPEPPPPPPEPEPEPEPEPEPVIIVEVPPPPPPPPPEPPPPPLPPPPSPPVNITIFNYITPPDPPPPPPAPVPEPRPSSAELDNLAWLSMLALESRKDPPPPPLPEPPPPLPTPPPPPPPAPPPPPPPPPPPPPPPPPQFVPQPYYVPQPYYPLPFINEVQVIPGFPDPNNGRIYMLQVGSFYSEAGAALAYQQLVSAGFNAAWEHSHNAYRVLVVGIPAQSVYATIYRLGSMGFRQIWVRE

SEQ ID NO: 62171 - DNA, 387 bp, Unknown
  Obtained from environmental sample
  misc_feature (1)..(387): n is a, c, g, or t
ttgggccggaatgccaacgacaagcaccctgtacgcattatgcgaatgctcccaagcggcgttgaatcccgccgacacaagctgctggtatgcgagggcggcgccggcttcgctgtagaaagagccaacctgaagcatgtatatccttccgttgtttggatccgggaaaccgggtataacctggacttcgtttatgaaaggcaatggataatacggctgaggcacataatacggctgaggcacaaattgcggaggcggcggtggcggcggaggaggaggcggcggcggtggaggcggcggcgcgggcggaggcggcggcggaggagtcggcaacggcggcggcggttcaggcagaggaggaggaggcggatctttgcgggactctaa

SEQ ID NO: 62172 - protein, 128 aa, Unknown
  Obtained from environmental sample
  misc_feature (1)..(128): Xaa is any amino acid
MGRNANDKHPVRIMRMLPSGVESRRHKLLVCEGGAGFAVERANLKHVYPSVVWIRETGYNLDFVYERQWIIRLRHIIRLRHKLRRRRWRRRRRRRRWRRRRGRRRRRRSRQRRRRFRQRRRRRIFAGL

SEQ ID NO: 62173 - DNA, 663 bp, Unknown
  Obtained from environmental sample
  misc_feature (1)..(663): n is a, c, g, or t
ttgcatggagtttttttgcactttactttgacggatttgattaccgatatcacacaaaacggggtagaatccggggcttctatagtggagcttcaagtcagtgaatcagtgggttcaaaggaaccggtaggttccgaagaaccaggaggttcaaaggaaccgataggttcctccggtaaaggggaattccggttcactgtaattgataacggcaaggggatgactgcggaggaacttaagcgtgcccaggatccttttgttactgacggcataaaacacccccatcgcaaagtggggttggggcttccttttttaatccagatggccgaaatgtcaggcggcggatggaaaatggaatccaaaaaagccggagagagtcaggagtcgggcactgtaataagcgcctggtttgatttgggaaatgtggatactcccccggtgggggacattccgggaatgtttcggacggtgctgctttttaacggcccggaagaaatggtaattaagcgccttcgtaagtcgccgaaaaacaagctttcttgcgatcttgattacgaggttcggaaaaccgaactaatcggcgcccttggggatttggaggatacccagtcccttattctattggatcgttatttgcgttccctcgaagaagcgggggaataa

SEQ ID NO: 62174 - protein, 220 aa, Unknown
  Obtained from environmental sample
  DOMAIN (5)...(140): Histidine kinase-, DNA gyrase B-, and HSP90-like ATPase
  misc_feature (1)..(220): Xaa is any amino acid
MHGVFLHFTLTDLITDITQNGVESGASIVELQVSESVGSKEPVGSEEPGGSKEPIGSSGKGEFRFTVIDNGKGMTAEELKRAQDPFVTDGIKHPHRKVGLGLPFLIQMAEMSGGGWKMESKKAGESQESGTVISAWFDLGNVDTPPVGDIPGMFRTVLLFNGPEEMVIKRLRKSPKNKLSCDLDYEVRKTELIGALGDLEDTQSLILLDRYLRSLEEAGE

SEQ ID NO: 62175 - DNA, 486 bp, Unknown
  Obtained from environmental sample
  misc_feature (1)..(486): n is a, c, g, or t
ttggggatttggaggatacccagtcccttattctattggatcgttatttgcgttccctcgaagaagcgggggaataaaggagatgaatatatggccaaaatgtcattggaagaactgcggaagctccgtgataatacgcaaacggacttgaggcgcagggaagcggaaggcaaggaaatccatgttgtcgtgggaatgggaacctgcggtatcgccgccggcgcgaagcagacgctggacgcgtttgtaacggggctggacgagaacaaacttgtggacagcgtgattgtgcggcagaccggctgcatggggctgtgccattccgaaccgacagtcgaggttatcgctccgggcatgcccaccgtcatctacgggaacgtggatgccgctgtcgcgaaagaaattatccaaaaacatattatcggcaaggaactcctgagtggccgcattctggatcgtcccgccgctgacattgttaaagcataa

SEQ ID NO: 62176 - protein, 161 aa, Unknown
  Obtained from environmental sample
  misc_feature (1)..(161): Xaa is any amino acid
MGIWRIPSPLFYWIVICVPSKKRGNKGDEYMAKMSLEELRKLRDNTQTDLRRREAEGKEIHVVVGMGTCGIAAGAKQTLDAFVTGLDENKLVDSVIVRQTGCMGLCHSEPTVEVIAPGMPTVIYGNVDAAVAKEIIQKHIIGKELLSGRILDRPAADIVKA

SEQ ID NO: 62177 - DNA, 1803 bp, Unknown
  Obtained from environmental sample
  misc_feature (1)..(1803): n is a, c, g, or t
atggcagaaaagacggcatataaacactatattctcacctgcggcggcactgcctgtgaatccaataaagggaatgaaattcacgaccagctcattgccgaggcggagaagcagggtgttaagtccgaagtgcagattgtcaaaacaggctgtttcgggttttgcgagatggggccaatcgtcaaagttttgcctgaggattcattctatgtattggtgaagcctgaggacgcgaaagagatcattgccgagcacatcatcaagggccgcgaggttaaacggctcctctataaagacgaaggccatataaaaacatcagataccgtagaggacatacagttctatcaaaagcagttcagggttgtgctccgcaactgcggcactattgatcctgaaagcatcgacgagtacatagcccgcgaaggctacaaggggcttgagaaagtcctgtttgactggacccaggaaaagattatagaggaagtaaagacctccggcctgcgcgggcgcggcggcgctggcttccccacctggcttaaatgggacctcgcgcggaaagcccatggcgacgctaaattcgttatctgtaacgccgatgagggcgacccgggcgcgtatatggaccgttccaccattgagggcgatccccactctgttattgagggcatgattaccgctggcaaggctattggcgccaatcagggttttgtatacattcgcgccgagtatcctctggccattgacaggcttaaaatcgccctgaaacaggcgcaggaatacggcctgcttggaaaaaacatcctcggatcgggctttgattttgacattgagatacgccttggcgcgggcgcttttgtctgcggcgaggaaacggcgcttatcaagtccgttgagggcaaccgcggaatgccggtgcccaagcccccgttccccgctaataagggactgtggcaaaagccaactattattaataacgttgaaacattcgcgaatatccccgtggtcaccgccaagggcggcgcctggctcgcgaaacttggaacggaaaaatccaagggaaccaaagttttcgcccttaccggaaaggtcaagaattccggccttgttgaagttccgatgggaaccaccctgcgcgagatcatctttgaaatcggcgggggcatcaaggacggaaagaaattcaagggcgtgcagacgggcgggccttcgggcggcattcttaccgaaaagtcccttgacttgcccattgactttgacaccctcgcggctaacggctcgatgatgggatcaggcggtatgatcgtcatggatgaggacgactgcatggtcgacgtgacaaagttctacttggagttcacggtcgacgagtcgtgcggcaagtgctccccgtgccgtgtgggagggcgtcagctctacaaccacttggagaagatcacgaacggcgagggtacggaggaggacatccgcaagatgcgccttataggcaaggccatgcagaaagcgtcgctttgcgctctcggccagaccgcgccaaaccctgtcgtctccacgctccagtatttcgagagcgagtacatggcccacataaaggagcgcaggtgtccggcgggcaagtgcaagaagatgttgcgctactccatcgtagccgatatgtgcaagggttgcggcttgtgcgcgaagaagtgtccggcgggctgtataaagggcgagataaagaagccgtacgtgatagacgccgcggcgtgcataaagtgcggcgcgtgcgaagaggcgtgtaaattcaaggcagtcgtcaagaactaa

SEQ ID NO: 62178 - protein, 600 aa, Unknown
  Obtained from environmental sample
  DOMAIN (575)...(598): 4Fe-4S binding domain
  misc_feature (1)..(600): Xaa is any amino acid
MAEKTAYKHYILTCGGTACESNKGNEIHDQLIAEAEKQGVKSEVQIVKTGCFGFCEMGPIVKVLPEDSFYVLVKPEDAKEIIAEHIIKGREVKRLLYKDEGHIKTSDTVEDIQFYQKQFRVVLRNCGTIDPESIDEYIAREGYKGLEKVLFDWTQEKIIEEVKTSGLRGRGGAGFPTWLKWDLARKAHGDAKFVICNADEGDPGAYMDRSTIEGDPHSVIEGMITAGKAIGANQGFVYIRAEYPLAIDRLKIALKQAQEYGLLGKNILGSGFDFDIEIRLGAGAFVCGEETALIKSVEGNRGMPVPKPPFPANKGLWQKPTIINNVETFANIPVVTAKGGAWLAKLGTEKSKGTKVFALTGKVKNSGLVEVPMGTTLREIIFEIGGGIKDGKKFKGVQTGGPSGGILTEKSLDLPIDFDTLAANGSMMGSGGMIVMDEDDCMVDVTKFYLEFTVDESCGKCSPCRVGGRQLYNHLEKITNGEGTEEDIRKMRLIGKAMQKASLCALGQTAPNPVVSTLQYFESEYMAHIKERRCPAGKCKKMLRYSIVADMCKGCGLCAKKCPAGCIKGEIKKPYVIDAAACIKCGACEEACKFKAVVKN

SEQ ID NO: 62179 - DNA, 600 bp, Unknown
  Obtained from environmental sample
  misc_feature (1)..(600): n is a, c, g, or t
atgttttttgtccgtttttggggcgtcagaggatccatcccctgcccagggcccgataccgtaaaatacggcggtaatacaacatgccttgaaatacgcgccgataaaaggctaataatcattgatttgggaaccggggcaaagcctttggccgattatctccaggcaaacgattctaaacaaggccctttggacattgatatatttataacccacacccattgggatcatattatgggctttcccatgtttgcgcctgtttttgtccccggaacgaaattgaggattcgcgggccggtttcctacaacgatgatactttggcgtcaataatcggggatcagctttcatacagatattggccgataaggcaaagcgaattgtccgcaaagattgagtacatggaattaaaggaaatatccgttgatttgggcgatgggcttaaagtcagaactaaatatctgaaccatcccatactcagccttggctaccgttttgaatataaaggtaaatccatagtaaccgcttttgaccatgaacctttccgcaatctttttcctatagatccccaggatccaaattacatgaagaagccgccatga

SEQ ID NO: 62180 - protein, 199 aa, Unknown
  Obtained from environmental sample
  DOMAIN (26)...(191): Metallo-beta-lactamase superfamily
  misc_feature (1)..(199): Xaa is any amino acid
MFFVRFWGVRGSIPCPGPDTVKYGGNTTCLEIRADKRLIIIDLGTGAKPLADYLQANDSKQGPLDIDIFITHTHWDHIMGFPMFAPVFVPGTKLRIRGPVSYNDDTLASIIGDQLSYRYWPIRQSELSAKIEYMELKEISVDLGDGLKVRTKYLNHPILSLGYRFEYKGKSIVTAFDHEPFRNLFPIDPQDPNYMKKPP

SEQ ID NO: 62181 - DNA, 882 bp, Unknown
  Obtained from environmental sample
  misc_feature (1)..(882): n is a, c, g, or t
atggagcctttaatggaaactgacattggaaagagcttaaaggaatacataaaaaatatgcccagtcttcccacatcggttacgaaagtgctggaaatatgtaataacccccagaccagcccaatggatttgaaccatgttatttcccttgatcctgtattggtaggccgggtgctaaaactcattaattcagcctattatggggttggacagccagtgaccagccttgccagggctattatcatgctggggatcaataccgtaaaaaacctcgccctgtccacgacagtgataggccaactgagtccccagaaaaaatccatgggcctggatttggagggcttctggcggcattccctttgtgtgggggttgcggccaagtttttggccaagaagcgcggaattgattcgaaattaatcgaggaatactttactgccggtcttttgcatgatattggcaagatacctttaaacgcggttctttcaaagcagtacatggttacagtcagcaacgctgacagggaaaggaaaccccttacccttgcggaagaaaatgtttttggaataaaccattgcgtagccggcgaaattatcgccagcgcctggaaattggatggcgcgattggggacgcgataaaataccatcatagctatgaagaatatacgggaaacaacaaggatattctttacagcgtcgctgccgccaaccggtttgccacgctttcggtaattggtttttcaggagaacgccatcccgcccctcttcccaatatgatttgggaggcgttgaaagtttcccgggatgtttttgacgagatcgaagaaaaagtgaacgctgaaattgaaaaggctgaaattttccttaaaataggccatatataa

SEQ ID NO: 62182 - protein, 293 aa, Unknown
  Obtained from environmental sample
  DOMAIN (115)...(241): HD domain
  misc_feature (1)..(293): Xaa is any amino acid
MEPLMETDIGKSLKEYIKNMPSLPTSVTKVLEICNNPQTSPMDLNHVISLDPVLVGRVLKLINSAYYGVGQPVTSLARAIIMLGINTVKNLALSTTVIGQLSPQKKSMGLDLEGFWRHSLCVGVAAKFLAKKRGIDSKLIEEYFTAGLLHDIGKIPLNAVLSKQYMVTVSNADRERKPLTLAEENVFGINHCVAGEIIASAWKLDGAIGDAIKYHHSYEEYTGNNKDILYSVAAANRFATLSVIGFSGERHPAPLPNMIWEALKVSRDVFDEIEEKVNAEIEKAEIFLKIGHI

SEQ ID NO: 62183 - DNA, 645 bp, Unknown
  Obtained from environmental sample
  misc_feature (1)..(645): n is a, c, g, or t
ttgcctgaccttccaaaagaaactcaagcggaaccagcaaaggaaataccaatggagcctgtgaatgatctagtcggagaacctacgaaagaaattcctttgggggttcctccacccccgcaaaataacacccctccgcctaattatcggagttatccgccgccgattgtcttgttgggaatatcgccgatgccgcagccacaaacccctcctccgaaacaacagcctccgcaactccctcctccggagcagcagcctatagagcgtatgtctccggagcaagtgcaacccatgaaaccggagccagttcctttcgaagaagaggaagaaacgtttgaagagttgacgcttgatgaagaaatctttaaggaagaaatcccacaggttgaaattcagcaggatgaaatcctgaaagagccagaagaaccatcattggaagagctgccagaggagaaaacaccggagccaatcgaagataacaaacaggatggcgtatccaaagtggttgatcttcttggcttcctacacgggttaactgaggcgcttccggaagaacggcgaaaaacttatagcgaaggcaagcttcaaacaaccatgggatcggttattgatcgtttaaagaagctgactataatcaaagggtag

SEQ ID NO: 62184 - protein, 214 aa, Unknown
  Obtained from environmental sample
  misc_feature (1)..(214): Xaa is any amino acid
MPDLPKETQAEPAKEIPMEPVNDLVGEPTKEIPLGVPPPPQNNTPPPNYRSYPPPIVLLGISPMPQPQTPPPKQQPPQLPPPEQQPIERMSPEQVQPMKPEPVPFEEEEETFEELTLDEEIFKEEIPQVEIQQDEILKEPEEPSLEELPEEKTPEPIEDNKQDGVSKVVDLLGFLHGLTEALPEERRKTYSEGKLQTTMGSVIDRLKKLTIIKG

SEQ ID NO: 62185 - DNA, 495 bp, Unknown
  Obtained from environmental sample
  misc_feature (1)..(495): n is a, c, g, or t
atggcgagtgtttattttttaaagattgacggaatgnaaggccaggcttctgacaagaaacatgagaaatggctcgatctcatcagcttttcccatggagcggtgcagaatatcaatgttcaggcttcatcggacgtacagggcagggggcagtacatcccctttacttttacgcatttggcggacaaagcgacccccaaattgcagctttcctgcatgaagggcgaagtgatcaaaaacgccaagtttgagtattgcagggttctgggcggcgagcagactccggtgtacgaactgaccatgaacagcgtcagggtagcaaaggtggagatgaaaaccgtgaatcccaacccggatgacgccacttcccagcagcctgttgaagaggttcaacttgtcgcggcggagattacggttaaagtgactccgataaaacccgacggaaccaaagacggcgccattgagaccaagtggaatcaggtaaccaacagctaa

SEQ ID NO: 62186 - protein, 164 aa, Unknown
  Obtained from environmental sample
  DOMAIN (4)...(142): Protein of unknown function (DUF796)
  misc_feature (1)..(164): Xaa is any amino acid
MASVYFLKIDGMXGQASDKKHEKWLDLISFSHGAVQNINVQASSDVQGRGQYIPFTFTHLADKATPKLQLSCMKGEVIKNAKFEYCRVLGGEQTPVYELTMNSVRVAKVEMKTVNPNPDDATSQQPVEEVQLVAAEITVKVTPIKPDGTKDGAIETKWNQVTNS

SEQ ID NO: 62187 - DNA, 558 bp, Unknown
  Obtained from environmental sample
  misc_feature (1)..(558): n is a, c, g, or t
atggctgagcatatctctcccagggacggcgcatcgcggagcgatggcgcgtcactacgtgatgcgataaccaaagaagacatattctacaaaccgtttacccttaaaaggctgacggattatgatcctgccggaaagtcggaagcgtcctggaatctgatatcaagcaagcaattaaaagaggatgtttttgataatattgatatgctctttaattccaggtctcacgcgtctttaactgatcttaagggatataaagaagttgaagagtcggtcctgggttatggcatcatggatttctgcggcaggcagagttccaccgactcccgggaggccctgcgggaccacatcttcaagcagatacagttttttgagccgcggctggatcccgcgtcaataaaaattgaacaacttgacgcttcggagagcgattctaccaatataacgtttcggattggcgggaatataaaaataaaagaagtaaatgaagaaattgtttttatttcacggcttaatcttgaatcgggcaacgcggatttgcgtttggaaactaaatga

SEQ ID NO: 62188 - protein, 185 aa, Unknown
  Obtained from environmental sample
  DOMAIN (32)...(174): Protein of unknown function (DUF1316)
  misc_feature (1)..(185): Xaa is any amino acid
MAEHISPRDGASRSDGASLRDAITKEDIFYKPFTLKRLTDYDPAGKSEASWNLISSKQLKEDVFDNIDMLFNSRSHASLTDLKGYKEVEESVLGYGIMDFCGRQSSTDSREALRDHIFKQIQFFEPRLDPASIKIEQLDASESDSTNITFRIGGNIKIKEVNEEIVFISRLNLESGNADLRLETK

SEQ ID NO: 62189 - DNA, 1740 bp, Unknown
  Obtained from environmental sample
  misc_feature (1)..(1740): n is a, c, g, or t
atgaagaaattgtttttatttcacggcttaatcttgaatcgggcaacgcggatttgcgtttggaaactaaatgaagctatggaattattggattattaccgcgataatttaagctacctccggcatctctccggcgaattcgcggctgaatatcccaaaatagccaggcgccttttgctttccgaagttgattgtcaggacccgtatatcgagcggcttttggaagggacggcttttttagcggccagagtggaaaaaaagctggacgagagctattacccttttcttgaagctgtgcttaactctgtagccccggatgtcatttaccccattccctccggagctgtgctggaagttttcccggacgcctcggatgaaaatgtcaggaaagggacggtcattgaagctggtacggtttttgaagccactgttcccggcgtaaataccccttgccgtttttcctgcgcctcggcaagcccgatagtcccctttacaattattggcgcggaatatttaagccgggatgtcgcgaacatggggtttaaaaacgcccgcgcggaatcagccctgcggctccggttttctgttaccgggcatttcagcgggaaaatagcggcgtttcttgccctttcggaagccgacgcctccctgctcctgcggctgctcgccgaggatgtcgcgggggtgtacctcaacaataaaggagagtacacggctttggacggcgtcaaatttacggttcccctgcaaagcggggaagaactgtttgacaagggggcaaaatcaggaatccgtggcttgaggattttgcgtaattacctgaagtatccggacttctttaaatttttttcattttcaatcaagggcttgagttccacggcggcggaaaacggggcggaaattgtgatcgcctttaaacgccgcgaacagtccttggccgcggcggtcaaaccgtcatcagtccgggtaaactgcgtccccgcgctgaacctttattcacggcgttccaaccggattattctggaaaacgaatcctctgctaatccttatgaattccaccttgttcccgacagaaccgcaatgcgggactatgaggtagcagcggtaaaaaacattgatttttacaaccaaagaaacgatcaaattgcgcgagcctctaatttttatgacggggatccggtttctgaaagtcggaattttttttcaacaaaacgccggaaaaagccggtagagcggcgttctgccgcccgcagcagttacgacgggaccgaagtcttcgtgtctttttccggcttgcctgaaggggcatggcagtttgcggcggaccttttggtaaccaacagggatctccccctgctccttcccgacgggattactttgatttcttcttcttccattgcgccccgggctgtttttttatctcttcccacaaggcccgattatccccttgtcgaacacggtaaccgggaagatttttcacggcttagccatatcgtaatgaacctttcggcaatgctcttccgggaaggaacgcagaccctggtattactccgcaatatgctccgctcttatcccttacggccggcggaggagatggaacgcatgatagggggcatcatcgccctttccggaaaaagcgacacattccgcttcgtccggaacggaggggtattctacgaatggggctggcggataagcctggttttggatgagaacgccctatgcggcatggggttttaa

SEQ ID NO: 62190 - protein, 579 aa, Unknown
  Obtained from environmental sample
  DOMAIN (26)...(579): Bacterial protein of unknown function (DUF879)
  misc_feature (1)..(579): Xaa is any amino acid
MKKLFLFHGLILNRATRICVWKLNEAMELLDYYRDNLSYLRHLSGEFAAEYPKIARRLLLSEVDCQDPYIERLLEGTAFLAARVEKKLDESYYPFLEAVLNSVAPDVIYPIPSGAVLEVFPDASDENVRKGTVIEAGTVFEATVPGVNTPCRFSCASASPIVPFTIIGAEYLSRDVANMGFKNARAESALRLRFSVTGHFSGKIAAFLALSEADASLLLRLLAEDVAGVYLNNKGEYTALDGVKFTVPLQSGEELFDKGAKSGIRGLRILRNYLKYPDFFKFFSFSIKGLSSTAAENGAEIVIAFKRREQSLAAAVKPSSVRVNCVPALNLYSRRSNRIILENESSANPYEFHLVPDRTAMRDYEVAAVKNIDFYNQRNDQIARASNFYDGDPVSESRNFFSTKRRKKPVERRSAARSSYDGTEVFVSFSGLPEGAWQFAADLLVTNRDLPLLLPDGITLISSSSIAPRAVFLSLPTRPDYPLVEHGNREDFSRLSHIVMNLSAMLFREGTQTLVLLRNMLRSYPLRPAEEMERMIGGIIALSGKSDTFRFVRNGGVFYEWGWRISLVLDENALCGMGF

SEQ ID NO: 62191 - DNA, 2184 bp, Unknown
  Obtained from environmental sample
  misc_feature (1)..(2184): n is a, c, g, or t
atggaaaagcggatacttgtaatagacgactttcattgcattgaggacccggcggtgcttcgtgtcatggaagaaggtttcttcaggaatatgctgccggggacatcggtgtttttaatttcccgttccatatcccgcataaataccgcggatctgctttcccgcgatcagatattcaatataaccgaaaacgacttccgttttaccgaaaacgagctcagccagtattttcgcgggattggcgtttcattccagccggacagcctgcgcgagatcatgcaggataccgaaggctgggccttcgcgattaaccttatagcccgctcctgccagagagcgcccggttacggcggctatgtgcgtaacgcgatgaagcaaaatatcttccggcttctggaaacggaaatatgggacgggctgtcggaaaaccttcagaatttttttgtccgcctgtcgcttatcgagcatctgtccgttgacctgattgcccggctgacagggggtgatgaagagttaatcgccgggctggaaaaacaaagcgcctatgtgcgccgggacacctatatcaacgcgtaccttatccatccgctgcttctggaatttttaaaaacaaagcaaactttgcttacggaagaacaaaaaagggaaacctatgatgttgcgggcgattggtgcgccaataacggttttacgatagacgccctattctaccatgaaaagacgggaaactatcagtcaatactgctgattttagcagggttaaccactcaaataccgcaggatatcgcgaaatacgcggctgatattcttgaccgcgctcccgaggacgcgtttgacagggcggagttccttgcggatatgcacctgcgtacctatatatgccagggattactggaaaaatcacttgagttggtgaaacactacgaggcaaaattcctgaaaaaaccagatgctgaccctgtaaaaaaccgcaccttgacaaggctctatatttgctggacctacatacgctgtttaatgagcgtaacagatgacattttcgattttgatatttatcttgaaaaagcctgcgagctcgcgcgtgaggcggactccggcaaactggacatttattatcccggggcgtggatcaacttcgccggttcctcaaggaagggaagccccgaggaatgtattgccgccattacgcgtaacagggatcatatacaaaagagttatatgaaagggttcatggcgggagaactggaactggccaggggagaactggaattctaccgcggcgatatgtccgccgcagagtcccatatcgtgctcgcggtgaagcaggcgcgggcggaaaaacagtttgggcttatgcacagggccttgttatacgccatgcgcatagccgccgcgcagggaaattttgccattatggaacaaacgctgaaagaaatcaaagctcagctggacgaagccgaataccttaaccgttttatggattacgatattgccgtttcctggtattattgttttctgggaatgccggaaaaagcaaccaggtggcttcaggaggatttttcgccttacattcatgccgcttttattgaaaattttgggaatcagataaaggcgcgcttctgttatgccacaagtaatttttcccctgttctggcgtatatcgaggaaatgaaagcgcgggaatcaatcttgttcggacggatagaaatgctggcgatggaagcctgcatacattacaaaatgaaaaacaaaaagaaggctttttccagcctggctgaagcatatgagaacgcgcatcccaacggcatcttgatgccgtttatagagctgggaagagacatgcgcacccttacggccgtcgcgctaaaacatccaggcggcataattcccaaaccctggctggaagatgtcaaccgcagagccgcctcatacgccaaacgccgcacccatgttatcgctgaatacaaaaaggcctacggcataagcgacgggatcgttttatctccaagggaagcggatatcctgacagatctttcccacggcctttcgcgtgtggaaatagcgaccaaccgcaacctgtcggtcaacaccgtaaaaatggtgataaatatgctctacacaaaagtcggcgcagaaaacctggccgatctagtccgcatcgcgatagagcaaaagttgatctag

SEQ ID NO: 62192 - protein, 727 aa, Unknown
  Obtained from environmental sample
  DOMAIN (664)...(721): Bacterial regulatory proteins, luxR family
  misc_feature (1)..(727): Xaa is any amino acid
MEKRILVIDDFHCIEDPAVLRVMEEGFFRNMLPGTSVFLISRSISRINTADLLSRDQIFNITENDFRFTENELSQYFRGIGVSFQPDSLREIMQDTEGWAFAINLIARSCQRAPGYGGYVRNAMKQNIFRLLETEIWDGLSENLQNFFVRLSLIEHLSVDLIARLTGGDEELIAGLEKQSAYVRRDTYINAYLIHPLLLEFLKTKQTLLTEEQKRETYDVAGDWCANNGFTIDALFYHEKTGNYQSILLILAGLTTQIPQDIAKYAADILDRAPEDAFDRAEFLADMHLRTYICQGLLEKSLELVKHYEAKFLKKPDADPVKNRTLTRLYICWTYIRCLMSVTDDIFDFDIYLEKACELAREADSGKLDIYYPGAWINFAGSSRKGSPEECIAAITRNRDHIQKSYMKGFMAGELELARGELEFYRGDMSAAESHIVLAVKQARAEKQFGLMHRALLYAMRIAAAQGNFAIMEQTLKEIKAQLDEAEYLNRFMDYDIAVSWYYCFLGMPEKATRWLQEDFSPYIHAAFIENFGNQIKARFCYATSNFSPVLAYIEEMKARESILFGRIEMLAMEACIHYKMKNKKKAFSSLAEAYENAHPNGILMPFIELGRDMRTLTAVALKHPGGIIPKPWLEDVNRRAASYAKRRTHVIAEYKKAYGISDGIVLSPREADILTDLSHGLSRVEIATNRNLSVNTVKMVINMLYTKVGAENLADLVRIAIEQKLI

SEQ ID NO: 62193 - DNA, 1905 bp, Unknown
  Obtained from environmental sample
  misc_feature (1)..(1905): n is a, c, g, or t
atgataataaaccttgtcaaatcattaagaaaatacgttaataaaacattccttgttttttccggaatactttttctggttattgctttgtcaactattactgtatttatattttccgcaaataaaaccaaccgtttttttattaagcagcagctctcaatagcgtcagaaacaatgcggcttcgtttggcaagaacggtaaacagtgaacttgcgcttgtactaaaaatggcggatactccggttattagacagtactttatgaatccttctgatccggctcttaaagctctggctgacaccgaatttactctttataaagaacattttgataataaaatggttttctgggatcatgatatagataaaattttttattcgacgggaaacgagccgtatgttgtcgatcccggcgatccggcgtcttattggtataatttaacgctgtacgaaaccgaaaaatataatttcaacattaattataaccccgatttggatcaaatcaacctttgggtaaatgtccctgtatttgccgacttgcgcggcgataaaaagcccatagggatgcttggaataggcataaaccttaccgacttttcaaattttgcggcttcaagctattgggaattcgacaagaatatcacgccttatatgtttaataaatacaacgagattacttccgctgcggattataacctggtagaaaacaaaatccgtcttgacgaactgctgggagataccggaaaagaattgatcagggcttcccatgaactttccgcaggggaaatacggagttttgtttacgataaaaaaatataccttttaaactccattccggaaatggaatggtatctggcggtaagttatcctatacccggtttctgggcgcttaaccgcgccatgaacatcgtgtttttcagcatgctgttcctgatactgttccttttcatcattattaacgtatatatcgcccgttcggaaaacgagatagcgaagcaaaacctgcagttgatcgaggcaaacaggaaagcggaattcgcgtctcaggcaaaaagcgattttctggccaagatgagccacgaaatacgcacccctatgaacgccattaccggaatggcggaactgctgattaggggggaactatcaggcgaagccctnggctacgcgcaggacataaaacaggctgggaataatcttgtctccataattaatgacattctggatttttcaaaaatcgaatcgggcaaactggaaatcatccccatcaactacctgctttcatccctgatcaacgatacgatcaatattatccgtatgcggctaatggaaaaacctctgcggttctttacaaatatagacagtaatattccaaacagccttatcggggatgaaacgcggctgcgccaaatcctccttaacctcctgtccaacgccataaaatactcggagagaggccatgttggtttagccattaccacagacaagcgggatgataaacaggtatggctcaggataaccgtgtccgataccggaaaagggataagacatgaggatcaggaaaaactcttcgacgaatttgtcaaagtggacgtaaagaaaaaccagggtatagaaggaacggggctgggcctggcaataaccaaaagcctctgtatcgctatgggcggctatataagcatggaaagcgaatacggcaaaggcagcgtgttcacggcgttgattccccagggaattgaaacggatacgcccttcgccgcggtagatgagccggaaaaaaagaaagtgctggtctatgagggcagaatcaattacgccaaatcggtgtgctggactctggaaaacatgaaagttccttatgctatggtgacaaacccaggaggatcttgccgttgcgctttatcttga

SEQ ID NO: 62194 - protein, 634 aa, Unknown
  Obtained from environmental sample
  DOMAIN (350)...(415): His Kinase A (phosphoacceptor) domain
  misc_feature (1)..(634): Xaa is any amino acid
MIINLVKSLRKYVNKTFLVFSGILFLVIALSTITVFIFSANKTNRFFIKQQLSIASETMRLRLARTVNSELALVLKMADTPVIRQYFMNPSDPALKALADTEFTLYKEHFDNKMVFWDHDIDKIFYSTGNEPYVVDPGDPASYWYNLTLYETEKYNFNINYNPDLDQINLWVNVPVFADLRGDKKPIGMLGIGINLTDFSNFAASSYWEFDKNITPYMFNKYNEITSAADYNLVENKIRLDELLGDTGKELIRASHELSAGEIRSFVYDKKIYLLNSIPEMEWYLAVSYPIPGFWALNRAMNIVFFSMLFLILFLFIIINVYIARSENEIAKQNLQLIEANRKAEFASQAKSDFLAKMSHEIRTPMNAITGMAELLIRGELSGEALGYAQDIKQAGNNLVSIINDILDFSKIESGKLEIIPINYLLSSLINDTINIIRMRLMEKPLRFFTNIDSNIPNSLIGDETRLRQILLNLLSNAIKYSERGHVGLAITTDKRDDKQVWLRITVSDTGKGIRHEDQEKLFDEFVKVDVKKNQGIEGTGLGLAITKSLCIAMGGYISMESEYGKGSVFTALIPQGIETDTPFAAVDEPEKKKVLVYEGRINYAKSVCWTLENMKVPYAMVTNPGGSCRCALS

SEQ ID NO: 62195 - DNA, 396 bp, Unknown
  Obtained from environmental sample
  misc_feature (1)..(396): n is a, c, g, or t
gtgggaacgggcggaactgtgaccggagccggaaaattcttaaaatcgaaaaaatcaagtgtcaaaattgtcgccgtggaacctgccgcgtctccggtgctttcgggcggaaagcccagcccgcataaaattcagggtatcggagcgggttttgtacctcaggtttatgatccttccgtcatcgacgaaatttatcaaaccgatgaagtaaaagccggaaacacggcgcggcgactcgcgagggaagaaggcatcattgtggggatttcgtccggttcggttcttgaagccgctcttaccgtagcaaaacggcctgaaaacaaaggcaagacaatagtggccgtattaccggacaccggcgagcgttacctgtcgacatggttgtgggaagaatga

SEQ ID NO: 62196 - protein, 131 aa, Unknown
  Obtained from environmental sample
  misc_feature (1)..(131): Xaa is any amino acid
MGTGGTVTGAGKFLKSKKSSVKIVAVEPAASPVLSGGKPSPHKIQGIGAGFVPQVYDPSVIDEIYQTDEVKAGNTARRLAREEGIIVGISSGSVLEAALTVAKRPENKGKTIVAVLPDTGERYLSTWLWEE

SEQ ID NO: 62197 - DNA, 963 bp, Unknown
  Obtained from environmental sample
  misc_feature (1)..(963): n is a, c, g, or t
ttgaaggagttgtttatggcaacaacagaattaaacgcgctgaataaggcgcaggcataccaactggcggatattaccaaaaccccgcctcaattcggagcgattacaccgcgctggctgacacgtttcttggaattcaaagggctggaagccggcatttaccgcgtaaacaaagtggtcgaaggggaaacgccgcttgacgttctatgctcatcggaaaaaaagagcgcggaaattcccgaaggatatgtgcagtatcagcagaagcccagagaatacaccctcaactcaatttctaccattataaacgtggataccgcggtggaggacgtatattcttcgccatacgaccagacaaaagaacagctccatctggcgattgaaagcctgcgcgaaaggcaggagagccagattatcaacaatgatgattacggcctgttaaaaaatatttccgagggccagcggataaggcccggaaataaagcgggttcccccatgcccgacgatctggacgaactgctttcaaaagtatggaaagatccgtcgtttttcctggcgcacccgcgggctgtcgccgcttttcagcgcgaatgtacgcgcaggggcgttcctcccgctaccacatccctttttggcggcacgtttattctgtggcgcggtattcccatcatacctacggataaaatgctggtggacggcctgaaaaaccccaaaagcaagagcggcaagaccaatattctcttggtgcgtaccggcgaagcaaaacgcggggttgtcggcctgtaccagacgggcctgcagaacgaacaaggcaggggactttccgtgcgtttcaggggagtggacaacaaaggactggcttcctatctcctgtcgctgtattgctcagccgcaattctttcagacgacgctatagccgttcttgaagatgtggaagtgggtaactactatgattacagctaa

SEQ ID NO: 62198 - protein, 320 aa, Unknown
  Obtained from environmental sample
  misc_feature (1)..(320): Xaa is any amino acid
MKELFMATTELNALNKAQAYQLADITKTPPQFGAITPRWLTRFLEFKGLEAGIYRVNKVVEGETPLDVLCSSEKKSAEIPEGYVQYQQKPREYTLNSISTIINVDTAVEDVYSSPYDQTKEQLHLAIESLRERQESQIINNDDYGLLKNISEGQRIRPGNKAGSPMPDDLDELLSKVWKDPSFFLAHPRAVAAFQRECTRRGVPPATTSLFGGTFILWRGIPIIPTDKMLVDGLKNPKSKSGKTNILLVRTGEAKRGVVGLYQTGLQNEQGRGLSVRFRGVDNKGLASYLLSLYCSAAILSDDAIAVLEDVEVGNYYDYS

SEQ ID NO: 62199 - DNA, 963 bp, Unknown
  Obtained from environmental sample
  misc_feature (1)..(963): n is a, c, g, or t
ttgaagatgtggaagtgggtaactactatgattacagctaacggatacgggctgcctgatccggaagaacttgaaaggtgggctttggcatattttcccgaatttcagaaaccaaagtccggtaatgaagacgcccggaccgcgtattctcccgttgtcgcgtcttataaagacgcgcatccatatacaaccacgccctccggtacgccttccggagaggcgctttttaaaagctcccctttgggtgcgggcggttttgacgtaaaccgcatccgccgggattttcccatcctgaacgaaaaggtctcgggcggcaaacagcttgtctggcttgacaacggcgcgacgacgcaaaaacccaacgctgtgatagaccgtatttcgtatttctacaggcacgagaattcaaacgtccaccggggcgcgcacgaattggccgcccgttctaccgacgcttacgaagcggcgcgggaaaccgtcgcgaaatttcttggcgcgccgtcaaaggacaatatcgtgtttgtgcgcgggacaaccgaagggatcaaccttgcggcgcaggcctatgtgaaacccctgttgagtcgcggcgatgaaataatactcactattcttgaacaccacgcgaatattgtcccctggcagatgatagcgcaggaaaccggcgcactgataaaagtcgccccggttgacgataccggtcagattattctgtccgaatacgcgcggctcttcagccccaggacaaagtttgtttcggtgacccatgtttcaaacgccctgggaaccattaccccggttcgggagatgattcaaatcgcccacggaaacggagcgcgcatccttgttgacggggcgcaatcggttgcccacacgccgttaaacgtaagcgaactggacgcggatttttttgtcttttcggggcataaaatattcgggcctacgggcataggccctttgtaa

SEQ ID NO: 62200 - protein, 320 aa, Unknown
  Obtained from environmental sample
  DOMAIN (109)...(320): Aminotransferase class-V
  misc_feature (1)..(320): Xaa is any amino acid
MKMWKWVTTMITANGYGLPDPEELERWALAYFPEFQKPKSGNEDARTAYSPVVASYKDAHPYTTTPSGTPSGEALFKSSPLGAGGFDVNRIRRDFPILNEKVSGGKQLVWLDNGATTQKPNAVIDRISYFYRHENSNVHRGAHELAARSTDAYEAARETVAKFLGAPSKDNIVFVRGTTEGINLAAQAYVKPLLSRGDEIILTILEHHANIVPWQMIAQETGALIKVAPVDDTGQIILSEYARLFSPRTKFVSVTHVSNALGTITPVREMIQIAHGNGARILVDGAQSVAHTPLNVSELDADFFVFSGHKIFGPTGIGPL

SEQ ID NO: 62201 - DNA, 447 bp, Unknown
  Obtained from environmental sample
  misc_feature (1)..(447): n is a, c, g, or t
atgataaaggatgtaacttttgagcgcactatttacaacgaccctccggtcaagtttgaagcgggaacaggcaatatcgcggacgcggttggcctgggcgcggcgctggattatgtttccagcatagggctcgcaaacatcagcgcctatgaccacgacctgcttgattacgcgacacgggaatcgaaacgcataaacgggctgcgccttatcggcaccgcgccggaaaaggcgagcgtcctgtcttttgtgcttgacaacgcgagcgtggagcaggttggcaaacacctttcaagctgcggaatcgccgtgcgcgccgggcaccactgcgcccagcccataatgcgccgctttggactggaagtgacagtgcgcccgaccatcgcgttgtccaacacagctgaagagattgacaaactggtaagcgcaataaaagagattgcgtaa

SEQ ID NO: 62202 - protein, 148 aa, Unknown
  Obtained from environmental sample
  DOMAIN (1)...(140): Aminotransferase class-V
  misc_feature (1)..(148): Xaa is any amino acid
MIKDVTFERTIYNDPPVKFEAGTGNIADAVGLGAALDYVSSIGLANISAYDHDLLDYATRESKRINGLRLIGTAPEKASVLSFVLDNASVEQVGKHLSSCGIAVRAGHHCAQPIMRRFGLEVTVRPTIALSNTAEEIDKLVSAIKEIA

SEQ ID NO: 62203 - DNA, 720 bp, Unknown
  Obtained from environmental sample
  misc_feature (1)..(720): n is a, c, g, or t
ttggaagtattgccgcttaagcacggccttgcgcaattccctgcgtataaggccggcgtccagctcctcgcccgccaaatattnttcggtaatggaatcggaaacactggaaagggcgtcgataagtttttcccgccattccttcgccgctttttccctttcctgcgcgatcggcgaaaacgtcatgttctcgccttcgttaccgtcccagcgtatctcccgcatatcaaccagatcgataacgccttcaaaagcgctatccgtaagaatgggtatctgcagcgcgacaggattggttccgagcttttcccgcacatcctcaagcacaaaatagaagtccgcgcccagcctgtccatcttgttcacatagccaacgcagggaacctggtaacgctgcgcctgccgccaaactgtctcggtctgtggttccaccccgtgcaccgcgtcaaaaatggcgatagcgccgtccagcgcccgcagggatctctctacttccgcggtaaagtccacatggcccggagtgtcaataatgttaatttgatgttttttccaataggtggttgtcgccgcgctttggatcgtgattccccgctgctgctcctgctccatccagtccatgatcgcctcgccgttgtccacctcgccaatcctgtggcttttgcctgtataaaaaagaatacgttcagtggtggtggttttcccggcgtaaatcggctataa

SEQ ID NO: 62204 - protein, 239 aa, Unknown
  Obtained from environmental sample
  misc_feature (1)..(239): Xaa is any amino acid
MEVLPLKHGLAQFPAYKAGVQLLARQIXFGNGIGNTGKGVDKFFPPFLRRFFPFLRDRRKRHVLAFVTVPAYLPHINQIDNAFKSAIRKNGYLQRDRIGSELFPHILKHKIEVRAQPVHLVHIANAGNLVTLRLPPNCLGLWFHPVHRVKNGDSAVQRPQGSLYFRGKVHMARSVNNVNLMFFPIGGCRRALDRDSPLLLLLHPVHDRLAVVHLANPVAFACIKKNTFSGGGFPGVNRL

SEQ ID NO: 62205 - DNA, 1911 bp, Unknown
  Obtained from environmental sample
  misc_feature (1)..(1911): n is a, c, g, or t
gtggacaacggcgaggcgatcatggactggatggagcaggagcagcagcggggaatcacgatccaaagcgcggcgacaaccacctattggaaaaaacatcaaattaacattattgacactccgggccatgtggactttaccgcggaagtagagagatccctgcgggcgctggacggcgctatcgccatttttgacgcggtgcacggggtggaaccacagaccgagacagtttggcggcaggcgcagcgttaccaggttccctgcgttggctatgtgaacaagatggacaggctgggcgcggacttctattttgtgcttgaggatgtgcgggaaaagctcggaaccaatcctgtcgcgctgcagatacccattcttacggatagcgcttttgaaggcgttatcgatctggttgatatgcgggagatacgctgggacggtaacgaaggcgagaacatgacgttttcgccgatcgcgcaggaaagggaaaaagcggcgaaggaatggcgggaaaaacttatcgacgccctttccagtgtttccgattccattaccgaanaatatttggcgggcgaggagctggacgccggccttatacgcagggaattgcgcaaggccgtgcttaagcggcaatacttccaatccctaacgggggcatcccgccgtaacatgggggtacagcctgtcattgacgctattgttgattacctccccgcgcctgatgaaataccgcccgccgtgggtcttcatcttaaaaaagaacaggatgtcagcgtgccgtgcgatcctaaaggtcagcctctgggcatagttttcaaaatacaaaatgaccgcgaagccggaagcctgtgctatgtgcgcatgtattccggttcgatcaagccgggcgcggcggtttataatatcggtaaaaaaaagagggagcgcgcaaaccgtattctgcggatgcattccaacaagagcgacgcgatggacgagttaagcgccggtgacattggcgtgatcatcgggatgaagctggcgcagaccggcgatactatagggagcgagggctggccggttctgctggaaaagatgcaattccccgagccggtgatctccgtttccattgagcctaaaacaatttccgagcaggacaagcttaaagacatactttcgattctttccaaagaagaccccacatttaccaccagggaaaacgaggaaacaggacagctaattatttccggcatgggagaattgcatctggatgttttggttacccgtatactcaaagagtacaaccttggcgcaaaggtagggaagccccaggtcacataccgcgagtcgataagcgccgccgtcgagcgaaccgaaaacttctcccgtgtgatcgcaggcaaggaaaacgccgcgggcttaaccctgcgggtggaaccggcgaaacgcgggacaggaaacaagtattcctgcgttgttaaaaacagcgagatacctgaggagattttcaacgcggtggaacgcggcattaccggagtattttcttccggaaatcgtatgggttacccctgcattgatattatggtgactgtcaccgggatacagtattcggaattgaacggcacggaattcgcctttgaagcctgcgccagcatggcgtttgacgaagcctgccgcgccgcttctcccatattacttgaaccgatcatggctgttaaccttatcagcccccatgaatttgtaggcgaggtgatgggccttgtcacccagcgcggcggtcaaattttcagcatggacgcgaaagccgacatcgacgaaataaaagcccaggcgcccatggcgcagatgttcgggtttatgacctcgctgcgcagtgtaagccagggccgcgccagtttcagcatggaattttcgcatttcgagaagaagaaataa

SEQ ID NO: 62206 - protein, 636 aa, Unknown
  Obtained from environmental sample
  DOMAIN (280)...(347): Elongation factor Tu domain 2
  misc_feature (1)..(636): Xaa is any amino acid
MDNGEAIMDWMEQEQQRGITIQSAATTTYWKKHQINIIDTPGHVDFTAEVERSLRALDGAIAIFDAVHGVEPQTETVWRQAQRYQVPCVGYVNKMDRLGADFYFVLEDVREKLGTNPVALQIPILTDSAFEGVIDLVDMREIRWDGNEGENMTFSPIAQEREKAAKEWREKLIDALSSVSDSITEXYLAGEELDAGLIRRELRKAVLKRQYFQSLTGASRRNMGVQPVIDAIVDYLPAPDEIPPAVGLHLKKEQDVSVPCDPKGQPLGIVFKIQNDREAGSLCYVRMYSGSIKPGAAVYNIGKKKRERANRILRMHSNKSDAMDELSAGDIGVIIGMKLAQTGDTIGSEGWPVLLEKMQFPEPVISVSIEPKTISEQDKLKDILSILSKEDPTFTTRENEETGQLIISGMGELHLDVLVTRILKEYNLGAKVGKPQVTYRESISAAVERTENFSRVIAGKENAAGLTLRVEPAKRGTGNKYSCVVKNSEIPEEIFNAVERGITGVFSSGNRMGYPCIDIMVTVTGIQYSELNGTEFAFEACASMAFDEACRAASPILLEPIMAVNLISPHEFVGEVMGLVTQRGGQIFSMDAKADIDEIKAQAPMAQMFGFMTSLRSVSQGRASFSMEFSHFEKKK

SEQ ID NO: 62207 - DNA, 567 bp, Unknown
  Obtained from environmental sample
  misc_feature (1)..(567): n is a, c, g, or t
ttgccggcggacagaagagaacttgttttttcttctctaaattggtattttgttaatatgaatccgctgattgaaaaacggcaaagcataagaaaattcaaaaacaatccggtaacacgcgaacagcttgatcaactgctggctgcggcaatgcacgcgccctccgcgtgtaacacgcgtccctgggaatttatagctgtcacaaaacgggaaacgcttgatgaaatcgtccggacgcatccttacgccggtatgtgcgcgactgccacagccgcgattattgtcgtggcaatcccgcaaactgaccctaacggaccaataggatatttcccgcaggactgcgccgccgctacgcaaaacattctgctggaagcggtatcaatggggcttggctgctgctggtgcggcgtgtatcccagagaggaacgcatagcttctatccggaaactctttaagattgaggaagcgaaaatcccgtttaacgtcattgccataggagtccccgatgaaacccccgtccgcaggggcttctttgacgaaaaaaaaattacttatattggggagtaa

SEQ ID NO: 62208 - protein, 188 aa, Unknown
  Obtained from environmental sample
  DOMAIN (24)...(167): Nitroreductase family
  misc_feature (1)..(188): Xaa is any amino acid
MPADRRELVFSSLNWYFVNMNPLIEKRQSIRKFKNNPVTREQLDQLLAAAMHAPSACNTRPWEFIAVTKRETLDEIVRTHPYAGMCATATAAIIVVAIPQTDPNGPIGYFPQDCAAATQNILLEAVSMGLGCCWCGVYPREERIASIRKLFKIEEAKIPFNVIAIGVPDETPVRRGFFDEKKITYIGE

SEQ ID NO: 62209 - DNA, 2937 bp, Unknown
  Obtained from environmental sample
  misc_feature (1)..(2937): n is a, c, g, or t
atgtttgacgccatgccgttaggcgcgagctatcacgacgctaatttaaaaaccatagactgtaatgagggaatggttaaattatacggcttatcaagcaaaaaggaatttatcgacaaatttaatgagctttatcctgagtaccagcctgacggaagtttatcaaaaaagaaacttgccgataatattaatcaagcgtttgtagacggttatttatgcaaagagtggatgagtcagaaccttaaaaatgagccaataccttgcgaagtcacgctcgtgcgggttaaacattatgacgattttattatagcggcctatatgagggatttacgcgagataaaagccgcggttaccgaaatgaatgaatcaatacaggcgtttaaccttttggaaaacatgctgaacaacctcaatacgatgatttatgttaatgttccccaaacaggtgaaattttatttattaacaactatatgaagaagcattttaaggttgaaggcgattatttggggaagtattgttataaattgtttcttaaaggacgggataaaatgtgtgaattttgcccctgccctaaacttactgaaaatcctaaaggtattattgaatgggaaatgcttaaccccgtgacaaaccgcatataccgaaataccagccgttttatggaatggtccgacggaagaacagtccatattcaaaattcagtcgatataaatgagataattatggcaaaagagcaggcgattaaggctaacaacgcgaaaagcgattttctcgcgaaaatgagccacgaaatccgcaccccgatgaacgcaattacgggcatggcggaactgcttttgaggggaaatctaccggaaaaagcccatagttatgcgcaggatattaaacaggcggggaataacctcgtttcgataattaacgatattcttgatctttcaaaaatagaagcggggaaattggaaatagttcccgccaaatatatgctttcatctttaatcaacgatacagccaatattatccgtacgcggcttaaagaaaaaccgatacggttttttacgaacatcgacgggaatattcccaatagccttatcggagatgaagtacgaatgcgccagattcttcttaacctgctgtccaatgcggtaaaatacacggaaaaggggcatatcggtttatccattacggtagataaacaggacgataaacaggtcttgcttagaatagatgtgaccgatacaggaaaaggaataaaaccggaacatctggcgaacctatttgacgagtttgtccgggtagatataaagaagaaccagggcattgaaggaaccgggctggggcttcccattaccaaacggctctgtacggctatggacgggaaaataagcatggaaagcgaatacggcaagggcagcgtattcacggtaattatcccgcagggctttgaatcaaaagcgccttttgccgccgtggaagagccggataaaaagaagatacttgtctacgaaggcagatccgtctacgcaggggctgtatgctggacattgaaaaacttaaacgttccctatactttggtagtgaatcaggaagaatttgccgccgctttataccgggaagaatggttctatgttttttcaagctacggcctttacgataaaattaaacctgttatagaacaggatgattccgctttttacaaagggataaagccgcccatggctttgatggtggaatggggaaccgaagcttatgtgccgggcgtgcggtttgtatccatacctatacaatccctgtctattgccaatattcttaacggcaaaacggacagcaaagacgaaaaaaatacgggtattttccgtttcagcttccccggcgcgcggcttctggtggtggatgatatcgcgactaacctgaaagttgtcgagggcctacttacgccttacaagacaatagttgatacctgtactaacggtttgcaagccatagaatttgtaaaaaacgcctctttcagaaaacgcgattacgacattgttttcatggatcacatgatgccgggaatggacgggattgaagcgacagccgcaatccgcgagtgggaaaatgaacaaaatgaaaaaataaaaacaaattccgccaatagtgaaactcaaagcagtgacaggtatttgctccggcaaatacccattatcgcccttacagcaaacgcggttgtgggaatgcgggaaatgtttatcgaaaaaggctttaatgattttatctccaagcccatagatgtttccaaactggatgaaattcttaaccgttggatacctgaaggaaaaaggaaagaggaaaaagagaaaaaggaagatggaaaagaacatgttatctggataaaaatccacggcgttgatacggcaaagggcatttccctgaccggcgggactctcgaagcttatttacaggtattagctttattccttaaagacgtgaaagacaggctgcctttgtttcaagagatgccgaatgccgataatatgtcaatgtttattaccaatgttcacgccctgaaaagcgcgtccgcaagtttgggagccgcggaagtttccacgattgcagcggagcttgaagccgccggcaaggcctcggatatggtctttatcaacaaacaactgcccgtttttgaacagctgcttgcggaactggcgtacaatattgagacagtcctgaaaacaaaaacatctgaaagccgggatcttcccaaagacgacacccctctccccaccgcttattaccatatgtttaatgaacttgccaacgcgataaaatccaaaaaatccgccgacattgacaggcttctggaagaactcaatcacaagccgctggacgtgaaaacaagggaaacgctgaataaaatttccgatgaaattttaatgactgaatttgacaatgcgctttaa

SEQ ID NO: 62210 - protein, 978 aa, Unknown
  Obtained from environmental sample
  DOMAIN (814)...(897): Hpt domain
  misc_feature (1)..(978): Xaa is any amino acid
MFDAMPLGASYHDANLKTIDCNEGMVKLYGLSSKKEFIDKFNELYPEYQPDGSLSKKKLADNINQAFVDGYLCKEWMSQNLKNEPIPCEVTLVRVKHYDDFIIAAYMRDLREIKAAVTEMNESIQAFNLLENMLNNLNTMIYVNVPQTGEILFINNYMKKHFKVEGDYLGKYCYKLFLKGRDKMCEFCPCPKLTENPKGIIEWEMLNPVTNRIYRNTSRFMEWSDGRTVHIQNSVDINEIIMAKEQAIKANNAKSDFLAKMSHEIRTPMNAITGMAELLLRGNLPEKAHSYAQDIKQAGNNLVSIINDILDLSKIEAGKLEIVPAKYMLSSLINDTANIIRTRLKEKPIRFFTNIDGNIPNSLIGDEVRMRQILLNLLSNAVKYTEKGHIGLSITVDKQDDKQVLLRIDVTDTGKGIKPEHLANLFDEFVRVDIKKNQGIEGTGLGLPITKRLCTAMDGKISMESEYGKGSVFTVIIPQGFESKAPFAAVEEPDKKKILVYEGRSVYAGAVCWTLKNLNVPYTLVVNQEEFAAALYREEWFYVFSSYGLYDKIKPVIEQDDSAFYKGIKPPMALMVEWGTEAYVPGVRFVSIPIQSLSIANILNGKTDSKDEKNTGIFRFSFPGARLLVVDDIATNLKVVEGLLTPYKTIVDTCTNGLQAIEFVKNASFRKRDYDIVFMDHMMPGMDGIEATAAIREWENEQNEKIKTNSANSETQSSDRYLLRQIPIIALTANAVVGMREMFIEKGFNDFISKPIDVSKLDEILNRWIPEGKRKEEKEKKEDGKEHVIWIKIHGVDTAKGISLTGGTLEAYLQVLALFLKDVKDRLPLFQEMPNADNMSMFITNVHALKSASASLGAAEVSTIAAELEAAGKASDMVFINKQLPVFEQLLAELAYNIETVLKTKTSESRDLPKDDTPLPTAYYHMFNELANAIKSKKSADIDRLLEELNHKPLDVKTRETLNKISDEILMTEFDNAL

SEQ ID NO: 62211 - DNA, 3438 bp, Unknown
  Obtained from environmental sample
  misc_feature (1)..(3438): n is a, c, g, or t
gtggcgcacgccttaagcgaagtaatcgcgatttatccgattaccccttccagtcctatgggtgaattctccgatgaattttccgcccaggggcgtaaaaacatctggggaactatcccgaatgttgtagaaatgcagtccgaagcgggagccgcggcggctgttcacggagcgttaacaacaggagcgctgtccgtaacatttaccgcttcccagggccttctgctcatgattcccaccatgtacaagattgccggggaactcacttccacggtattccatatttccgcacgcgcgttggcgacgtccagcctttcaattttcggcgatcaccaggacgttatggcctgccgccagaccggctgggctatgattgcttccaacaatgttcaggaagtaatggacatggcgtgtatttcccacgcttcaaccatgcgttcccgcgtgcctttccttcatttctttgacggtttccgcacaagccacgaactgcaaaatatcgaggaaatctcctacgacgtaatgcatcagatgattgacgatgatcttgtaaccgcccaccgcgcaagagggttaaatcctgaaaacccgagtatccgcggaacagcgcaaaacccggacacttatttccagagccgcgaaggcgtaaacaagtattacgaaaaagtccccggtatcgttcaggcggaaatggacaaatacgcgaaacttacaggccgcgcttaccatgtctttgattactacggcgcgaaagacgctgaaaatgtaatcatcataatgggctccggcgccgatacctgcgaagagacaatcgactaccttaacggcaaaggcggaaaaacaggcatgataaaagtcagattattccgtcctttcgacgcgaaatttgtttgtaaagcccttccttcatcggttaaggcgatcgccgttttggatcgcacaaaagagccgggctctttgggcgagccgttatatgaagatgtccgcaccgctatcgcggaaatgcaggcttcgggcgagtttaagtctaaccccgttgtaatcggcggacgttacggactgggttcaaaagaatttacacccgcaatggtaaaaggcgtatttgaaaaccttaccggcaaaaaaatcgcaaactttatcgtaggtatcaatgacgacgtgctcggcaagagtatagattacgatccgcactttgtgcttgaagaagaaggcttaaccgaagccctgttctacggacttggcgcggacggcactgtcggcgcgaacaagaactcgataaagatcataagcgaagcgaagcccgagcttaacgcgcaggcgtacttctcctacgactcgaaaaaatcgggcggctttaccgtttcgcaccttcgtttcggcaccggccgtatcaggaggccgtaccttatcaactccgccgacttcctcgcgtgccataaattttcctacatggaaatgtacgatatgctcaaaatgctcaagactggcggcacattccttcttaacagcccgttcaaagcggcggatgtatggaagaatctccccgtagaggcgcagcagcgcataatcgacaaaaaattgaaattctacgttatcaacgccgctgaaatagcgtttaacaccggcatgggcaaccgtatcaacacggtcatgcaggccgcctatttcaagatttcaggcattttgccggaagccgaagctgtaaagcgcatgaaggaacatattgagcattcatacggcaagaaaggcaaagacgtagttgaaaagaactacaaaaccgttgatgagtcgttgaacgcagttgaagaagtaaagtatccttccaagaccgaaggcgatatccacatgaaaaaaccctttgccaccgcgaaggattcatggatcaaggaagttctcggaaccatgtctgtacaggaaggcgacaccctgcctgtcagcaagctcccagaagacggaactttcccgacagccactactcagtacgaaaaacgatctgtcgccgagcgcgttccgacatggaaccccgaagcctgtatacagtgcggtaattgtaccgttgtttgcccccatgcctgtatgcgcatgaaaaatcttacagacgatcaagtcgcgaaagcgccgaaaggattccagactgccgaaataaaaccgaaggcggtagcgggccagaaggcgactcttgtaatagcctgtgaagactgttacagctgcggcgtttgtttcaatatctgcccgatgtgcaaagacgcaagcaaacctactgctctttcctggaaatcctacgccgacgatcacgagttccacgcggaacaggtcgctgtttgggattatttcctttcattacctgaaactccggcgggtgaacttacaactgcgaaagcccttgcctacaagcgccccttgtttgaattctccggcgcttgcggcggatgcggcgaaactccctacgttaaacttatgtcgcagttgttcggcgaccgcgctattatcgccaacgcaacaggctgttcctcgatttacggcggaaacctgccgacnacgccctactgcccgcgcgcggacggacgcggaccttcatggttcaacagcttgtttgaggacgcggcggaattcgcaatgggcttcaggctacccagcgacaagctggctgtccacgcccgcgaaattgccgagaaggcaaagggtgagggcattgccgccggcatcatcgacaagattctctccaatgaccaagccgatgacgcgaagatcgaagaaatgcggaaaagcatagacgaactcaaagccgcgattaaaaacgattcaaagccaacggcgaaactgctgctctcccttgccgatttcctggtaaaaagatcggtatggggcttcggcggcgacggatgggcatacgacatcggcttcggcggccttgaccacgtgctcgcctcgggcaaaaacgtgaaccttctgtgtctggacaccgaggtctactccaacaccggcggccagatgtcaaaggcgaccccggtaggcgccatcgccaaattcgccaacgccggaaaagaaatcaccaagaaagatctgggcgcgatagccatgagctacggttatgtgtacgtcgccaagatttcactgggcgcggatatgaaccagacgatcaaagccttccgcgaagccgaatcctacaacggcccctcgcttatcatcgcctactcgcactgtatcaaccacggcatcgacatgagcaagggacttgagcacggcaaggcggtagtcaccagcggcctgtggcccctgttccgctacgaccccaggctcaaagaccagggcaagaaccccttccagcttgactccaaggaacccaccaccagcattgaggatttcatgtacagcgaagtccgcttcaagagcctcaaacaggccgaccccgcgcgcgccgacaggctgctaaaatag

SEQ ID NO: 62212 - protein, 1145 aa, Unknown
  Obtained from environmental sample
  DOMAIN (671)...(694): 4Fe-4S binding domain
  misc_feature (1)..(1145): Xaa is any amino acid
MAHALSEVIAIYPITPSSPMGEFSDEFSAQGRKNIWGTIPNVVEMQSEAGAAAAVHGALTTGALSVTFTASQGLLLMIPTMYKIAGELTSTVFHISARALATSSLSIFGDHQDVMACRQTGWAMIASNNVQEVMDMACISHASTMRSRVPFLHFFDGFRTSHELQNIEEISYDVMHQMIDDDLVTAHRARGLNPENPSIRGTAQNPDTYFQSREGVNKYYEKVPGIVQAEMDKYAKLTGRAYHVFDYYGAKDAENVIIIMGSGADTCEETIDYLNGKGGKTGMIKVRLFRPFDAKFVCKALPSSVKAIAVLDRTKEPGSLGEPLYEDVRTAIAEMQASGEFKSNPVVIGGRYGLGSKEFTPAMVKGVFENLTGKKIANFIVGINDDVLGKSIDYDPHFVLEEEGLTEALFYGLGADGTVGANKNSIKIISEAKPELNAQAYFSYDSKKSGGFTVSHLRFGTGRIRRPYLINSADFLACHKFSYMEMYDMLKMLKTGGTFLLNSPFKAADVWKNLPVEAQQRIIDKKLKFYVINAAEIAFNTGMGNRINTVMQAAYFKISGILPEAEAVKRMKEHIEHSYGKKGKDVVEKNYKTVDESLNAVEEVKYPSKTEGDIHMKKPFATAKDSWIKEVLGTMSVQEGDTLPVSKLPEDGTFPTATTQYEKRSVAERVPTWNPEACIQCGNCTVVCPHACMRMKNLTDDQVAKAPKGFQTAEIKPKAVAGQKATLVIACEDCYSCGVCFNICPMCKDASKPTALSWKSYADDHEFHAEQVAVWDYFLSLPETPAGELTTAKALAYKRPLFEFSGACGGCGETPYVKLMSQLFGDRAIIANATGCSSIYGGNLPTTPYCPRADGRGPSWFNSLFEDAAEFAMGFRLPSDKLAVHAREIAEKAKGEGIAAGIIDKILSNDQADDAKIEEMRKSIDELKAAIKNDSKPTAKLLLSLADFLVKRSVWGFGGDGWAYDIGFGGLDHVLASGKNVNLLCLDTEVYSNTGGQMSKATPVGAIAKFANAGKEITKKDLGAIAMSYGYVYVAKISLGADMNQTIKAFREAESYNGPSLIIAYSHCINHGIDMSKGLEHGKAVVTSGLWPLFRYDPRLKDQGKNPFQLDSKEPTTSIEDFMYSEVRFKSLKQADPARADRLLK

SEQ ID NO: 62213 - DNA, 978 bp, Unknown
  Obtained from environmental sample
  misc_feature (1)..(978): n is a, c, g, or t
ttggaaattcgtgttatcggatatgacatcaatttccgaaaaataggggtttttgctatgcacaacgattttactttgtttactagggttgttccttcggggaaaacggtggtgtattactatgcttatgacggagagggtaagaggttaggtccgtggactacgggacaggttaataagacggcggcaaggaattactgtaacttgcttatccgaaaggggaaattattgcctgatgctaaagggataccgacttttgcggaatttgccgccgttttctgggattgggataaaagcgattatttgaaagaacggcggaaacgcaggaagttggcgcaatcctatgctgacaaaaataaaaagacggtcgagaatattttagttccttactttgggaatatgaaacttgacgctataacgggaaaggaaattgatacttggcttgattacctgatttcaaaaaagtataagaattctaccgctaacggcttttacggctctttgcaaactatgttgaaatgggcggttaaaaaacacattatcgagcgtgatccgttcaatgacgtggaaaaactgctgcaagagcaaaaaaagaaaaagattattacccctaaagaattttgggctttgttttctgacgattggaaaaaggtgtgggataataatttcctgatgtgtacggctcataagttggcggggctgaccggtatccggtgttgtgagattttggggctaaagggggaatatgtgtttgatgaccatatctatatttgcgcacaatacgatgagatatacggctatcgggaaacgaaaactaaaacggaacacaatatccctttgacagaggaagttattgcggatttgaaaaaactgatgaatgtaaacggacaggggtttgtgttttcggagactggcggcgataagcctgtgaaccgcaactatcttaccacggcttgcggaaagcgttacaaaacatag

SEQ ID NO: 62214 - protein, 325 aa, Unknown
  Obtained from environmental sample
  misc_feature (1)..(325): Xaa is any amino acid
MEIRVIGYDINFRKIGVFAMHNDFTLFTRVVPSGKTVVYYYAYDGEGKRLGPWTTGQVNKTAARNYCNLLIRKGKLLPDAKGIPTFAEFAAVFWDWDKSDYLKERRKRRKLAQSYADKNKKTVENILVPYFGNMKLDAITGKEIDTWLDYLISKKYKNSTANGFYGSLQTMLKWAVKKHIIERDPFNDVEKLLQEQKKKKIITPKEFWALFSDDWKKVWDNNFLMCTAHKLAGLTGIRCCEILGLKGEYVFDDHIYICAQYDEIYGYRETKTKTEHNIPLTEEVIADLKKLMNVNGQGFVFSETGGDKPVNRNYLTTACGKRYKT

SEQ ID NO: 62215 - DNA, 366 bp, Unknown
  Obtained from environmental sample
  misc_feature (1)..(366): n is a, c, g, or t
atggctggggcatgcgatatgacatttgatatcagcaaagcaaggatctttatccgccccggctgcacggatttacggaaggcggcgaacgggctttcagtaatggtagaacaacaaatggcaggtgaaccattcagcgggaacatatatctattttgcaaccgggagcggaagctgctgaaagctctgtggtgggacaggaacgggttttggctgagccagaaacggcttgagaaagacaagtttccttggcctgcgacggatgaggaagctagggaattaagcgcggaagaactgtcgatgcttttaagggggatagattttttcaaagcgcataagaggctttattacaaaaatgtttcataa

SEQ ID NO: 62216 - protein, 121 aa, Unknown
  Obtained from environmental sample
  DOMAIN (12)...(118): IS66 Orf2 like protein
  misc_feature (1)..(121): Xaa is any amino acid
MAGACDMTFDISKARIFIRPGCTDLRKAANGLSVMVEQQMAGEPFSGNIYLFCNRERKLLKALWWDRNGFWLSQKRLEKDKFPWPATDEEARELSAEELSMLLRGIDFFKAHKRLYYKNVS

SEQ ID NO: 62217 - DNA, 2172 bp, Unknown
  Obtained from environmental sample
  misc_feature (1)..(2172): n is a, c, g, or t
gtgtttgatgactttcattgcattgacgatccgctgataatccgctttatggaagagtgtatcctctttaagatgccgcccggcacttcggtatttctggttacccgtaccgccccacgtgtcaacctggccggcatgatctacagggatcaaatttttgacatcagcgaaaacgaccttcgctttaccgagagcgaactcgcccaatattttcacagccggaacaattatatacagccggagagcctccgcgaaataatgcgggatacaggcggctgggcattcgcgattaacctcatcgcgcggtcgtatcaaaaagcgccgggttacgggggttatctgcaaagcgcgatgaagacaaacatctttcagcttatcgaaactgaaatctgggacgaaatctccgaacgcttgcagtcctttttggtacgtctttccctgatagatcatctttccgtggatttgatctttttattggccgaagaggacgaaaccttgattgccgagcttgatcggcagaacgcattagtgcgccgcgacagctatgtaaacgcgtacctgattcatcccttatttttggaattcctgcgaaaaaggcagggcctgctttcggaagatcaaagagagaaaacttacgcgatcgccggggactggtgcagcaagaacggtttcaggattgacgcgctatcgtattttgaaaaaataaaggattacaaatcaataatatacattctttttggattacccgcccagataccggatgaaatctcgcgctatgcggcgtcaatctttaaccgggcaccggcggaagatttcgacaaggtggaattccttgcggaaatgcacctgcgtacccatatgtgccagggccactggcataaatcgcttgacttgttgcgattctacgaagcgaaattccttaagctgccggaggatgacattgtaaggaatcgcactctggcgcagttgtatgattgctgggcttatatacgcgccttaatgagtacaatcgatgatatttttgattttggaatatacatagaaaaagccaataaatacgctcccaacatgggagaaccgagtaaattcggcccttattatccagggacatggtccaactactccggttcttcaagaaaaggcagtccggatgaatttgttgcggcccaaaccagaatcgtgaaaagtatgccgcgtgttttttttgaaattaaattgatgggacaattggaattattacagggtgagcttgggttttaccgcggcgacgtaaattccgcgctttctttattgacccttgccgttaaagaggcgcgagccggaaaacaatttgcgtttatgaacagggcattgatttatatgctgcgtatcgctgtttcccagggaaatttcgttctggcggaacaggcgctaaaagaaataaaagcgcagctggatgaaaccgaataccttaaccgatttatggattacgatatttctctttcctggtttttctgttttctcgatatgccggaaaagacgtctgagtggcttcaggaagatttcttatggtacagccatgccggttttattgaaaatttttggaattttataaaggcgcggttttattttgccacaaggaatttccccccgcttctggcgcatatcggggaaatgaaagcgagggaatcatttttatacgaacggatagaaatgctggttatggaagcctgtatacactataaaatgaaagacaaagaaaagtcctttgccgcgctgctggccgcgtatacggacgcgctgtcaaacaatattgtaatgccgtttattgagatgggaaaagatatgcgcacgttgacatcggctttactgaaagaatctggcaatgttattcccaaaccatggctggaagacattaaccgcaagtccgcctcctatgccaagcgccgcacccatgtcattgcggaatacgcgcaggcaaaccgcatttcggacagccccgccattaccccacgggaaacggacatcctgagcgacctatcccacggcctttcccgcgccgaaatcgcctccagccgcgatctttctattaataccgtgaaaatggtgatcaacatgctttacacaaaggtcggcgcagaaaacctggccgaccttattcgcatcgcggtagaacaaaagttgatcgattag

SEQ ID NO: 62218 - protein, 723 aa, Unknown
  Obtained from environmental sample
  DOMAIN (659)...(716): Bacterial regulatory proteins, luxR family
  misc_feature (1)..(723): Xaa is any amino acid
MFDDFHCIDDPLIIRFMEECILFKMPPGTSVFLVTRTAPRVNLAGMIYRDQIFDISENDLRFTESELAQYFHSRNNYIQPESLREIMRDTGGWAFAINLIARSYQKAPGYGGYLQSAMKTNIFQLIETEIWDEISERLQSFLVRLSLIDHLSVDLIFLLAEEDETLIAELDRQNALVRRDSYVNAYLIHPLFLEFLRKRQGLLSEDQREKTYAIAGDWCSKNGFRIDALSYFEKIKDYKSIIYILFGLPAQIPDEISRYAASIFNRAPAEDFDKVEFLAEMHLRTHMCQGHWHKSLDLLRFYEAKFLKLPEDDIVRNRTLAQLYDCWAYIRALMSTIDDIFDFGIYIEKANKYAPNMGEPSKFGPYYPGTWSNYSGSSRKGSPDEFVAAQTRIVKSMPRVFFEIKLMGQLELLQGELGFYRGDVNSALSLLTLAVKEARAGKQFAFMNRALIYMLRIAVSQGNFVLAEQALKEIKAQLDETEYLNRFMDYDISLSWFFCFLDMPEKTSEWLQEDFLWYSHAGFIENFWNFIKARFYFATRNFPPLLAHIGEMKARESFLYERIEMLVMEACIHYKMKDKEKSFAALLAAYTDALSNNIVMPFIEMGKDMRTLTSALLKESGNVIPKPWLEDINRKSASYAKRRTHVIAEYAQANRISDSPAITPRETDILSDLSHGLSRAEIASSRDLSINTVKMVINMLYTKVGAENLADLIRIAVEQKLID

SEQ ID NO: 62219 - DNA, 903 bp, Unknown
  Obtained from environmental sample
  misc_feature (1)..(903): n is a, c, g, or t
gtgtctcagaaagaaagctatacaggcaacattgaagctgtgcttcaggcacggcaaaacggtgaaacatcattttattttgaacgttcccggctgaacaatcttttcatggaagccgtaaaatacccgctggtcgttatatgcgccggggccggttacggcaagaccagcgccgtccatgattttctggagaaatacgaagcaaccacggcatgggtacagcttacggagcttgacaatgagcgggcgcatttttgggaaaccgccgtccatgcaatagggcagataaatcaggctttagccaaagcgacaaacaaatttggctttcctgataccaaagaaaagctaaagcattacacggccattatacaaaatcatattgagatgaaaaggcgcataatcgtgtttgatgactttcattggattgacgatccgctgataattcgcttcatggaagagtgtatactttttaagatgccgcccggcacttcggtatttctggttacccgtaccgccccgcgtgtcaacctggccggtatgatctacagggatcagattttcgacatcagtgaaagcgaccttcgctttaccgaaagcgaacttgctcaatattttcacagacggaataattatatacagtcggagagcctccgcgaaataatgcgggatacaggcggctgggcattcgcgattaacctcatcgcgcggtcgtatcaaaaagcgccgggctacggggggtacttgcaaagcgcgatgaagacaaacatcttccagcttatcgaaactgaaatctgggacgaaatctccgaacgcttacagtcctttttgatacgcctttccctgatcggncatctttccgcggatttgatctttttattggccgaagaagatgaanacctttga

SEQ ID NO: 62220 - protein, 300 aa, Unknown
  Obtained from environmental sample
  misc_feature (1)..(300): Xaa is any amino acid
MSQKESYTGNIEAVLQARQNGETSFYFERSRLNNLFMEAVKYPLVVICAGAGYGKTSAVHDFLEKYEATTAWVQLTELDNERAHFWETAVHAIGQINQALAKATNKFGFPDTKEKLKHYTAIIQNHIEMKRRIIVFDDFHWIDDPLIIRFMEECILFKMPPGTSVFLVTRTAPRVNLAGMIYRDQIFDISESDLRFTESELAQYFHRRNNYIQSESLREIMRDTGGWAFAINLIARSYQKAPGYGGYLQSAMKTNIFQLIETEIWDEISERLQSFLIRLSLIGHLSADLIFLLAEEDEXL

SEQ ID NO: 62221 - DNA, 423 bp, Unknown
  Obtained from environmental sample
  misc_feature (1)..(423): n is a, c, g, or t
atgaacgaggaggggcttgctttccttgtaaagcaggctcaggttcatttatacaatatgcaggtagacgcccttaacaaaacgataataaaggacgaggaacgcgctaaaaaatctgtctccggaaaaactgaactcgcagcggaagattttagtgatataaagatatcggaaaccggttccagctattatattgtttatcataatgattggattgccttttcaaaagaagagataacggccattgtaaaaatcgcgctaggcgaaggaaccgaattggaaataaaagagcggctttttaactggctttcgcgggaacgaaacgaccttctttacaccgcctccatcgcaaagaaatttgacaataaactggcgtcccttattaatcttttaagagcgaatttcaaacttagaaaaaagtaa

SEQ ID NO: 62222 - protein, 140 aa, Unknown
  Obtained from environmental sample
  misc_feature (1)..(140): Xaa is any amino acid
MNEEGLAFLVKQAQVHLYNMQVDALNKTIIKDEERAKKSVSGKTELAAEDFSDIKISETGSSYYIVYHNDWIAFSKEEITAIVKIALGEGTELEIKERLFNWLSRERNDLLYTASIAKKFDNKLASLINLLRANFKLRKK

SEQ ID NO: 62223 - DNA, 831 bp, Unknown
  Obtained from environmental sample
  misc_feature (1)..(831): n is a, c, g, or t
atggtagctttgcttccccagaagaagcggattcgcagtccggtaggagccggagtgtattatcccgaaaacaaaaaggaaacgctcgagttcttaaggagatttgaccttgaaccgggcaacggccgctgcgctcaggcaattatcgcccctcacggctcatggagcctttccggggaacttgccgcaaccgccttttccgccgcgatgggcagaagcaataacattagccgcgtggttcttctgggaccgattcatgacaaacgtgaaaaaggcgtttttctgtcggattctcacttttttcatacgccgcttgggaatatctccgtagacaaggaaattaccgaagaacttgaatttgcgagtgaatatttggaaattaacgacattccacaccttggggagcattcaatagagattcttcttccttttgtaaaatactgcttcccgtacgcctcgattattccggttcttatggggcagcctgaacaaaaacacataaaagaccttgccttgaccctgaaaaatgtggtgggtcccatacttgatgaaaccctgctggtggtttcctgcaatctttcctgtaatgaggatagaacgacagcgcaaaatcaggcgcaggagtgccttaatttgatagcagggaaaaaagtatccgccttaacttccgccattttggacggcaggctgaatccctgcggcggcgcccttgcggcaagccttttggagagcggccttgtgaccggaaaaacctgttataccgaagaaatgttcaacgccgccggcatggatcacaacacggttttttacagcgctgtttcctttgaatag

SEQ ID NO: 62224 - protein, 276 aa, Unknown
  Obtained from environmental sample
  DOMAIN (13)...(274): Protein of unknown function DUF52
  misc_feature (1)..(276): Xaa is any amino acid
MVALLPQKKRIRSPVGAGVYYPENKKETLEFLRRFDLEPGNGRCAQAIIAPHGSWSLSGELAATAFSAAMGRSNNISRVVLLGPIHDKREKGVFLSDSHFFHTPLGNISVDKEITEELEFASEYLEINDIPHLGEHSIEILLPFVKYCFPYASIIPVLMGQPEQKHIKDLALTLKNVVGPILDETLLVVSCNLSCNEDRTTAQNQAQECLNLIAGKKVSALTSAILDGRLNPCGGALAASLLESGLVTGKTCYTEEMFNAAGMDHNTVFYSAVSFE

SEQ ID NO: 62225 - DNA, 1203 bp, Unknown
  Obtained from environmental sample
  misc_feature (1)..(1203): n is a, c, g, or t
atgtcgtcaatcacagaaaacaaacagggtttgaaggtgctcataacaggaagtattctacagttatttttggggataatttatgtatggagcgtatttgtaataccggtcaaagatttttatggatggtctgttgacagtgtaaaacttacatcttcgtttatgctctgtttttttgtcataggcatattggcgggcggaaaggtgcagatgaaaatcggcgtaaaactcacaaccttgattggcgggctgatggtcgcagtaggtatgctggcaaccgcgttgatcccggcaggcgggacagcgcctgtttttcttatctattttttctacggtatcatcggcggcttcggtgtgggcgcgggttataacgcgaacatttcctgcgcgcaaaagtggtttccgaaaaaccgaggtcttgccacaggcataagcgtttgcgcgttcggaatctctactgttatctttgcgcctctggttacaacattaatcaataagtttgaagtgaagtctacgtttttaattttagccgcagggtttgcggcggctgttctgttattgttcagttttatcaaatcgcccgaacaggttccaaatgctgccgctccggcattaacaggcaaacagtacacaactctggaaatgcttaaaacaatgcgtttctatttaatcgccttgtccctgatgttcggcacttcggtctttttcattatccttcccagccttaaagaattggcgatagacagagggcttgagtctttcgcaacagggcttgttatgttcaccggcattgccaacgcgctcggcaggcttggcgcgccgcttatgtccgataaaatcggacgtgaaatggcagacattatcatccttgccgcaaccgctctcggcgcgttcgggctttgtttcgccaatggggttctgctgattgtaatcatcgctgtagtcgcgttctgttacggcggctattcgggattgtatcccgttcttacttccggaaatttcggcattaaaaatatcggttctaactacggcgcggtcatggtgggctttatgctctcggcgctgttgttcccaatcgttatcaaaaaaatcaatggtcaagagctgcaatttatcgcgctcggcgctttggctgttgtcggcgcggtactggttgtcattttaagattgatgaatttaaagcaggcaaaagaagaaacttga

SEQ ID NO: 62226 - protein, 400 aa, Unknown
  Obtained from environmental sample
  DOMAIN (17)...(397): Sugar (and other) transporter
  misc_feature (1)..(400): Xaa is any amino acid
MSSITENKQGLKVLITGSILQLFLGIIYVWSVFVIPVKDFYGWSVDSVKLTSSFMLCFFVIGILAGGKVQMKIGVKLTTLIGGLMVAVGMLATALIPAGGTAPVFLIYFFYGIIGGFGVGAGYNANISCAQKWFPKNRGLATGISVCAFGISTVIFAPLVTTLINKFEVKSTFLILAAGFAAAVLLLFSFIKSPEQVPNAAAPALTGKQYTTLEMLKTMRFYLIALSLMFGTSVFFIILPSLKELAIDRGLESFATGLVMFTGIANALGRLGAPLMSDKIGREMADIIILAATALGAFGLCFANGVLLIVIIAVVAFCYGGYSGLYPVLTSGNFGIKNIGSNYGAVMVGFMLSALLFPIVIKKINGQELQFIALGALAVVGAVLVVILRLMNLKQAKEET

SEQ ID NO: 62227 - DNA, 1923 bp, Unknown
  Obtained from environmental sample
  misc_feature (1)..(1923): n is a, c, g, or t
atgagcgcggcgggaacagccttaacggagaaaaacaattcaaatgaaaattcgccgcaaaaacccggcaaacgcaaacggcttgccgacatatttgtagttgttttttgcgtttcaggcgcggcgttcagcctgaatctgttcaggcttgatctttttcaatcaatcgcggctcaaaataaaaagccaatgggaaccgtaaccgttaaatacaacaatgttcagcgccgtttttcggatcgcgtgctgtggagccgcctgactgtcaaatcgcccgtatacttgggcgatcttatccgtgtggcggaatattcctccgcgactttgaatattaacaacggcatcattgatataaacgaaaattccctgatacgcatacgcgcttcttccgacggagaagaccgcgttgtaatcgacttgaattcgggaagtttgagcattacaggctccgataccgcggacagcggattagcgcttaatgttatgggacgcgtaatcgcgccgacagccaaagcgacattgagcgcttccgccggggaaagcggcattaaactgcaggtgaacgaaggaagcgcgatcataacagaggaaggaaagcaaagccgttctatggaagccggcgaagcgttatttttagatgctaagggagtgacaggggcggctccggcggcggttgttttgcagcnccgtccaaacgcgcgctttattaaaaacagcgctgagccggtaaatatccgcttcgcgtggaatatgataaatattgctcaacaacagcccttgcgtttagaaattgcctcaggccccaattttacgcatattgtacggacagccgagggcgtcaattcttccaatatcgctcttgacgcgggagtttggtattggcggctgtcgtataaagatacaattcttagttccgggcaatttactattgccgaagcggtaatgtccgcgcctgtaagtcccattcaagacaacacagactaccgggaaaatatgccgatccgttttgaatggcagcctgtggaaggagcatcctattatattcttgaggcgggtcttacgcctgatattataaatccgttaattacaagacagacagcaatttcttctcttgttgaatctaatatggaagcgggaaattggtactggcatgtaaagcccgttttttcttctatgtatgaaggcgccgcctctttttctcaggtttcgtctttcaatatagaaaatgcggttaaacctgcggtcatcgccaaaacaacggacaactttccggaaatgccggaacagcttgaacctgaaacaaaaccggcagcagcaactaaatccgataaatcaactaaccctgcaaaaccttccgactcctctgcctctgataacactgtaactccttccgcggcagatacggcggcatcggccggttctatatcaaatcctgatattgctgttatctcaccatctgtaatatggagtccaacaaaggatgacttttccaaatcaagctgtaatattgcgcgggaaacaattgatggagtggaaaaagaagttttgactataaatgctaatcttgcatctggagattcaagttggtcaggggcttatacgagtaacttgtatttcatcgataaacttagagaagccaaagggttacgtttaaaagtattgggtgatggaaaaagatggcgtgtcaattttgggacaagtgatgttaatgatggcgcttggcatggagtaacaataacaactaaaaacggaaaagtcagcagtattgatattcctttcgacaaactgagtcagcctgattataaacaaaaggctgtcaaatttaacagtaataacatagtatggctttcaattgaaaaaagcagttttacaggcggtttcggagcatctacaattaaaatctatgattttgaggtttattag

SEQ ID NO: 62228 - protein, 640 aa, Unknown
  Obtained from environmental sample
  misc_feature (1)..(640): Xaa is any amino acid
MSAAGTALTEKNNSNENSPQKPGKRKRLADIFVVVFCVSGAAFSLNLFRLDLFQSIAAQNKKPMGTVTVKYNNVQRRFSDRVLWSRLTVKSPVYLGDLIRVAEYSSATLNINNGIIDINENSLIRIRASSDGEDRVVIDLNSGSLSITGSDTADSGLALNVMGRVIAPTAKATLSASAGESGIKLQVNEGSAIITEEGKQSRSMEAGEALFLDAKGVTGAAPAAVVLQXRPNARFIKNSAEPVNIRFAWNMINIAQQQPLRLEIASGPNFTHIVRTAEGVNSSNIALDAGVWYWRLSYKDTILSSGQFTIAEAVMSAPVSPIQDNTDYRENMPIRFEWQPVEGASYYILEAGLTPDIINPLITRQTAISSLVESNMEAGNWYWHVKPVFSSMYEGAASFSQVSSFNIENAVKPAVIAKTTDNFPEMPEQLEPETKPAAATKSDKSTNPAKPSDSSASDNTVTPSAADTAASAGSISNPDIAVISPSVIWSPTKDDFSKSSCNIARETIDGVEKEVLTINANLASGDSSWSGAYTSNLYFIDKLREAKGLRLKVLGDGKRWRVNFGTSDVNDGAWHGVTITTKNGKVSSIDIPFDKLSQPDYKQKAVKFNSNNIVWLSIEKSSFTGGFGASTIKIYDFEVY

SEQ ID NO: 62229 - DNA, 918 bp, Unknown
  Obtained from environmental sample
  misc_feature (1)..(918): n is a, c, g, or t
ttggctttggcggcaagaaacatagagggcggacaattcaaacagcagtttgagattaagggccgcgatgaaatagggctgttaggcgcaagtttccacaaaatgtccggcgccctgaatatattcggcagattcacaaaccgcgaaatagccgttaaagccatgcgcggcgaaattaaaccgggcggcctgcacaaacacgccacaatctttttttccgatatacgcggctttaccgcgctgtccgagaattttacaaaaacattcggggacaaagcttcggataaaatcgtcttctggcttaacaactaccttacaagcatggtcgagtgcgtggaaaaaaccggcggcgtagtagataaattcatcggagacgcggtaatggcgcattggggcacggcttacacggccggcagccccggaaaagacgcttttaactgcgttaaggcggcgcttatgatgcgtcacgctctgataacattgaacaaaaaccgggcggaaaacgatcccggcgacccgccaatcagaatcggatgcggaataaattcgggaattgttacagcagggcaaatcggaagcgatctccgcatggagtacacggtaataggcgacccggtaaatctggcttcacgcgtcgaagcgcttaccaagccgcttgcgacagatattcttataaccgaagatacatttaacctaatcggggacagccttattacggaagaaatgccgccggtaacggtaaaaggaaaagtaaagccggttcgtttgtttgccgtcgttaattttgttgaagcaaaggggggaccgcgaactatcgcggaagtccgtaaattattgggcgttgaagctcccgagctttccaatgttgatcttgacgctgaggaaaagaagtacaaaataggcggcgaacaaaaatga

SEQ ID NO: 62230 - protein, 305 aa, Unknown
  Obtained from environmental sample
  DOMAIN (60)...(261): Adenylate and Guanylate cyclase catalytic domain
  misc_feature (1)..(305): Xaa is any amino acid
MALAARNIEGGQFKQQFEIKGRDEIGLLGASFHKMSGALNIFGRFTNREIAVKAMRGEIKPGGLHKHATIFFSDIRGFTALSENFTKTFGDKASDKIVFWLNNYLTSMVECVEKTGGVVDKFIGDAVMAHWGTAYTAGSPGKDAFNCVKAALMMRHALITLNKNRAENDPGDPPIRIGCGINSGIVTAGQIGSDLRMEYTVIGDPVNLASRVEALTKPLATDILITEDTFNLIGDSLITEEMPPVTVKGKVKPVRLFAVVNFVEAKGGPRTIAEVRKLLGVEAPELSNVDLDAEEKKYKIGGEQK

SEQ ID NO: 62231 - DNA, 1041 bp, Unknown
  Obtained from environmental sample
  misc_feature (1)..(1041): n is a, c, g, or t
atgttccgttcgccgtattacgcaaaaggcctcgttggcgtaaactttacgattggtatggacatccgcctctcatcggcgaaacctgcctacgagtacagatttgcgaaagacggcgaagattatgttttgaacgaaagcaagcacttggtaggcaattatattttgaacggcgaaacaaaagacaaagtgaaagtgggcgaagtctacccgcttgagccgtggcgcctattcgccgacttggtcttctccttcgacctcctagcctccaagcgcgccgaaatggcccgccaggcccgcgcgaacgccgccgagagggcgaggctcaagaaattggccgctctctcctccgctcaaagggacagcatagcggcgaaggcgcgtgaggactcgttggcgcaggccgccgcgttggccgccaaggccgataaggcgcgtcaggactccatagcccaagcggcggaggcggccgagcgcgaggctcggctcaaagccgaggcggagggcagggaggcgcagctcatagccgacgccgagggcagagagtcgcaactaagggccgatgccgagcgtaagcgcgtagccgactccatagcgctcgccgacgccaacaagaggctggccgaggagagggccagacgttcagccgccgaacagcagatgctgtctaccggtatgctcgtgctggacggggtattcttcgtaacaggcaaagcggagatccagctgaactcgagaggctatctgacgactcttgccaagatgctcgtcaagtatccaaagctcaggatagagatcggcggccacaccgacaacaccggcaggctcgaaaccaatatggccctcagccaaagccgcgcggacgcggtcttcatgttcatgcacaacgtggaaccggggttagcccagatgctcacggcgaaaggctacggccccacggtgcccaaggccgacaacaacaccgccgcgggccgcgaggtcaacaggcgcgtggagattaaggtgctcaaccccgaagtgcttaaagagtacaacccgtaa

SEQ ID NO: 62232 - protein, 346 aa, Unknown
  Obtained from environmental sample
  DOMAIN (233)...(329): OmpA family
  misc_feature (1)..(346): Xaa is any amino acid
MFRSPYYAKGLVGVNFTIGMDIRLSSAKPAYEYRFAKDGEDYVLNESKHLVGNYILNGETKDKVKVGEVYPLEPWRLFADLVFSFDLLASKRAEMARQARANAAERARLKKLAALSSAQRDSIAAKAREDSLAQAAALAAKADKARQDSIAQAAEAAEREARLKAEAEGREAQLIADAEGRESQLRADAERKRVADSIALADANKRLAEERARRSAAEQQMLSTGMLVLDGVFFVTGKAEIQLNSRGYLTTLAKMLVKYPKLRIEIGGHTDNTGRLETNMALSQSRADAVFMFMHNVEPGLAQMLTAKGYGPTVPKADNNTAAGREVNRRVEIKVLNPEVLKEYNP

SEQ ID NO: 62233 - DNA, 543 bp, Unknown
  Obtained from environmental sample
  misc_feature (1)..(543): n is a, c, g, or t
gtgctgctgctgcaccataccaacaaggcgtcgcgcggcggcgacggggcgggggtgcaggcctaccgcggcggctcggcggcctacgactcctgccggttcgccttctacctgcgggcgagcacgcccaaggagctggaggcgcagggtatcgatacggacgatccgaacaaatacttaattctcgagaacaccaaaaacaactacctgccgatatgcccgacgatgatgcttgaacgtcagggctacagcttcacggcgcggacgctccgttcgaaggaggagaaggcgaacgatgccatggctgaagcttacgaggtgctggaagttatgcgggggatggagaaaccagccccgcggcaggagatagaaacggcggtgcacgctgaaaaaggccgcgaatggggaggcgtaaacaagaatctgcgcctcctggaggcggagggtttgatcgaaaagaccaaagcgggacagcggtatcaatacgcggtcacggccaaaggccggaattttaacattcggcaggatttgcgcgatgagtga

SEQ ID NO: 62234 - protein, 180 aa, Unknown
  Obtained from environmental sample
  misc_feature (1)..(180): Xaa is any amino acid
MLLLHHTNKASRGGDGAGVQAYRGGSAAYDSCRFAFYLRASTPKELEAQGIDTDDPNKYLILENTKNNYLPICPTMMLERQGYSFTARTLRSKEEKANDAMAEAYEVLEVMRGMEKPAPRQEIETAVHAEKGREWGGVNKNLRLLEAEGLIEKTKAGQRYQYAVTAKGRNFNIRQDLRDE

SEQ ID NO: 62235 - DNA, 495 bp, Unknown
  Obtained from environmental sample
  misc_feature (1)..(495): n is a, c, g, or t
atggcagaaaacttgagatacgagacgtcggacagctcttggtgctataatgacgataccgcctactgcaatgtatacggcaggctctataattggaaaacggcgctgacaatctgcccgcccggctggcatctgccgacacgcggggaatggtatgatttgatcgtcgcgacgggaggcgaagacgcggcagctaagaagctgaaagcaaaaagcggatgggacgacaatgacgaccaaaacagcaacggtaccgatgattacggtttttcggcgctgcccggcggcaaacgctactccggcgacggattcagccaatacaaccgtttcgccatgaacggcaccagcggcgatttgtggactgcttcggaggcgtcggagtacgacagcgccaccgcctactatctatccatgtactttcgcagcgacgacgccgactatgccagatacgacaaaaccgacggcgtttcggtgcgttgcgtcgcggataactaa

SEQ ID NO: 62236 - protein, 164 aa, Unknown
  Obtained from environmental sample
  misc_feature (1)..(164): Xaa is any amino acid
MAENLRYETSDSSWCYNDDTAYCNVYGRLYNWKTALTICPPGWHLPTRGEWYDLIVATGGEDAAAKKLKAKSGWDDNDDQNSNGTDDYGFSALPGGKRYSGDGFSQYNRFAMNGTSGDLWTASEASEYDSATAYYLSMYFRSDDADYARYDKTDGVSVRCVADN

SEQ ID NO: 62237 - DNA, 1320 bp, Unknown
  Obtained from environmental sample
  misc_feature (1)..(1320): n is a, c, g, or t
ttggcccggaacgccgggatacgtgtaccttacggcatacatagtgaatttcttgaccgaggtgaacacggtgaacaagacgctggaaaagccgttcccctcgaccagaagatgtacccgtcggcgatagaggccttgaagagatcgctgcgcagcgatcacaggcgattggtgggcggccaatcggcatacgagagaagctgtgcgctagtagcgctggcgaggagcggccacacagacataggatacacgcgggagcttgctgccgccgcgaccgagttggacattatgggcaaggctaacgtgttcaaagccatagcggagaaagagtctttcttgggcaagcagtacgccatggtggaggatcagctttggaagtcggcgatattcatggagcgtcagggcaaggaggtgttcggcggatttcagaagcgcggcgtgccggtaggcgcgagaatgcacgcgagcgacgccgcggcgcaggcgtcgtttgtgagcgcgatgtcggcgtcacaaaaaacaatgtcgaacccgaggactctgcttatggccaaagaacttatgaatatgggcgcggacgacggatggggcagcacctacgcgaacagcatgtcgctcttggcgctgcgcgattttattgacagcaaggaagacggggcgtcgacttatgcgttcaagctgaacgacggcggcgataaacctaagcagctgaccatgaaaaccgcgacgacggcctactggtcaaacagcaaagccggcagcgtaacccccgacggccagtcggcgaaccgcgcgttttgggtaaggctctcccgccgctacatgccgcaggcgctcggcagcgcggctgagccggagcaacgcgggtttgccgtgaagcgcggcctgataaggatcaaaaaaggcgctccgccgtcaagggtggcgatagacaaaggcggcgccacgataaccgtcaaaagcggcgatattgtcgaggagcacgtacaaatagtaaatcctgaggcaaggctgttcgtagccgtaaccgttccgctggccgccggtttcgagccgctgaacccgaggttagagaacgcgtcaagcaacgccgtccccacaaacaaaacgacaaacggcggcgactacagctccttctacgacgaccgcgtggtatacttcttcgagaaaatggaacagggcacctacgacttctacttccggtcgcaggcgataacggaaggagagttctcgcaacctccggcgcgcgcggagatgatgtaccagatgaacgtctttggggcgagcgcggggagcgtggtcgtggttgagaagcagtag

SEQ ID NO: 62238 - protein, 439 aa, Unknown
  Obtained from environmental sample
  misc_feature (1)..(439): Xaa is any amino acid
MARNAGIRVPYGIHSEFLDRGEHGEQDAGKAVPLDQKMYPSAIEALKRSLRSDHRRLVGGQSAYERSCALVALARSGHTDIGYTRELAAAATELDIMGKANVFKAIAEKESFLGKQYAMVEDQLWKSAIFMERQGKEVFGGFQKRGVPVGARMHASDAAAQASFVSAMSASQKTMSNPRTLLMAKELMNMGADDGWGSTYANSMSLLALRDFIDSKEDGASTYAFKLNDGGDKPKQLTMKTATTAYWSNSKAGSVTPDGQSANRAFWVRLSRRYMPQALGSAAEPEQRGFAVKRGLIRIKKGAPPSRVAIDKGGATITVKSGDIVEEHVQIVNPEARLFVAVTVPLAAGFEPLNPRLENASSNAVPTNKTTNGGDYSSFYDDRVVYFFEKMEQGTYDFYFRSQAITEGEFSQPPARAEMMYQMNVFGASAGSVVVVEKQ

SEQ ID NO: 62239 - DNA, 1440 bp, Unknown
  Obtained from environmental sample
  misc_feature (1)..(1440): n is a, c, g, or t
atggcgccgcgcatccccgtgagctttttgctgatgcgcccgcgggccgccgcgccgcgccgcgcgtcagacggagcttcggtagacgccggaaagccggagactgtcgggaacacgacgtggctgacggtgaaccccgtggccaatatgctcgacgtgaggctgtcgcacgtgccgaccgtcacgccgggcgcgacgcttgaagtgaccgtgaacctccgcgacatacagggcaaggcgcgtccgggcgaggtcgcgctgtggctggttgacgaggcggtgctgtcgctgcgcaaagagtacggcttagacccgctagaggcgtttttgaaagaggtggagacgaacgtgagcataatggacagtcgcaaccttgtgatcggcgacctcctctcgtccgaaaatcccggcggcgacggcggcgatgaggaagacgacgggctcggcaagataaccccgcggaaaaatttcaaggttgtgccgtactggaacccatctatacaagttgacaaaaacggaaccgccgtcgtgaaaatccgtatgtcggacgatttgacgaatttctcaatccgcgcgatggcggtcagcgggccggacaggttcggcacggccaagtcgagggtgtcggtgcgcctgccggtaacgattcaacccgcgctgccgcggttcgtgcgtctcggcgacaaactgcgggcgggcggcatagcccgcgtggtggagggcggcggcggcgcggcgacgtttatgatcaccgccaaagggctgtctgtgaaaagcgctccagacaagcagatacagctcgactcgctcaaaccgatgcagctatacgccgacctagttgttgagactccgccgttcacgaagcgcgggaaattgcagtgggataacgtctccgtcaaaatggcggtaaagagaaactccgacaacgccggcgacgcgttcgaggtaaagataccgctgcttttggacaggcaattcgttgaggagacgcagttctccgtgattaacaagggggggaatttctcgtggccggcattgtccgcgaccgcgagacccaataccgtagccggaaatttattcataagcgagaatcaatacctgcccaagatcatctcggctacggcgagcctcgtgcgcttcccgcacgggtgctcggagcaggtcgtgtcgcagtcgtacccgtcggtcgtctacaagagtatgtgggaaaagtacggtgttgagccgccggataccgcgataacggagggcgtgaacagggcgatggcgtttttgaagacgacgcagcacagcgacggtctgttcggctattggcccggaacgccgggatacgtgtaccttacggcatacatagtgaatttcttgaccgaggtgaacacggtgaacaagacgctggaaaagccgttcccctcgaccagaagatgtacccgtcggcgatag

SEQ ID NO: 62240 - protein, 479 aa, Unknown
  Obtained from environmental sample
  misc_feature (1)..(479): Xaa is any amino acid
MAPRIPVSFLLMRPRAAAPRRASDGASVDAGKPETVGNTTWLTVNPVANMLDVRLSHVPTVTPGATLEVTVNLRDIQGKARPGEVALWLVDEAVLSLRKEYGLDPLEAFLKEVETNVSIMDSRNLVIGDLLSSENPGGDGGDEEDDGLGKITPRKNFKVVPYWNPSIQVDKNGTAVVKIRMSDDLTNFSIRAMAVSGPDRFGTAKSRVSVRLPVTIQPALPRFVRLGDKLRAGGIARVVEGGGGAATFMITAKGLSVKSAPDKQIQLDSLKPMQLYADLVVETPPFTKRGKLQWDNVSVKMAVKRNSDNAGDAFEVKIPLLLDRQFVEETQFSVINKGGNFSWPALSATARPNTVAGNLFISENQYLPKIISATASLVRFPHGCSEQVVSQSYPSVVYKSMWEKYGVEPPDTAITEGVNRAMAFLKTTQHSDGLFGYWPGTPGYVYLTAYIVNFLTEVNTVNKTLEKPFPSTRRCTRRR

SEQ ID NO: 62241 - DNA, 789 bp, Unknown
  Obtained from environmental sample
  misc_feature (1)..(789): n is a, c, g, or t
atgggatcagaagtcggcacgagctttttagtattggaaaatgcccatattatagccaatcgaacagaggaatgtgatgttatttctacctttgccggaaacggcggccttcaaattaaaagcatttacggggagaggggtaaaatgaaacttttacttgattctaacttgatttattatctggctggagttagtaatatttactgtattgataaagaaaaaatagagaatgaattgcacaaatatgaaatttatatttcacaatggacgcttgttgaaatcatatcaaatgatgaagtatcagaaccgaataaagaatccatgttgaaatatatagaggaaaaaaagatagaatccatttcaattgaaggaacagattttttcagctcaatgccaaaaactttagatgaatttattcataaccccgaaaaagaggaaataattaaattagtattaatcggaaaaaaagagtgtgaagctagtcttatagcttattatataaaagcggcagctggtgtttatttatcggctctatattatcaaatcgaatctgatggaggaaaatataaagataactatatgtactcaaatatacatttattatgggccaatgatgattttattaataaaatttttgctcggcgcaccctatccgcgctgcaagcagcgcggtattacgggcgcgcctgcacgccccttcggggcggccgcaaaaattggaagacttcttgtcacgatatgaccagaagcagtgtctttttacagccgaggcaagcctcggggtattaa

SEQ ID NO: 62242 - protein, 262 aa, Unknown
  Obtained from environmental sample
  misc_feature (1)..(262): Xaa is any amino acid
MGSEVGTSFLVLENAHIIANRTEECDVISTFAGNGGLQIKSIYGERGKMKLLLDSNLIYYLAGVSNIYCIDKEKIENELHKYEIYISQWTLVEIISNDEVSEPNKESMLKYIEEKKIESISIEGTDFFSSMPKTLDEFIHNPEKEEIIKLVLIGKKECEASLIAYYIKAAAGVYLSALYYQIESDGGKYKDNYMYSNIHLLWANDDFINKIFARRTLSALQAARYYGRACTPLRGGRKNWKTSCHDMTRSSVFLQPRQASGY

SEQ ID NO: 62243 - DNA, 954 bp, Unknown
  Obtained from environmental sample
  misc_feature (1)..(954): n is a, c, g, or t
atgtcaacaaaatctattccctgccaaagaaaatatctttatcatcctaattcaatatataaatatggggacaataagaaaaaatctttgctacctcgatgtacaaaagctgatgcaactaaaataattttacaaaatatgttaaaaaatgaaaaggcgataattttttcattatatattgatgtattaattacctatgcaaatttatgtgatgatctagggctttcagttataatgataactggagatgataaaggcaaaaaattagaaaataaacagaacgaatttaaaaattctaataaatgtagggtcttattaacaactttacaaaaatctgccgagggatttaattacccattcgccactcataccattattcttgaattatggtggaatccacaaaaaataatacaggccatgggtagaatagatagaaaaacgcaaagacgtaatatctttatttatcttttatgctacaatattaatggagaaatgataaaactcgaaaaaataatttttgatagaatgattttaaaattagagaaagcaaatattttttttataaacgttgaaaaaatgcattccaaaatggatcttaccttaaaaacaaaatataaaaaatttccagagcctaaaatatttaatgatattaaaacatttgaagatgagttaatattttttatttctcaatttaagcattcatctctaccagaatatcttaacaataataagatcagtttccccattcaatatgtaacaaatgatttattcattcagggaaatatatatttgaaatacaattatttactagaaaattctccttggcagctaactacagatgcactaaaaaaatttctctattggtattgtgaaaataacatattactagaaaaagataatataaatgatctagttaccgcttatataccgattgatggtatttttcctagctaa

SEQ ID NO: 62244 - protein, 317 aa, Unknown
  Obtained from environmental sample
  DOMAIN (69)...(147): Helicase conserved C-terminal domain
  misc_feature (1)..(317): Xaa is any amino acid
MSTKSIPCQRKYLYHPNSIYKYGDNKKKSLLPRCTKADATKIILQNMLKNEKAIIFSLYIDVLITYANLCDDLGLSVIMITGDDKGKKLENKQNEFKNSNKCRVLLTTLQKSAEGFNYPFATHTIILELWWNPQKIIQAMGRIDRKTQRRNIFIYLLCYNINGEMIKLEKIIFDRMILKLEKANIFFINVEKMHSKMDLTLKTKYKKFPEPKIFNDIKTFEDELIFFISQFKHSSLPEYLNNNKISFPIQYVTNDLFIQGNIYLKYNYLLENSPWQLTTDALKKFLYWYCENNILLEKDNINDLVTAYIPIDGIFPS

SEQ ID NO: 62245 - DNA, 1440 bp, Unknown
  Obtained from environmental sample
  misc_feature (1)..(1440): n is a, c, g, or t
gtggaacagtacggacgcagtatccttttaagcgatactgaaataatttttgcggtagataacgccggaaaaaccgtaatggctacctcagaaatcaaattatcgccttccgaggaaaaagccctattacagctcctgccccctgaaaacatgggactgcaaactgccgtcattggcggcgaaaaacgcatttttcaatcgttttattttaccccttttaactggcatattttgataagcgaaaaagaacaggtgttttttcaggatgctaaactaatagcggttcaaacttttatttcgcttggaatctcggttgccattaccgtgtttatgcttatcattgttacacgcagactgacaaatccccttggacggattgttaaaacgatggaatcgataatcgagacggccgacctgtcttctaaagttgaggttgaatataacgacgaaacaggtattctcgctcatacattcaataatatgactgaagaattggacagggcgtactcgcagataaaacgttatgcgttcgaggcggttcttgccggtaaaaaagaagagcgtatccgtcagattttccaaaagtacgtgcctaataacgtaatcgaaaaattttttgcatcgcccgaaaaaatgcttgtcggcgataaccgcaaactgtcgatacttttctccgatattcgttcctttaccacaatttcagagggaatggctcccgatgacttggttaattctcttaaccgctatttttcgggacaagttgaaattatttacaacagaaagggaattgtagataaatacatcggcgacgcaatcatggctatttggggcgctcccgaaaaacatgaggatgatgcgttgcaatcggttttatctgcgctggaaatgatagacggtgtttcaatgttcaatgaaaaccagcgcaagttaggcaagtgtgaatttaaaatagggatagggcttaacttcggcgaagttaccgtaggcaacataggaagcgagcgcaagatggattataccgtaatcggagactctgtaaatttggcgtcacggatggaaggacttacaaaaacttatcattcggaaatattgatctcggaaagcctttttgaagaactgcggcaaacatcgccgaatgccggtttgttttacaggctcttggacacagtagcggtaaaaggcaaaaccaagggagtgagaatttttacggtaaagaaatccctcacaccgcaggaacaaaaagcgtggcctctgcataatcagggaatgaaactctattattctcgttcctttgccgaagccgcgcagaaatttaaagaaacgcttgatattctgcccggcgatttttacgctgacaatctgtttaacaggtgcaatgaatacgcttcttcgcccgccgccggcagactggaacggcgtggaagtatgaaaactaaataa

SEQ ID NO: 62246 - protein, 479 aa, Unknown
  Obtained from environmental sample
  DOMAIN (97)...(167): HAMP domain
  misc_feature (1)..(479): Xaa is any amino acid
MEQYGRSILLSDTEIIFAVDNAGKTVMATSEIKLSPSEEKALLQLLPPENMGLQTAVIGGEKRIFQSFYFTPFNWHILISEKEQVFFQDAKLIAVQTFISLGISVAITVFMLIIVTRRLTNPLGRIVKTMESIIETADLSSKVEVEYNDETGILAHTFNNMTEELDRAYSQIKRYAFEAVLAGKKEERIRQIFQKYVPNNVIEKFFASPEKMLVGDNRKLSILFSDIRSFTTISEGMAPDDLVNSLNRYFSGQVEIIYNRKGIVDKYIGDAIMAIWGAPEKHEDDALQSVLSALEMIDGVSMFNENQRKLGKCEFKIGIGLNFGEVTVGNIGSERKMDYTVIGDSVNLASRMEGLTKTYHSEILISESLFEELRQTSPNAGLFYRLLDTVAVKGKTKGVRIFTVKKSLTPQEQKAWPLHNQGMKLYYSRSFAEAAQKFKETLDILPGDFYADNLFNRCNEYASSPAAGRLERRGSMKTK

SEQ ID NO: 62247 - DNA, 570 bp, Unknown
  Obtained from environmental sample
  misc_feature (1)..(570): n is a, c, g, or t
atgggtacaagtcaatatattttaaaacatgaagattcagatgttttattatttgaaattaatactgattattataatgttattcaatttgaaataattgatgaaaaatggtttcctgtaaataaaattactgatacttctactcaaattgctcttttaaacggatggctttctgaccgctgtatacccagttctcgtgaaggagcagatcgtttgaaaaataaatataatcttaaagatataaaagaattaatgcttgcaatgcatggattgtcgttaagcgaccattattggattgatcgtaaaccatataatactaaatggaaagatattaatatgtttgaaaattcatataatgaatcaattggcagggcattaatagacaaacgttttaaattagttaaaaatatgatttcatatgggaacaaaaatcctgatgttactaccattggttcattaaaaaaatattggcattataataaaaaagacggaataagttatttatataaaggaggcagtaaaattgattttcaagagccttttaatgaatattttgcacatctgctttaa

SEQ ID NO: 62248 - protein, 189 aa, Unknown
  Obtained from environmental sample
  misc_feature (1)..(189): Xaa is any amino acid
MGTSQYILKHEDSDVLLFEINTDYYNVIQFEIIDEKWFPVNKITDTSTQIALLNGWLSDRCIPSSREGADRLKNKYNLKDIKELMLAMHGLSLSDHYWIDRKPYNTKWKDINMFENSYNESIGRALIDKRFKLVKNMISYGNKNPDVTTIGSLKKYWHYNKKDGISYLYKGGSKIDFQEPFNEYFAHLL

SEQ ID NO: 62249 - DNA, 1701 bp, Unknown
  Obtained from environmental sample
  misc_feature (1)..(1701): n is a, c, g, or t
atgaaaatccgcgtaaaaatgtgcctggcgcttctccctctgattattgtcaccctggctcttgcccagaccgcatcttactacaacgccgtaaacggcgtcacgcggcttgcccggcagcttttgggttttaaactgggcgagcttgagaaatacgccgacaaccagtggtccctgcttgttgagaacaattacgccggcaacaatgacatggtagaggccgcaaaaaaagccgtggaattatacgcgcagagcatcattctcagcgggactgaaaggatatttgccattgacgggacggacaatatcgcgatgtccaccggtcagctggagctgtctgacggggaaaaagggccgcttcttgaaattctgcgcgccggaaacaagggtttgcagaacgcggttatcggcggcgaggaaagggtttttcaggcgttctacttttcccctttccggtggcatgtaattataagcgaaaaaagcggggtgttttattccgacgcgaaccgcatcgccctgcagtccgtaataacgcttggcgcttccattatactcgcgtccgtcctgttgataatattctccgcccatcttaccaggcctcttggccgtattgttaaaaccatgaacggcataatcaattcggcggatctctcgtccagggtggaggttgaataccaggacgagaccggaaacctggcttttacctttaaccggatgctgggcgagcttgacaaggcttacggccagattaagcgttatgcgtttgacgcggtgctggccgggaaaaaagaggaacgcgtccgccagattttccagaaatatgtcccgaaggacgttattgagcgcttcttcgcctctcccgaaaaaatgcttgtgggcgacaaccgcaatctttcgattcttttttccgacatacgcggttttacaaccatctcggagggtatggcccccgacgatctggtgaattcgctgaaccgctatttctccgggcaggttgacattatttacaaccgcaaaggggttgttgacaaatacataggcgacgcgatcatggccttctggggcgcccccgaaaaacatgatgatgacgccttgcaatcggtgctggccggtcttgacatgatagacgcgcttgccgtttttaacgcgaaccagaataaactgggcaaacctgaattccgcattggggtgggcatcaatttcggggaggttacggtcggcaacataggcagcgagcgcaagatggactacacggtaataggcgactcggtgaacctcgcctcgcgcatggagggcctcaccaaaacataccattccgatttgctgatcactgaaaacgtgtatgctgaattacaagataaactgtccgactccatggcgccaaagctctacttcaggcttctggacactgtcgccgtcaagggaaaaaccaaaggcgtaaaaatctacacggtaaagcgcgccttaagccagacggaagcggccgcgtggacactgcacaaccaggggatgctgcttttttacaaacggtctttccgcgaagccgccgagaaattcaaggaagtttatcgcctgcttgcaaaggactccgtgggatctaaagatcccaatgctgaaaatctgttccgccgctgcgccgaatacgcgtcaaacccgccgcctgaagactgggacggggttgaggtaatgaagactaaataa

SEQ ID NO: 62250 - protein, 566 aa, Unknown
  Obtained from environmental sample
  SIGNAL (1)...(22)
  DOMAIN (175)...(245): HAMP domain
  misc_feature (1)..(566): Xaa is any amino acid
MKIRVKMCLALLPLIIVTLALAQTASYYNAVNGVTRLARQLLGFKLGELEKYADNQWSLLVENNYAGNNDMVEAAKKAVELYAQSIILSGTERIFAIDGTDNIAMSTGQLELSDGEKGPLLEILRAGNKGLQNAVIGGEERVFQAFYFSPFRWHVIISEKSGVFYSDANRIALQSVITLGASIILASVLLIIFSAHLTRPLGRIVKTMNGIINSADLSSRVEVEYQDETGNLAFTFNRMLGELDKAYGQIKRYAFDAVLAGKKEERVRQIFQKYVPKDVIERFFASPEKMLVGDNRNLSILFSDIRGFTTISEGMAPDDLVNSLNRYFSGQVDIIYNRKGVVDKYIGDAIMAFWGAPEKHDDDALQSVLAGLDMIDALAVFNANQNKLGKPEFRIGVGINFGEVTVGNIGSERKMDYTVIGDSVNLASRMEGLTKTYHSDLLITENVYAELQDKLSDSMAPKLYFRLLDTVAVKGKTKGVKIYTVKRALSQTEAAAWTLHNQGMLLFYKRSFREAAEKFKEVYRLLAKDSVGSKDPNAENLFRRCAEYASNPPPEDWDGVEVMKTK

SEQ ID NO: 62251 - DNA, 408 bp, Unknown
  Obtained from environmental sample
  misc_feature (1)..(408): n is a, c, g, or t
gtgatagaacgcacaaaggaaacattcatgggcggcgcccacgggatgttaaccaggcggtattatgtgatcgatttggaatcgcaaaaactgttaaaaatcgacgattttatcgatgattatcagggagacatgatgcgggacgttatttatgaggaactgagacattacagcggcctgaaaagaacccagcctctttccgaggggatatatttaaatgacgagccggaactgacttttaatttttatattaacgaggaagggtttggactacattgggatccctatgaaatcgcgccttattccgagggcgcgataaagataatgctgccctggaaaagaatccgccccatgctgctgcgccacggcatggaactactggcgaaatttaatattaacgttaaataa

SEQ ID NO: 62252 - protein, 135 aa, Unknown
  Obtained from environmental sample
  misc_feature (1)..(135): Xaa is any amino acid
MIERTKETFMGGAHGMLTRRYYVIDLESQKLLKIDDFIDDYQGDMMRDVIYEELRHYSGLKRTQPLSEGIYLNDEPELTFNFYINEEGFGLHWDPYEIAPYSEGAIKIMLPWKRIRPMLLRHGMELLAKFNINVK

SEQ ID NO: 62253 - DNA, 915 bp, Unknown
  Obtained from environmental sample
  misc_feature (1)..(915): n is a, c, g, or t
gtggggtgctcttcctgcctccacgagttcgcgttcacgtacagggtcaactccccgcttcgcggcttggaaaaacccacgcagcgcaagatatactccacgaacctcaccgaaaaggagacggtttacggcggaggcgtaaaactgctcgcggctatacgcgaggtgtacgagcgcgccaagcctaaagccgtctttgttctgacgacctgcgccgccggcataatcggggaggacgtcgagagcgtctgcaacgaggctgaggcggatatcggcataccggtggtcgccgttttctgcgagggcttccgatccacggtttggactaccggcttcgacgcgggataccacggcatagcgcgaaagctggtcaaaccgccccgcaaacgcagggacgacatgataaacgtgatcaacttttggggcagcgacgtctttaaggattggttcgccccgttcggcgcggtgcccaattacatcacgccctattccactatagagagcctcgcgtggtctagcgaggcggcggcgacggtgcaggcttgctcgacgctcggctcttatctgggcgcggcgctggaacaggagttcggcgtgcccgaactgcccacggccccgccctacggaatcgcccagaccgaccggtggttcagggcgctcggaaaattgctcaaaaaagaagatgtcgccgagcgggttatcgccgagaaaagggcggagtatctgcccaagatcgaggcgctgaaagagaagatccgcaagtatgccgacgggcggacgttgaccgcatacgttaccggcggggcggcccacgggcacgcgcttttgtcggtgctcggcgagctggggattcaagcggtcggcnnnnnnnnnnnnnnnnnnnnncctcatcttcgacaacggcgagccggataa

SEQ ID NO: 62254 - protein, 304 aa, Unknown
  Obtained from environmental sample
  DOMAIN (3)...(304): Nitrogenase component 1 type Oxidoreductase
  misc_feature (1)..(304): Xaa is any amino acid
MGCSSCLHEFAFTYRVNSPLRGLEKPTQRKIYSTNLTEKETVYGGGVKLLAAIREVYERAKPKAVFVLTTCAAGIIGEDVESVCNEAEADIGIPVVAVFCEGFRSTVWTTGFDAGYHGIARKLVKPPRKRRDDMINVINFWGSDVFKDWFAPFGAVPNYITPYSTIESLAWSSEAAATVQACSTLGSYLGAALEQEFGVPELPTAPPYGIAQTDRWFRALGKLLKKEDVAERVIAEKRAEYLPKIEALKEKIRKYADGRTLTAYVTGGAAHGHALLSVLGELGIQAVGXXXXXXXPHLRQRRAG

SEQ ID NO: 62255 - DNA, 330 bp, Unknown
  Obtained from environmental sample
  misc_feature (1)..(330): n is a, c, g, or t
gtgcccaatttcaatgtctgcaacaagcacgagtttgagctggtgaacgtgttgaaccgcctcaagcccgatctgctgctggcgcggcacggcggcatgactctgtggggcgcgaagttcgggattccctcgctgcttgtcggcgacgaacactactccatgggttacgagggccttctgaagtacggcgagcggatactcgaaacattggaaaacgacgagttcgtgaagaatctctcgaaacacgccgtcaacccgtacagcaagtggtggcttagtcaacaaccgaacactttcttacagacgcgtacaaggggaatcgaggcatga

SEQ ID NO: 62256 - protein, 109 aa, Unknown
  Obtained from environmental sample
  misc_feature (1)..(109): Xaa is any amino acid
MPNFNVCNKHEFELVNVLNRLKPDLLLARHGGMTLWGAKFGIPSLLVGDEHYSMGYEGLLKYGERILETLENDEFVKNLSKHAVNPYSKWWLSQQPNTFLQTRTRGIEA

SEQ ID NO: 62257 - DNA, 510 bp, Unknown
  Obtained from environmental sample
  misc_feature (1)..(510): n is a, c, g, or t
ttgccgagggatttgctgaaattggagaaggggttagggttgtaccacggatccaacgtccgctttgaattgccgtcgctcgaaaagtctagggatagacgggatttcggcagggggttctacacgactacgtcaaagagcaagcgggcggagtggtcaaaaacgcttcggcttcgcttcaacggcggcgcgtatgtatacgagtttgaactgaataatacctcggcgttaaacataaagatatttaacgggcttgacttggaatggcttgaattcgttaaagaaaatagaatgaaaggcgggctccggcataaatttgacgctgtctgcggcgcggtggcaaacgacaagaccatgcaaaccataacaatgtacatagacggcctctacaccgctgaagaagcgctgaatagactgcgctatatgctcccgaatgatcaggtttcgtttcatacggaaaaaggacttgcgtgtttaacgcttataggggttacggaatggaaactataa

SEQ ID NO: 62258 - protein, 169 aa, Unknown
  Obtained from environmental sample
  misc_feature (1)..(169): Xaa is any amino acid
MPRDLLKLEKGLGLYHGSNVRFELPSLEKSRDRRDFGRGFYTTTSKSKRAEWSKTLRLRFNGGAYVYEFELNNTSALNIKIFNGLDLEWLEFVKENRMKGGLRHKFDAVCGAVANDKTMQTITMYIDGLYTAEEALNRLRYMLPNDQVSFHTEKGLACLTLIGVTEWKL

SEQ ID NO: 62259 - DNA, 864 bp, Unknown
  Obtained from environmental sample
  misc_feature (1)..(864): n is a, c, g, or t
atgaaaataagcgatatattgaacacaggaaaaataaccgtttcgtgcgagttgtttccgccgaagcacggttcgggtcttgtcggagcccaaaacattgtccgccaaaccgccgctctgcgcccgtcgttcataagtataacttacggcgcgggaggggggacgagcgagcacacggtaagccttgccgaagaagcgcagaagcagggagttccggctcttgcccatctaacctgcgtatcatcggatcgtaaaaccataaaagaagttttatcgaaactttccgacggctatataaaaaacattcttgctctgcggggggacattcccgaaggacagccgttcccgtctgatgcgcagtatcatcatgcctgcgatttaatgaaagagattaaggactcaggcgatttttgcataggcggagcgtgttaccctgaaggacacccggaatcggaaaaccttgataaggatatcgaaaacttaaaaataaaagttgattgcggatgcagtttttttacaactcaaatgttctttgacaacaacatactgtataactttttgtaccgtcttttacatcataaaattgacgtgcctgtaatcgccggaattatgcccgtaataaacggacagcagatcacccgtatctgtaaactttccggcacggttctgcctcagcatttccgcgcaattgtggataaattttccggcaacagcgccgcaatgcagcaggcgggtattgcctacgctaccgaacaaatcatcgaccttatagcgaacgatgtccgtaatatccatatctataccatgaacaaaccggacatcgccggaaaaatcatgaataacttgtcggaaatttttaaataa

SEQ ID NO: 62260 - protein, 287 aa, Unknown
  Obtained from environmental sample
  DOMAIN (2)...(283): Methylenetetrahydrofolate reductase
  misc_feature (1)..(287): Xaa is any amino acid
MKISDILNTGKITVSCELFPPKHGSGLVGAQNIVRQTAALRPSFISITYGAGGGTSEHTVSLAEEAQKQGVPALAHLTCVSSDRKTIKEVLSKLSDGYIKNILALRGDIPEGQPFPSDAQYHHACDLMKEIKDSGDFCIGGACYPEGHPESENLDKDIENLKIKVDCGCSFFTTQMFFDNNILYNFLYRLLHHKIDVPVIAGIMPVINGQQITRICKLSGTVLPQHFRAIVDKFSGNSAAMQQAGIAYATEQIIDLIANDVRNIHIYTMNKPDIAGKIMNNLSEIFK

SEQ ID NO: 62261 - DNA, 1416 bp, Unknown
  Obtained from environmental sample
  misc_feature (1)..(1416): n is a, c, g, or t
ttgataaaagttcttattccttacgcgcttaggtcatttaccgagcgcaacgcggaggtagaagtaaacggcggcactgcgggcgacgctattaacgcgcttgcaagcgcctaccctgctcttaaaacccaccttttcacggaagacggtcagcttcgcgactttatcaacttgttcgtaggcggcgcaaacatcaacagcttgcaaggactgaatacgcctatcgcggataacggcgaattgatgattgtcccggcaatcgcgggcggcagtgacgcggagcttaccaacgaagaaatcgggcgttacagccgccatttgcttttgccggaaatcggcgttgaggggcaaaaaaaattaaaggctgctaaagtcctcattgtcggcaccgggggacttggcgctccccttgccttgtaccttgcggcggcgggcgttggaacaatcgggctggtggattttgacgtggtagacgagtcaaatcttcagcggcaaattattcacagcacgcgagatgtcggcagaccgaaagttgcttcggcaaaggatagaataaagggaataaatccgctggtgaatgtggcaacgcataacgaaatgcttaccagcaaaaatgcgttggagctttttgccgattacgacattatcgcagacggaaccgataattttcaaacgcgctaccttgtaaacgacgcctgtgtatttttaaacaaactgaacgtatacggttccgtgtttcagtttgacgggcaagcgacagttttcggcgcaaaagacggcccctgttaccgctgcctgtacccctccccgccgcctccggggctcgtcccctcatgcgcggagggcggagttatgggcgtgctgcccggcattatcggaacaatacaggcggctgaaacgatcaagctcatcgtaggcggcgcgaaacctttgattggacgccttcttttatttgacgcatggcgaatgtcatttcgcgagttaaaacttgacaagaaccctgactgtccggtatgcgggaaaaatcccaccattcacgaacttattgactatgaacaattttgcggtttgaaaaagaacaccgaaagtaaaccggtagacacaataactgccctcgatttaaaaaaacgccttgataacggagataaaattcaatttatagatatcagagagccgcatgaacgcgccattgtaaaatttccaaacgccgtagtaataccgcttggtcagttggaaaggcgcatggacgaacttgatccgtccatagatgcggtgtttttgtgtaaaataggccagcgcagtattttaggaataaggactttacaggacgcaggttacaaaggcaaacttctgaacctgcaggacggtcttaacgcttgggcgcgcgatgttgataaaaccatgcccatttattaa

SEQ ID NO: 62262 - protein, 471 aa, Unknown
  Obtained from environmental sample
  DOMAIN (370)...(463): Rhodanese-like domain
  misc_feature (1)..(471): Xaa is any amino acid
MIKVLIPYALRSFTERNAEVEVNGGTAGDAINALASAYPALKTHLFTEDGQLRDFINLFVGGANINSLQGLNTPIADNGELMIVPAIAGGSDAELTNEEIGRYSRHLLLPEIGVEGQKKLKAAKVLIVGTGGLGAPLALYLAAAGVGTIGLVDFDVVDESNLQRQIIHSTRDVGRPKVASAKDRIKGINPLVNVATHNEMLTSKNALELFADYDIIADGTDNFQTRYLVNDACVFLNKLNVYGSVFQFDGQATVFGAKDGPCYRCLYPSPPPPGLVPSCAEGGVMGVLPGIIGTIQAAETIKLIVGGAKPLIGRLLLFDAWRMSFRELKLDKNPDCPVCGKNPTIHELIDYEQFCGLKKNTESKPVDTITALDLKKRLDNGDKIQFIDIREPHERAIVKFPNAVVIPLGQLERRMDELDPSIDAVFLCKIGQRSILGIRTLQDAGYKGKLLNLQDGLNAWARDVDKTMPIY

SEQ ID NO: 62263 - DNA, 1521 bp, Unknown
  Obtained from environmental sample
  misc_feature (1)..(1521): n is a, c, g, or t
ttgaagaaccgttacgcggtatcccgcgtttcccttaccgaatacggaagagcgcttgtgcttttagattacggcaataatgaaatggaaatcccgcttgacagggacgggaacattataattccgggcactggaaatttccgaaacataaacatttcgcttttccgtgaatatgaagaagcgtgccgcgttatgcgaagtactatgaaagaagccgatgatctcggggccttatcccatacgctgcctgaaaagtcgccgctgttgcttgaagattacgcgttggcgctcagggaagaactcttaaaagcgcccgacgccgagaaacgcgccgcgtggatacaggcgcgggaaagttattttaagaatctggatgagtttcttttcgggaacgcggaatcgcgcattgtaaaaggttacgaagaagttatagcgggtgaaaaaaacttaaaaccggagggcattacaaaactggtaaatatgcgcaatgaaattatccgcgtatttgccgcaatgcgcaataatcacaccgaattgctccgcgttcacaaaaagttgtccgacgagcttttttcatcaatttgcataatgggtcctaaggataatacttattattccgcccttctggcgaacgcgcttattacaggcggccatatcaatcccgcgtattatctgcatacgctttacctgtcattcgccgcggccttttttatcttattgataattttcagaatacgccctttcttattgttgattatgggatttattctcagcgcgtttgccgtctttgtcttcggcggccattttgtgtataccgcgtactggatcgatccgacagttgtttttgtatcatcactgtcaggaacgctggttattttcttctgtaagcgcgtaacattaagccgcagggcgcggtatttccgcgcggcctacggttctgccgtttcgcgtaatgttctgcgcgagttaatcagccggggcaagccgaatattaacgagacttccgttacaaccgcggcaataattgttataagggattttaaccttcttaacagggaagattatgaaaaaagcaccgaagccggaaaagcgcaaaaggcttattacgataccgttaaaaatattgtttttaaagcgggcgccgttatcgccggtttccacggcgatacggttatagtctgcttcggctctccccttgattatgtaagcgagcctatagtaagggcttatacgctggtaaaacaaatgctgagcagcgataaaaattcatggcgtttcggcatcgatgccggtaaatgtactttttcatggtctccggaaaccgggtttaccgtaaacggccgccccgtaggaagggcgaaaattctggcttccaagaacgctcgttttgagacaaaagctcttgtaacggaaataataagagaagcgacaaacttaaatataagaaaaatcggcaccctgcgcgatgaatacgacgccttctatgaattaacaggcgataacgatactccggaaaattaa

SEQ ID NO: 62264 - protein, 506 aa, Unknown
  Obtained from environmental sample
  misc_feature (1)..(506): Xaa is any amino acid
MKNRYAVSRVSLTEYGRALVLLDYGNNEMEIPLDRDGNIIIPGTGNFRNINISLFREYEEACRVMRSTMKEADDLGALSHTLPEKSPLLLEDYALALREELLKAPDAEKRAAWIQARESYFKNLDEFLFGNAESRIVKGYEEVIAGEKNLKPEGITKLVNMRNEIIRVFAAMRNNHTELLRVHKKLSDELFSSICIMGPKDNTYYSALLANALITGGHINPAYYLHTLYLSFAAAFFILLIIFRIRPFLLLIMGFILSAFAVFVFGGHFVYTAYWIDPTVVFVSSLSGTLVIFFCKRVTLSRRARYFRAAYGSAVSRNVLRELISRGKPNINETSVTTAAIIVIRDFNLLNREDYEKSTEAGKAQKAYYDTVKNIVFKAGAVIAGFHGDTVIVCFGSPLDYVSEPIVRAYTLVKQMLSSDKNSWRFGIDAGKCTFSWSPETGFTVNGRPVGRAKILASKNARFETKALVTEIIREATNLNIRKIGTLRDEYDAFYELTGDNDTPEN

SEQ ID NO: 62265 - DNA, 507 bp, Unknown
  Obtained from environmental sample
  misc_feature (1)..(507): n is a, c, g, or t
atgaaaaaaaatatatgccttgcgacaattgcgctgattctggttgtttcctgctcttcaaatccgaaagtgacccgcgtggatccaaaagcgcagaccgatttaagcggttattggaacgacacggacgtaaggatcgtctgcgaatcgttgataagcgactgcctaaaatcgccaagggttgcgcaggagatccagagcaagcggggaaaactgcctgtcgtgcttgtaggcagattcgcgaatgaaagcagtgaacatatagatacgtctataatctcggacataatggaaattacgatttttaacagcggcaagatggactttgtagcaggcggcgctacaagggacgctatccgcgccgaacggcaggatcagcagagcaatgccagcgaagaaacagccgccgccctgtccaaggaaaccggtgccgacttcatgctctttggaacggtaaggacaattattgacaaggcagacaacaaatccgtaagaacatatttgtaa

SEQ ID NO: 62266 - protein, 168 aa, Unknown
  Obtained from environmental sample
  SIGNAL (1)...(20)
  misc_feature (1)..(168): Xaa is any amino acid
MKKNICLATIALILVVSCSSNPKVTRVDPKAQTDLSGYWNDTDVRIVCESLISDCLKSPRVAQEIQSKRGKLPVVLVGRFANESSEHIDTSIISDIMEITIFNSGKMDFVAGGATRDAIRAERQDQQSNASEETAAALSKETGADFMLFGTVRTIIDKADNKSVRTYL

SEQ ID NO: 62267 - DNA, 561 bp, Unknown
  Obtained from environmental sample
  misc_feature (1)..(561): n is a, c, g, or t
atggaaaaattcatgaacctaaaaatttttgagcttttggaactccagccagcctcgattcttctttttgccagaaacctggtagcggccattctcatcctcgtggttggcaggatactctccaaaggcgcgcagaggcttattagaaaagcgggatcaagcgatttgcgtgttgacgaaacggtaacttcagttttacgcggcatagtgcgctacgggattttcattgtcagcgtcatcatggttctcaatgttttcggcgtcaacacgaccagccttcttgccgtattgggcgcggcgggagtcgccgtcggcctcgcgctcaaagacacactgggcaacatcgcgtcagggataataatccttctaatgggaagctaccgcaaaggcgaatttattgaattcggttctttcatgggaacagtaaaggatataaacctctttacgacaatccttgaaacccccgacggtatacatatatcggctcccaattcatgtatctggngaacccccctgcggaactacaccagaaacggcaaacgccgcatggactatccgtag

SEQ ID NO: 62268 - protein, 186 aa, Unknown
  Obtained from environmental sample
  DOMAIN (68)...(186): Mechanosensitive ion channel
  misc_feature (1)..(186): Xaa is any amino acid
MEKFMNLKIFELLELQPASILLFARNLVAAILILVVGRILSKGAQRLIRKAGSSDLRVDETVTSVLRGIVRYGIFIVSVIMVLNVFGVNTTSLLAVLGAAGVAVGLALKDTLGNIASGIIILLMGSYRKGEFIEFGSFMGTVKDINLFTTILETPDGIHISAPNSCIWXTPLRNYTRNGKRRMDYP

SEQ ID NO: 62269 - DNA, 1311 bp, Unknown
  Obtained from environmental sample
  misc_feature (1)..(1311): n is a, c, g, or t
atgatcagatggccgagaggcatgaccccgagcagttggatatgctgttcgatgagtacacngcgctttaatacggaagccaaccgtaccatcgagggtactggtttgggtatgaatattacgaagcagctcgttaatatgatgggcggcgacatttccgtagaaagcgagccgggcaagggttcggtttttaccgtgtgcctgcctcaggaaactgttgatgccgaagtattaggcagggaagtgtcgaaaaacctcgtgcaattccgtaacaacagagcggagcaaatgaaaaagggcccgcaaataatacgcgagtttatgccttatggcagggttttgattgtggacgatgtggaaacgaatctttatgtcgtaaagggactgatggccccatatggactgtcggttgaaaccgcctcaagcggatttgaagctgttgataagatcaggaacggttccacctatgatgtcatatttatggatcattttatgccgaaaatggacggtattgaagcggttaaaatcatacgcggcctgggttatacgcgccccatcatcgcgctgacagctaacgccctggccgggcaggcggaattgttcatggaaaacggttttaactctttcattccaaaacctattgactcgcgtaagctggatgccgtattaaatgaatttattcgggataaaaagccgcctgaaattgtggaaatggcgcggcaggaaaagaataaaaatgacgcaaaaggaaaaggaatcccgcctgaaaagaaaataaattcggctgagcttgaaaatttttttttaattgacgctaagaacgccttgaataaattggaagagatatacgcgagaataaacgccctcggcgagagggatattgagttatacgaaatcaacgttcacggcatgaagagcgctcttgccaacattggtgaaacaaaactctccgaaagagcgggcgaactggaacaagcagtaaaagaaaaaaatctcatggcaatgtccggggaaacgcccgcttttatagacgcgcttaaattggtaattgaaaaaatgggttccgcgaaggattcggacagcgcgcgaattacagatgaggatacggcgtttttaagggaaaagatgcttgaaataaaaacagcatgtgaggcggaagataaaaaagccgcgaagaaagcgatgagcgatttgaaacaaaaaaagtggccgaacagtataaatgatgttttagacgggctttccgtacatttattgcacagcgattttgagaaagccgcttctgccgccggggagttggctgcgtcttaa

SEQ ID NO: 62270 - protein, 436 aa, Unknown
  Obtained from environmental sample
  SIGNAL (1)...(24)
  DOMAIN (3)...(71): Histidine kinase-, DNA gyrase B-, and HSP90-like ATPase
  misc_feature (1)..(436): Xaa is any amino acid
MIRWPRGMTPSSWICCSMSTXRFNTEANRTIEGTGLGMNITKQLVNMMGGDISVESEPGKGSVFTVCLPQETVDAEVLGREVSKNLVQFRNNRAEQMKKGPQIIREFMPYGRVLIVDDVETNLYVVKGLMAPYGLSVETASSGFEAVDKIRNGSTYDVIFMDHFMPKMDGIEAVKIIRGLGYTRPIIALTANALAGQAELFMENGFNSFIPKPIDSRKLDAVLNEFIRDKKPPEIVEMARQEKNKNDAKGKGIPPEKKINSAELENFFLIDAKNALNKLEEIYARINALGERDIELYEINVHGMKSALANIGETKLSERAGELEQAVKEKNLMAMSGETPAFIDALKLVIEKMGSAKDSDSARITDEDTAFLREKMLEIKTACEAEDKKAAKKAMSDLKQKKWPNSINDVLDGLSVHLLHSDFEKAASAAGELAAS

SEQ ID NO: 62271 - DNA, 519 bp, Unknown
  Obtained from environmental sample
  misc_feature (1)..(519): n is a, c, g, or t
atgttaaaaatcagcgatgtaaccgttatataccctgacaagacaaaagctattgataacattaatttaacggtcaataccggggaaaacatcgcgttaataggcggaaacggcgcggggaaaacaacgcttctacttgcgatagtagggatacttgaattgtcaggtacggtggaaatagacggcatacaactcggtaaaaagacggtcaacgaagtacgaaaactaacggggcttgtttttcaaaatcccgacgaccagttgtttatgccgcttgtttttgacgatgttgcttttggctgtcgtaattttgggatgaaagaggacgaagttaaaacacgggttgatgaaacgcttaagcgattaaacataaaccatttaagcgcccgctccccgttaaaactttcaggcggagagaaacgcatggcggctttagcggcagttttggcgatggagccttctattttaatgttagacgaaccgaccgcctatcttgacccgaaagcgaaaaaggcgtga

SEQ ID NO: 62272 - protein, 172 aa, Unknown
  Obtained from environmental sample
  DOMAIN (28)...(171): ABC transporter
  misc_feature (1)..(172): Xaa is any amino acid
MLKISDVTVIYPDKTKAIDNINLTVNTGENIALIGGNGAGKTTLLLAIVGILELSGTVEIDGIQLGKKTVNEVRKLTGLVFQNPDDQLFMPLVFDDVAFGCRNFGMKEDEVKTRVDETLKRLNINHLSARSPLKLSGGEKRMAALAAVLAMEPSILMLDEPTAYLDPKAKKA

SEQ ID NO: 62273 - DNA, 720 bp, Unknown
  Obtained from environmental sample
  misc_feature (1)..(720): n is a, c, g, or t
ttggtgacgatgttttttttattagcggtagcgtctttcgacagatacgcgtttgaacggttggtgccgtacatattctatcctgcgcttatgatggcgctttctgaaacgccgtactcaatgttgctgaagcggattctgatagcgttgccgttctgtctctttgcggggataaccaacgtcatattcgacagagcgccggcgtttgcgataggcgccgtggcggttagttacggcacgctttctttattcaccatactgtttaaaatgtatttatgcgtcatggccgtgctgctgttggtctccgtgacgccgcttgcggagattacggacgcgatgcgccgcctaagagtcccgggcatatttgtcgccatatttgaaatgacgtaccgttacatcggtgtgctgttggcagaggcgtactccatgcacaccgcctatattttgcgaagcgccggcggaaagggtatcgctatgagggatatgggcagtttcgtggggcagttgttgctccgcagcattgaccgcgccgaccgcatctacaacgccatgaagtgcagaggttacacatcggggcagacagttcaaaatattccgcaaaataaaaggctgtcaattaatgattttattttcctgtttattgtctgcctgttatgcgcaaccttccgttttattgacgtaaacgcattatttgccgtaattttgggaaggtttatataa

SEQ ID NO: 62274 - protein, 239 aa, Unknown
  Obtained from environmental sample
  DOMAIN (2)...(198): Cobalt transport protein
  misc_feature (1)..(239): Xaa is any amino acid
MVTMFFLLAVASFDRYAFERLVPYIFYPALMMALSETPYSMLLKRILIALPFCLFAGITNVIFDRAPAFAIGAVAVSYGTLSLFTILFKMYLCVMAVLLLVSVTPLAEITDAMRRLRVPGIFVAIFEMTYRYIGVLLAEAYSMHTAYILRSAGGKGIAMRDMGSFVGQLLLRSIDRADRIYNAMKCRGYTSGQTVQNIPQNKRLSINDFIFLFIVCLLCATFRFIDVNALFAVILGRFI

SEQ ID NO: 62275 - DNA, 1311 bp, Unknown
  Obtained from environmental sample
  misc_feature (1)..(1311): n is a, c, g, or t
gtgttcacgattaaagagttaaataaaaacgcgaaagatattttcgcggatatcgaaaaagaaaacaaaggcgcggacttgggattgaaataccgcagcacagcggtatgggccgatcaggccgttatcgcaggctgttcgggcggaattttttccaacataatggcggcggcggatatattagaaggacactcaacaggcagcggtaatttttccctgagcgtgtatccggaaagccagcctacttttcttgaacttgtaaaaaacggagcggtagaaacctttatgaaggccggagtccttgtaagggaagccttttgcggcccgtgtttcggcgcgggagatactccggcaaataacgaactttcaatccgccatgttacgcgcaattttcaaaaccgcgaaggctcaaggccggcggacggacagaacgcttatgtcgcgcttatggacgcgcgttccattgcggcaacagcgattaacggcggaaagattacctccgctgcggatatatctgttaaatacggcaagtacaagttcttttttgataagggcatatacgacaagcgcgtttacaacggcgcgggaaacccgctgcctgaaacagaacttgttttcggcccgaatatcaaagattggcctaaaatgcccgcattgcccgataatcttttattgaaaattgtaagtttcattaccgaccccgttaccaccaccgacgaacttatcccgtccggggaaacttcctcataccgttcaaaccccctgaagctggctgaattcactctaagcagaaaagacccgtcctatgttaagcgggcaaaagaagtgcagtctcttgaagaacaaagaggcaaagggaaaacagacggcgaactggaaaaggcgctgaactcaatacaaggcattacgggctgttcaggaataaaccccgcaaatatcggtataggaagcgcaatttttgcccgcaaacccggggacggctccgccagagagcaagccgcctcctgccagcgggtattgggcggcgccgcaaacctcgctcttgaatacgcgacaaagcgctacagatcaaatctaatcaactggggaatattaccgtttcttgttacagacgaaaaagccttttcaaacggcgattacattttattccccggcataaggacagcggttcaggaaaagagggaaaaaatttcaggttttgtgttaggtgaaaagacggtagaaatttccgccgctctgggcgaactgacggacgccgaaagacaaatactggcagacggatgtcttattaacttttacgcgaagaaataa

SEQ ID NO: 62276 - protein, 436 aa, Unknown
  Obtained from environmental sample
  misc_feature (1)..(436): Xaa is any amino acid
MFTIKELNKNAKDIFADIEKENKGADLGLKYRSTAVWADQAVIAGCSGGIFSNIMAAADILEGHSTGSGNFSLSVYPESQPTFLELVKNGAVETFMKAGVLVREAFCGPCFGAGDTPANNELSIRHVTRNFQNREGSRPADGQNAYVALMDARSIAATAINGGKITSAADISVKYGKYKFFFDKGIYDKRVYNGAGNPLPETELVFGPNIKDWPKMPALPDNLLLKIVSFITDPVTTTDELIPSGETSSYRSNPLKLAEFTLSRKDPSYVKRAKEVQSLEEQRGKGKTDGELEKALNSIQGITGCSGINPANIGIGSAIFARKPGDGSAREQAASCQRVLGGAANLALEYATKRYRSNLINWGILPFLVTDEKAFSNGDYILFPGIRTAVQEKREKISGFVLGEKTVEISAALGELTDAERQILADGCLINFYAKK

SEQ ID NO: 62277 - DNA, 1134 bp, Unknown
  Obtained from environmental sample
  misc_feature (1)..(1134): n is a, c, g, or t
atgacggctcatttacccccgccttggatagtggaaaaatatccgcagtttgcaaaaattgcggtttggattgtgttttttttgctaatctattggctgcgctcttttttcctgctcatatttttgacattcatattcgcttttgtgcaatacagcataggggaaaggcttaaaagcaaaataaaaaatcgcaccgcaagaacgtggctgataggcgtagtgcttttgctcttgatgagcgggacaatatattttttggcaacggaagtcaaagtacagacaaggctgtttttgcacaattttgatagctacataattgctgtggataagcagctaaattcgcttgccgaatctttccccactttcaatcaaattctcatagatacaaagcttttcgctttgcaagaaggttataccgagaagtcccccacattgcagatgttgcattatttctttgatttgccttccacggatggcatagggaacattaagagaaacctgacaatggtgttgttatattcgggaaaattgatagggatagccacttcatttctgttagctctgctgttttcttttttgataattttggattaccctcgccttgtaaatgcctttgcgaaacttgaaaaatcgcgcatggcatttgtttttcacgaggtgaagcctgggataatgcaattttctgggctgctgggaaaggcctttgaagcgcaattttttatagccgttataaatagtattttaactggcattgggctttggatactcggcattggaaaatacgcgggatttttgataacaaccgtgtttctgtgcagttttgtgcctatagtaggggtgtttatatcctccttgccaatttgcatggtatctttgaaagaccacggggtttttcagatgtttttggcggtaggcatgatcacattggtacacgccattgaagcatatatcctcaacccccgcatatatggttcccatatgcgcatgaatccggttgtagtccttgggattttgaccatatttgggaaattgtttggggtttggggcttgattttaggtgtccctttatgcacctggttctttagagttttctgttttcaagacaagaccgccgaaacctatccgcagaactga

SEQ ID NO: 62278 - protein, 377 aa, Unknown
  Obtained from environmental sample
  DOMAIN (17)...(368): Domain of unknown function DUF20
  misc_feature (1)..(377): Xaa is any amino acid
MTAHLPPPWIVEKYPQFAKIAVWIVFFLLIYWLRSFFLLIFLTFIFAFVQYSIGERLKSKIKNRTARTWLIGVVLLLLMSGTIYFLATEVKVQTRLFLHNFDSYIIAVDKQLNSLAESFPTFNQILIDTKLFALQEGYTEKSPTLQMLHYFFDLPSTDGIGNIKRNLTMVLLYSGKLIGIATSFLLALLFSFLIILDYPRLVNAFAKLEKSRMAFVFHEVKPGIMQFSGLLGKAFEAQFFIAVINSILTGIGLWILGIGKYAGFLITTVFLCSFVPIVGVFISSLPICMVSLKDHGVFQMFLAVGMITLVHAIEAYILNPRIYGSHMRMNPVVVLGILTIFGKLFGVWGLILGVPLCTWFFRVFCFQDKTAETYPQN

SEQ ID NO: 62279 - DNA, 414 bp, Unknown
  Obtained from environmental sample
  misc_feature (1)..(414): n is a, c, g, or t
gtgatattcgctacgaggcccaaaaggtggcccaggtatgcaggagatgctttacccaacgagtatttgaagagcatggggttgggcaaagagtgcgctttgataacagacggcagattcagcggtggaaccagtgggctttctataggccatgttagcccagaagcggcgaacaaaggcaatatagctctggttaaaaacggcgatgtaatagagatagacattccgaacagggctataaacataaacataacaaacgaggaattggaaactcgccgcaaagagatggaagcaaaaggcgaaaaggcttggaaacccattgcaagagaaaggcaaatcagtggagcccttaaaatttacgcttcgcttgccaccagcgcagaccagggtgcagttagaatttctacattatag

SEQ ID NO: 62280 - protein, 137 aa, Unknown
  Obtained from environmental sample
  DOMAIN (1)...(134): Dehydratase family
  misc_feature (1)..(137): Xaa is any amino acid
MIFATRPKRWPRYAGDALPNEYLKSMGLGKECALITDGRFSGGTSGLSIGHVSPEAANKGNIALVKNGDVIEIDIPNRAININITNEELETRRKEMEAKGEKAWKPIARERQISGALKIYASLATSADQGAVRISTL

SEQ ID NO: 62281 - DNA, 1401 bp, Unknown
  Obtained from environmental sample
  misc_feature (1)..(1401): n is a, c, g, or t
atgatgcgatcattgttttccggcgtttccggacttcagaatcaccagacgagaatggatgttattggtaataacatttccaatattaacacaacaggttttaaacgtaaccgtgtcggttttcaggacattatctaccaacagttacaaggggcggcgcgtccaaccgaagatttgggcggcgtaaacccaaaagaagtcggtcttggaatgtccattgcctcgattgacacccttcacattcagggttctctgcagaccaccggcgtcggcacagacctcgctattacgggaacgggcttctttatccttgatgacgcaggcaaggaactttatacaagagccggcgctttttcccttgattcggacggcgttatggtaaatcccgccaacggcatgaaggtacagggctggatggcgagggatgtaaacggttacaccgtacttgatgtttccagccccgttgaccagcttgttattcctgtcggcggcaaagaccccgccaaggcgaccacaatggtcgattttgcctgtaaccttgacaagcgtattcccgaattgccggaaaatccttccggggatcaggtgctcagatcaacatggtcaaccacaattaaaatctttgacaccttcggagacgtacacgatttacaggttgaatttacccgcgtaccgggaactccaaacagttggaacgcaagggtaaatgtcgatccgcagaatgaaactcccacaaacgccaccatcggttttggggaagaagctcccgcggcgggcggtcccacaacctttgtcgtaaatttttcaaataacggaacattactttccgcggaagacggggccggcaacgtgtccggcgcttccggtcgggtacagatgaatgtcgcctacgacgtgcagaacgcgacccccaacgaggacggcactcccacaaggcaggaatttgtccttaacctgggcgaggtcggcggatttacccgctcgattacccagtatgcggaatccagttccaccaaagcggtagagcaggacggccgcacaatgggctaccttgatgactttaagattgactcttccggcataattaccggcgttttttcaaacggcagtacgcgtgttttgggacaggttgccttagctaccttccccaatcagggcggccttgaaaaagcgggcgataatactttccgccaatcaaacaactcgggaatcgcgaatatcgggccttccggaattgccggaaagggaaagattatagccggtactttggaaatgtccaatgttgacatggcggatcagtttgtagacatgattgttacacaaagaggtttccaggccaattcaagaaccatacaaacggcggatcagctgctacaggaattgttaagcctgaaaaggtag

SEQ ID NO: 62282 - protein, 466 aa, Unknown
  Obtained from environmental sample
  DOMAIN (5)...(35): Flagella basal body rod protein
  misc_feature (1)..(466): Xaa is any amino acid
MMRSLFSGVSGLQNHQTRMDVIGNNISNINTTGFKRNRVGFQDIIYQQLQGAARPTEDLGGVNPKEVGLGMSIASIDTLHIQGSLQTTGVGTDLAITGTGFFILDDAGKELYTRAGAFSLDSDGVMVNPANGMKVQGWMARDVNGYTVLDVSSPVDQLVIPVGGKDPAKATTMVDFACNLDKRIPELPENPSGDQVLRSTWSTTIKIFDTFGDVHDLQVEFTRVPGTPNSWNARVNVDPQNETPTNATIGFGEEAPAAGGPTTFVVNFSNNGTLLSAEDGAGNVSGASGRVQMNVAYDVQNATPNEDGTPTRQEFVLNLGEVGGFTRSITQYAESSSTKAVEQDGRTMGYLDDFKIDSSGIITGVFSNGSTRVLGQVALATFPNQGGLEKAGDNTFRQSNNSGIANIGPSGIAGKGKIIAGTLEMSNVDMADQFVDMIVTQRGFQANSRTIQTADQLLQELLSLKR

SEQ ID NO: 62283 - DNA, 1575 bp, Unknown
  Obtained from environmental sample
  misc_feature (1)..(1575): n is a, c, g, or t
gtgctgcttggccccggactgattggcagcatttatgacggcatacagcggcccctggaattactgtacggcagaagcggggcatttatgacgcctggtgaacgcggggatcccctggattccaaaaaaaaatggcactttgtccctgacgcgtcattaaaggaaaggctggcgaaaggcgaaaaagtcccggcgacggcgggactggtgcttggatcgatacaggaaacggaaagcgttatatgtaaaataatggttccgcccggcgttaatggcggcgatattaccgccctaaacgcggaaggcgattacactgtccttgacgatgccgcgaaaacaagccttggcgagggcataccaatagcgcaatggtggccggtacgaataccccgccccgcgcaagggcggcttccgccggatcagccgctgatcaccggcgaacgcgtgattgacgtgtttttccccctgtccaagggcggcactgcggcgatacccggcggcttcggcacgggcaagaccatgacccagcacgccatcgccaaatggtgtgacgcggatgtgattatttacattggatgcggcgagcgcgggaacgagatgacggatgtcctcaccgaatttccggaactgcaggatccgcgcacggggcgcagcctcatggaacggactttgctcattgccaacacttccaatatgccagtggccgcaagggaagtttcaatttacaccggcgttacgctcgccgaattttaccgcgatatgggctaccatgtcgctatcatggcggactctaccagccgctgggcggaggcgctgcgcgagctttccggccgcatggaggaaatgcccgccgaggaaggcttccccgcgtacctgcccacccgtcttgccgaattctacgaacgcgcgggccgcgtctccacgctctcaggcgctgaaggctccgtctcaattatcggggcggtttccccgccgggcggcgatttctccgagccggtaacgcagcacaccaaacgctttatacgctgcttttgggctttggaccgcgatcttgccaacgcccgccattacccggcgataagctggacggacagctattccgagtacgccgaggaagtgcgtccctggtgggaacgggtaaacgcaatctgggctgtagtacgcaaccagtgccttgagcttctcaagagcgatcagaaacttacggagattgtccgcctcatcggcccggacgccctgcccgacgagcaaaaactcgtccttgtcacctcggacattatcaaagacggatatttacagcaaaattcattcgatgaaattgatatgtactgcgtcccggcgaaacagattcggcttctggaactgataatggaattccatgagcgcgcgagaacctgcatcaagctgggagcgcccctcaccaaaatttccgtattgggattaaaggaaggcctgtccaggcttaaaagcacggtcaggaatgaaaatcttggcgagtttgacacatttgcggcaaagatgcgttcccagcttgaagaactggaacggagctaccgcacgcgggaagtgctgtaa

SEQ ID NO: 62284 - protein, 524 aa, Unknown
  Obtained from environmental sample
  DOMAIN (385)...(516): ATP synthase alpha/beta chain, C terminal domain
  misc_feature (1)..(524): Xaa is any amino acid
MLLGPGLIGSIYDGIQRPLELLYGRSGAFMTPGERGDPLDSKKKWHFVPDASLKERLAKGEKVPATAGLVLGSIQETESVICKIMVPPGVNGGDITALNAEGDYTVLDDAAKTSLGEGIPIAQWWPVRIPRPAQGRLPPDQPLITGERVIDVFFPLSKGGTAAIPGGFGTGKTMTQHAIAKWCDADVIIYIGCGERGNEMTDVLTEFPELQDPRTGRSLMERTLLIANTSNMPVAAREVSIYTGVTLAEFYRDMGYHVAIMADSTSRWAEALRELSGRMEEMPAEEGFPAYLPTRLAEFYERAGRVSTLSGAEGSVSIIGAVSPPGGDFSEPVTQHTKRFIRCFWALDRDLANARHYPAISWTDSYSEYAEEVRPWWERVNAIWAVVRNQCLELLKSDQKLTEIVRLIGPDALPDEQKLVLVTSDIIKDGYLQQNSFDEIDMYCVPAKQIRLLELIMEFHERARTCIKLGAPLTKISVLGLKEGLSRLKSTVRNENLGEFDTFAAKMRSQLEELERSYRTREVL

SEQ ID NO: 62285 - DNA, 1563 bp, Unknown
  Obtained from environmental sample
  misc_feature (1)..(1563): n is a, c, g, or t
gtgggcgccgacctggtcggaaaggttgaagcgggaatccccgaagacgatccccgcaatccggcggttattgccgacaacgtgggcgataacgtaggagatgtcgcgggcatgggcgccgacctttatgagtcctatgtcggttccattgtcgccaccatggcgctggcggtttcggctggtcataactttaacggcgcggtggttcccatgctgatggccgcggtcggaacggtagcatccattatcggaactttctttgtgcgctgcggagagaaggcggatcagaagtcgctgctgggggcattgcggaaaggaacctatatttcttccgctatcatcgttatcgcgtcctacccggtcattcgcctggcgcttcccggcaaccagggtgtctatttcgcgatagtatccggattgatcgcgggggttctgattgggttctttaccgagtattacacttcggatcattacaatcctaccaagaatcttgcctccgccagtctgaccgggcctgccaccattattatcggcggaatttctttgggtatgctttctaccctgctgccggtaatcattgtcggtgcttcggttctgaccagtttccttgtttcaggcgggctgggattctttaaaacaggcgcgacacccgcggagatgctttcagctttcaaccacgggctttacggggttggcctttccgcggtaggtatgctttccaccctgggtattacacttgcgaccgacgcttacggccctgtggcggataacgccggaggcattgccgaaatgtcccatctgccgcacgaggttcgggaacgtactgacgccctggattcccttggaaataccaccgctgccaccggcaagggtttcgcgatcggttccgcggcgctgaccgccctggctttgattgtcgcttatattgacgagatcaatattcacgatccgagttttgtgcttaagcttgagataaccaatcctcctgtactgattgggctctttgtcggcgttatgcttcccttccttttctcatccatgaccatgagcgcggtaggccgggcggcgcagaatatcgtaaaagaagttcgccgccagtttaaggaaatcaaaggtttgatggaaggcacagcggaagcggactatgccacttgtgttgatatttgtacccgaggggcgcagaaagaaatgatacttcccgccctgaccggcattatttcacccattgttgttggattgttactgggggttaatggcgtagcgggtatgctcgcgggcgccaccgcttcgggctttgtccttgcgattatgatggccaactcaggcggcgcgtgggataacgcaaagaaacacattgagggcggaaagttcggcggcaagggttcggatccccacaaggccgctgttgtcggcgacaccgtangcgatcccttcaaggatacttccggtccgtcccattatattttgattaaactgctttccatggtctccattgtttttgcggcttttgttctaagtttaatttgttcagtttctaaaaatagaaattggaatgctggataa

SEQ ID NO: 62286 - protein, 520 aa, Unknown
  Obtained from environmental sample
  DOMAIN (1)...(501): Inorganic H+ pyrophosphatase
  misc_feature (1)..(520): Xaa is any amino acid
MGADLVGKVEAGIPEDDPRNPAVIADNVGDNVGDVAGMGADLYESYVGSIVATMALAVSAGHNFNGAVVPMLMAAVGTVASIIGTFFVRCGEKADQKSLLGALRKGTYISSAIIVIASYPVIRLALPGNQGVYFAIVSGLIAGVLIGFFTEYYTSDHYNPTKNLASASLTGPATIIIGGISLGMLSTLLPVIIVGASVLTSFLVSGGLGFFKTGATPAEMLSAFNHGLYGVGLSAVGMLSTLGITLATDAYGPVADNAGGIAEMSHLPHEVRERTDALDSLGNTTAATGKGFAIGSAALTALALIVAYIDEINIHDPSFVLKLEITNPPVLIGLFVGVMLPFLFSSMTMSAVGRAAQNIVKEVRRQFKEIKGLMEGTAEADYATCVDICTRGAQKEMILPALTGIISPIVVGLLLGVNGVAGMLAGATASGFVLAIMMANSGGAWDNAKKHIEGGKFGGKGSDPHKAAVVGDTVXDPFKDTSGPSHYILIKLLSMVSIVFAAFVLSLICSVSKNRNWNAG

SEQ ID NO: 62287 - DNA, 2100 bp, Unknown
  Obtained from environmental sample
  misc_feature (1)..(2100): n is a, c, g, or t
atgatttctacgccaatgtatatcattatgacaagaacccaacgggtaacattgcttaaaagtttgtgggatcgttccagcgttttgcttgatgggcttgcttcaagcgccagaacttatatgccaatggcgattcaatcccgcggcgaacgcggtacgcttgagttaatgtaccttccgtccaactccgcggcgcttgccgaagcgaattacataacaattacaggttacggtattaattcaatacacacggatcatgtttgggcttcaaacgatcccgatatcgattcaaaaatcgacacaacggaattacgccccggcgttacgcgattaaacgacgtccttactcctctttacgatgatttagccggagaccttaacacccgcgcgcagcgggaagcgggagaactttcgcaaagcattacgacaatgacggatcaattccttgccctcgcgctccgcacggacgccgcgggcgaaagaatgcgcgatgatattcaggcgacaattaacggattaaacttgaaacttaacgatatacttacaagaatttcaggcgagataggctcatacccgaatttttcaactgacagcatcggtaaatcaaaagacagaaaatatattttctataaaccgataatgtaccggcagatggcggacaataatttcttccgcggattaatccgccttgaagtctctctggattcaattataaatgaaatctaccgaggacagatgactatcttgttaactatcggagttgtcgcatttatagttttattaatcggcattgtaggggcgtttacattctcaagactgattattaaaccgattataaaccttgtaaaacatatcgaaataatccgcgacaccgaagacaagtcaaaattgatgggagtagacatacatatttccagcaaagacgaaattgccattcttggaaatacaatcaacgacatgacgcacggactcgtaaaagcggcgcttgccgcgtccgacctttcaatcggaaaagaaatacaaaagaaatttattccgctggatgtggacagtcagggaaacaaacaaaccagcggctttaacaaaacgaaaaacttggatttctttggctattacgaaggagccaaaggcgtatcgggagactattttgattacaaagatttggatggtcgttattacgctatgataaaatgcgacgtagcgggaaaaggaattccggcggcgcttatcatgattcaggtagcgaccatgttccttaactattttaaacagtggaaacccaacgaaaagggaatgcacatagaagaggttgtgtatcagatcaatgactttatagaagcgcttgcgtttaaggggcgttttgccgctttcactctctgcttgttcgactcggcaaccggaaccgcgcgtttctgcaacgccggcgacaatatcgtccacctntacgacgcctcggaaggcaagctaaaagtcatcacactgccgcaatcccccgccaccggcgtactccccaactttatgatcgagtccacgggcggatacagcgtccaaaccataatggtagatcacggcgacatcctcctgctctacaccgacggtattgaagaatcaaaacgaaaattccgcgacggcaatttcagggaaataatctgcaatgaaggcgctctcgacacgccccatgaaaatcacctttgcggacaggccgatgaggagatgacgcccgagcgcgtagaggcgattatcaacgcggtaatggcaaaaaagatttataccttaaaaaaataccacaatcctgaaggcgatacagaacttcagtttgatttttcaacctgtaaaggcaatgctgaagaagtgataatggcgatggtttcggtagaaaaaatgttccgctgttacaaaagcccggacgcgggcgaggattcccgcgttttggtggataaaaaagtagacggcttcctgaaaaaccatttcatgcaatacaggcgttattgcgcgcacacaaaagaataccctgaaaatgaagcgtatatgtattatactcatgttaaggaagatgatcagtacgacgatctgacaatattgggaataaagagaaagtga

SEQ ID NO: 62288 - protein, 699 aa, Unknown
  Obtained from environmental sample
  DOMAIN (252)...(326): HAMP domain
  misc_feature (1)..(699): Xaa is any amino acid
MISTPMYIIMTRTQRVTLLKSLWDRSSVLLDGLASSARTYMPMAIQSRGERGTLELMYLPSNSAALAEANYITITGYGINSIHTDHVWASNDPDIDSKIDTTELRPGVTRLNDVLTPLYDDLAGDLNTRAQREAGELSQSITTMTDQFLALALRTDAAGERMRDDIQATINGLNLKLNDILTRISGEIGSYPNFSTDSIGKSKDRKYIFYKPIMYRQMADNNFFRGLIRLEVSLDSIINEIYRGQMTILLTIGVVAFIVLLIGIVGAFTFSRLIIKPIINLVKHIEIIRDTEDKSKLMGVDIHISSKDEIAILGNTINDMTHGLVKAALAASDLSIGKEIQKKFIPLDVDSQGNKQTSGFNKTKNLDFFGYYEGAKGVSGDYFDYKDLDGRYYAMIKCDVAGKGIPAALIMIQVATMFLNYFKQWKPNEKGMHIEEVVYQINDFIEALAFKGRFAAFTLCLFDSATGTARFCNAGDNIVHLYDASEGKLKVITLPQSPATGVLPNFMIESTGGYSVQTIMVDHGDILLLYTDGIEESKRKFRDGNFREIICNEGALDTPHENHLCGQADEEMTPERVEAIINAVMAKKIYTLKKYHNPEGDTELQFDFSTCKGNAEEVIMAMVSVEKMFRCYKSPDAGEDSRVLVDKKVDGFLKNHFMQYRRYCAHTKEYPENEAYMYYTHVKEDDQYDDLTILGIKRK

SEQ ID NO: 62289 - DNA, 402 bp, Unknown
  Obtained from environmental sample
  misc_feature (1)..(402): n is a, c, g, or t
ttgcgatttaaagacataccagaggaaatctttaccttggagcttcccaaagtcccggcggaaagcgacgggagcaagatatgggactggctgcaatttctgcgtgcaaagcagaaaggagaatttgacatgatagcgacaacaaatcccgaaatacgggaagcggtagacatcctgtacgagataagcgcggacgaaaaagtaagggcggagtatgtcgcgcgtcaaaaggcctggatggacaggcagtcgcaatttgacggttatttcaaaaaaggcaaaattgaaggcaaagttgaaggcaaagttgaaactgcccgcaacttgaaattattaggtgtctcaacggacataattcttcaatcaactggtttgtcgcctgaagaaatagccgaattgtag

SEQ ID NO: 62290 - protein, 133 aa, Unknown
  Obtained from environmental sample
  misc_feature (1)..(133): Xaa is any amino acid
MRFKDIPEEIFTLELPKVPAESDGSKIWDWLQFLRAKQKGEFDMIATTNPEIREAVDILYEISADEKVRAEYVARQKAWMDRQSQFDGYFKKGKIEGKVEGKVETARNLKLLGVSTDIILQSTGLSPEEIAEL

SEQ ID NO: 62291 - DNA, 369 bp, Unknown
  Obtained from environmental sample
  misc_feature (1)..(369): n is a, c, g, or t
atggttaaagatgagaataatttattgaactggcttcacttttttaaggcgaggacgagagaagaatttgaggcggtagcggcgacnaatcctgagatacgggaagcggtggacatcctgtacgagataagcgcggacgagaaagtaagggcggagtatgccgcgcgtcaaaaggcatggatggacaggcagtcgcaatttgacggctatttcaagaaaggcatcgagaaaggcatcgagaaaggcatcgaggaaggcatcgaaaaaggcataattaagactgctcacaacttaaaagcgttaggaattccaacagacataattgttaaatcaaccggtttgtcgcctgaagaaatagccaaactgtag

SEQ ID NO: 62292 - protein, 122 aa, Unknown
  Obtained from environmental sample
  misc_feature (1)..(122): Xaa is any amino acid
MVKDENNLLNWLHFFKARTREEFEAVAATNPEIREAVDILYEISADEKVRAEYAARQKAWMDRQSQFDGYFKKGIEKGIEKGIEEGIEKGIIKTAHNLKALGIPTDIIVKSTGLSPEEIAKL

SEQ ID NO: 62293 - DNA, 1767 bp, Unknown
  Obtained from environmental sample
  misc_feature (1)..(1767): n is a, c, g, or t
atgaagtattcgcaatcttttatcccgacactgcgggaagttcccacggacgcgattattgtaagccaccgcctaatgttccgcgcgggaatgatccgacggctgggcaacggcctttttacctatctgcctttaggcctgcgttctttcagaaaggtggagcaaattatccgcgaagaaatgaacgctatcggttccctggaaataaaacccaccgtggttatacccggagagctttggaaagaatccgggcgctgggacagcatgggcgaggccttgctcagggtgaagaaccgcctgggcgcggattttgtcgtgtcccccaccgccgaagaagcctttaccgcccttgtgcgggatgagctttccagctaccgccagcttcccatttcgctttaccagataaataccaagtaccgcgatgaagtacgcccgcgttacggggtaatgcgcggcagggaatttgtgatgaaagacgcctattcctacgacgcggacgagacgagcctggaaaaaagttaccaggacatgggccgcgcctaccgccgggttttcaagcgctgcggcctttcggtgatctcggtcaaggccgattcaggcgcgatgggcgggagcggctcggaagagtttatggtagaaagcgaaatcggggacaataccctgcttttctgcaaaaactgcgacttcgcggcaaacgttgaaaaggccgattgcaaaccggactattcagccgtttcttctgcttccacgcccccagtcgaaaagatcgacacaccgaacgtaaagacaatagaagaactttgctcctttcttaaaaccgatgccaagaccttcatcaaaaccctcgtttaccgggcggtaaaggtggagctccaggacgccgaatgtgaagaagccttttacgccgtgtgcatacgcggggatctggaaataaacgaagccaagctctgcgcccttttaaaagccgccgaagtgagccttgccagcgaagcggacgtggtgcgcctgaccggagcgccagtcggtttcgctggccccgttggtttaagccagttgaaggtaattgcagacctcaccgttacggccattaacgacggggtaacgggcgctcttgtcaaagaccttcactacaagcacgttgcctacggacgtgatttccaggcctggatgacggcggaattgcgtactgtaaaagccggcgaccgctgttcccactgtggcggggaactatacgagaaaaagggcaacgagctggggcacatttttaagctgggctacaagtatacaaagtcaatgaacgtcagttatctcgatgaaaagggaacaaggcagataccactaagcggcagttacggcatcggccttgatcgcaccctggcaagcatcattgaagaacaccacgacgacgccggtatcatctggcccttaacagtggccccctatcacgtcaccatcgtgcccatcaaatacgacggggcagtgaaggcggcggcagacaggcttgctgaagacctggaacgacagggcattgaagtccttcttgacgacagggacgaaaggcccggtgtcaaattcaacgatgccgacctaatcggtattccctatcgggtagtaatcggcgacaaaaatctcgcgggtgaaagcccgaaggtagagcttaagcgccgctcggaaagagagagtcgcctggttgagcttagcaaaatcgccggagaattgaaggaagaaatacaaagggagctaaaaaatctaaatttatgcgaataa

SEQ ID NO: 62294 - protein, 588 aa, Unknown
  Obtained from environmental sample
  DOMAIN (253)...(380): YbaK / prolyl-tRNA synthetases associated domain
  misc_feature (1)..(588): Xaa is any amino acid
MKYSQSFIPTLREVPTDAIIVSHRLMFRAGMIRRLGNGLFTYLPLGLRSFRKVEQIIREEMNAIGSLEIKPTVVIPGELWKESGRWDSMGEALLRVKNRLGADFVVSPTAEEAFTALVRDELSSYRQLPISLYQINTKYRDEVRPRYGVMRGREFVMKDAYSYDADETSLEKSYQDMGRAYRRVFKRCGLSVISVKADSGAMGGSGSEEFMVESEIGDNTLLFCKNCDFAANVEKADCKPDYSAVSSASTPPVEKIDTPNVKTIEELCSFLKTDAKTFIKTLVYRAVKVELQDAECEEAFYAVCIRGDLEINEAKLCALLKAAEVSLASEADVVRLTGAPVGFAGPVGLSQLKVIADLTVTAINDGVTGALVKDLHYKHVAYGRDFQAWMTAELRTVKAGDRCSHCGGELYEKKGNELGHIFKLGYKYTKSMNVSYLDEKGTRQIPLSGSYGIGLDRTLASIIEEHHDDAGIIWPLTVAPYHVTIVPIKYDGAVKAAADRLAEDLERQGIEVLLDDRDERPGVKFNDADLIGIPYRVVIGDKNLAGESPKVELKRRSERESRLVELSKIAGELKEEIQRELKNLNLCE

SEQ ID NO: 62295 - DNA, 981 bp, Unknown
  Obtained from environmental sample
  misc_feature (1)..(981): n is a, c, g, or t
ttgtttttgatgatagtccaacttgcccgacttttacttaactatcttcagataatactgatggagattgcaagtactgacgtaatgacgcgcctccgccgcgacatgtaccagacggtccaatggcaggattataaatttttaaaccgctttccaaccggaaaccttatgacaaggatgacgcaggacttggaccgtctgcggcataccgtcgcatgggtttcctaccaattcataggggctatcgccctatttgccgcgacttttattttttatctgttcataaattggaagctcgccctttgcctcgtactcattacgccttttattctgtatataagcagaaagtttgtaaaaaaaataaggccgcgttttcaattactgcggcaaaaacttacggacttaggaaccgccgttactgaaaatatcgacggcaaccgcgtagtaaaagccttcgcgcgtgaagaacatgaaaaagatagagttgaaaaacaaaacgccgaataccgtgatataagttgtgaaaacgcgcttataacggcaaaataccagccgtttcttgaaacggcaagccagttcctcatggtaataatgcttgttgcgggcggtttttttctgataaaggaatggatgactcccggtgaatacatggcgttttcctcgcttacatgggcgctgtccatgccgatgcagatgcttggccccctgcttgccgatcttgaacgttacacttccgcagggcagatgatccgtgaagttgttgaaacgccaaaaggaataagcgacatgtcaggggctatgcagctaacgcaaaggcctaaaggaaaaattgagttcagggatgtaaaacttaccattaacggaaatacaattctggaagacattaattttacggcggaagcgggttccactgtcggcatacttggaagcacggggagccggaaaaacttcgctgataaacctccttgtacgtttttatga

SEQ ID NO: 62296 - protein, 326 aa, Unknown
  Obtained from environmental sample
  DOMAIN (1)...(230): ABC transporter transmembrane region
  misc_feature (1)..(326): Xaa is any amino acid
MFLMIVQLARLLLNYLQIILMEIASTDVMTRLRRDMYQTVQWQDYKFLNRFPTGNLMTRMTQDLDRLRHTVAWVSYQFIGAIALFAATFIFYLFINWKLALCLVLITPFILYISRKFVKKIRPRFQLLRQKLTDLGTAVTENIDGNRVVKAFAREEHEKDRVEKQNAEYRDISCENALITAKYQPFLETASQFLMVIMLVAGGFFLIKEWMTPGEYMAFSSLTWALSMPMQMLGPLLADLERYTSAGQMIREVVETPKGISDMSGAMQLTQRPKGKIEFRDVKLTINGNTILEDINFTAEAGSTVGILGSTGSRKNFADKPPCTFL

SEQ ID NO: 62297 - DNA, 567 bp, Unknown
  Obtained from environmental sample
  misc_feature (1)..(567): n is a, c, g, or t
ttggacggcgaagatgtcagacgttacacattatcgtcactgagacggaaaatagggcttgcaatgcaggatgtgtttttattttccgattccgtaaaggggaatatatcctacggcaggccggaattggatgatgagagcgtaaaaaaatgcgcggtacaggcggacgcggagcattttatcaatataatgacggacggctataacactttggtaggagaacgcggagtcgggatttcaggcggacagaggcagaggatcgcccttgcaagggcgcttgccatagaaccggccgtccttgtgttagacgacaccacatcatcggtggacagtgagacagaacagtatattcaggaacatcttgaaaaacttgagtttccctgcacaaagataattatcgcacagaggatatcctcgtttagaaaggcggatttaattcttgtcatggacaagggaagaattattgaaagagggacgcacgaggaattgctcgtgaaaaaagggttttatcatcacatctggtcgcttcagcacaatgcgggtatttccgctttggaggcgaaatga

SEQ ID NO: 62298 - protein, 188 aa, Unknown
  Obtained from environmental sample
  DOMAIN (4)...(152): ABC transporter
  misc_feature (1)..(188): Xaa is any amino acid
MDGEDVRRYTLSSLRRKIGLAMQDVFLFSDSVKGNISYGRPELDDESVKKCAVQADAEHFINIMTDGYNTLVGERGVGISGGQRQRIALARALAIEPAVLVLDDTTSSVDSETEQYIQEHLEKLEFPCTKIIIAQRISSFRKADLILVMDKGRIIERGTHEELLVKKGFYHHIWSLQHNAGISALEAK

SEQ ID NO: 62299 - DNA, 654 bp, Unknown
  Obtained from environmental sample
  misc_feature (1)..(654): n is a, c, g, or t
atgagcaatatcaacgttaccgtctggaacgagtacggagaagaacaaaaagacaaggccgtcaccggtatttaccccaacgggttgcacgtaacaatttcagaattccttaacaaagacggcggtataaacgccaaaaccgcagtcttttccgaacccgaacacgggttaacagatgttgttcttgacaataccgacgtattaatatggtgggggcacatgtatcatgaaaaacttgacgaccggattgcttcccgagtagttgaacgggtacaacgtggcatgggaattatctttcttcattcggcgcacaaatcaaaaccttttatgcgcctacttggaacaagcggttctttaagctggagagaggcgcacgaaagaagccgcgtgtggacatgcacgccgtctcatcctattgcaaagggtgtccccgaacaatttgtacttgaatgtgaggaaatgtacggcgagccgttcgggattcccgcgccgctgcanacgatctttataagctggtttcagggcggcaatgttttcagaagcggcgtaacatttgtgcgcgaaaacggcaggattttctattttcaacccggacacgaaaactatcccgcctatcacaacgaaaacgtacagcgggtaattacaacgctgtaa

SEQ ID NO: 62300 - protein, 217 aa, Unknown
  Obtained from environmental sample
  DOMAIN (4)...(216): Protein of unknown function (DUF1037)
  misc_feature (1)..(217): Xaa is any amino acid
MSNINVTVWNEYGEEQKDKAVTGIYPNGLHVTISEFLNKDGGINAKTAVFSEPEHGLTDVVLDNTDVLIWWGHMYHEKLDDRIASRVVERVQRGMGIIFLHSAHKSKPFMRLLGTSGSLSWREAHERSRVWTCTPSHPIAKGVPEQFVLECEEMYGEPFGIPAPLXTIFISWFQGGNVFRSGVTFVRENGRIFYFQPGHENYPAYHNENVQRVITTL

SEQ ID NO: 62301 - DNA, 840 bp, Unknown
  Obtained from environmental sample
  misc_feature (1)..(840): n is a, c, g, or t
atggcgctttccatcgctcctgcggaaaaccaccgcgaaagggaaaagggcgttgtcgtatacccggtatattcgcggcgctcaggcggcctgtctgtggggattaatcttttccccgataaaaaatcatgtccctttgactgcccatactgcgaagttttcccattttcagctaacgccgctttttcgctgtctcaaatggaagaagacctgcggcttgcaattaccgccgccgcgcggcagaatacgcccgtaaaagacatctgtttttccggcaacggagaaccgtcgctctcccccgcttttcccgaagcgcttaaactggcggatgttatacgctcaagtttggcttcctcttcgcagcttgtgcttataacaaacggcgcgggacttttccggccgcagactttttccctgcttcaggatgccgcaaaaaacccttctttcgacatctggctaaaacttgatgcgggcacagagctttggtatcaaaaaataaaccgttcgacttttccatttgaaaaacttaccgaaaaaataaaggaattcgtttcctgtgcgcaggtaacaattcaaacaatgctctgcgctgttgacggcatcggccctccacccgacgaagagcatgcatgggaaaaactggcgcttgaacttgcggcttacggtaaagacggaacaggcggagtacgcaaagtgcagatttacggcaaagcccgccccgcgcccgaagacccaaaaacatcgccgctgcctgttgaatatcttgaacgccgcgccgattctctgcgccacgcattatcgcaaaacggcttgcttacgccggtggaaatttacttttag

SEQ ID NO: 62302 - protein, 279 aa, Unknown
  Obtained from environmental sample
  misc_feature (1)..(279): Xaa is any amino acid
MALSIAPAENHREREKGVVVYPVYSRRSGGLSVGINLFPDKKSCPFDCPYCEVFPFSANAAFSLSQMEEDLRLAITAAARQNTPVKDICFSGNGEPSLSPAFPEALKLADVIRSSLASSSQLVLITNGAGLFRPQTFSLLQDAAKNPSFDIWLKLDAGTELWYQKINRSTFPFEKLTEKIKEFVSCAQVTIQTMLCAVDGIGPPPDEEHAWEKLALELAAYGKDGTGGVRKVQIYGKARPAPEDPKTSPLPVEYLERRADSLRHALSQNGLLTPVEIYF

SEQ ID NO: 62303 - DNA, 339 bp, Unknown
  Obtained from environmental sample
  misc_feature (1)..(339): n is a, c, g, or t
atggatgagaaacaggaagggtcgtatttcgatgggggtttctgggcattagtcggctggactttgctcggcggaattgtactcgcaatcacgctaggtatagccttgccgtgggtttactgttggaatgttcgttggcggataaaccacactgttgtcgaagggaaacgcctgcaattcaatggtacgggaggttcgctgttcgggcattatatccttcgagggtggctgttaggtttaatcctaaccccgctgacattggggctttatccgttttattatttctcagtttctctaaaaaaatgggaaacaaaaaacaccaacttcagcaatagctaa

SEQ ID NO: 62304 - protein, 112 aa, Unknown
  Obtained from environmental sample
  misc_feature (1)..(112): Xaa is any amino acid
MDEKQEGSYFDGGFWALVGWTLLGGIVLAITLGIALPWVYCWNVRWRINHTVVEGKRLQFNGTGGSLFGHYILRGWLLGLILTPLTLGLYPFYYFSVSLKKWETKNTNFSNS

SEQ ID NO: 62305 - DNA, 414 bp, Unknown
  Obtained from environmental sample
  misc_feature (1)..(414): n is a, c, g, or t
atgaacagttttcataaaaccgttgatcttttgcacagggcaatgagcgccagcgccgtgcgccgcgaggtcattgccaataatatttctaacgccaccagctacggcttcaaacgttcagtcgtcaattttgaaagcgagcttaaaagggcgctggatacggaaaagcaaaaaccggccattgaaatggtacagacacatccatctcatttttccaattacaaggaacgggactacagggacgtgcagatacggcgggttctggactataccagcacctataacaacaatggcaacaacgttgatatggaacaggaaaccatggcctccctggaaaatcagatgtcgtatacgctgtatgccaaggctgtcgaatttgaattcgaccaggtgaaccaggtactgaggaattag

SEQ ID NO: 62306 - protein, 137 aa, Unknown
  Obtained from environmental sample
  DOMAIN (8)...(38): Flagella basal body rod protein
  misc_feature (1)..(137): Xaa is any amino acid
MNSFHKTVDLLHRAMSASAVRREVIANNISNATSYGFKRSVVNFESELKRALDTEKQKPAIEMVQTHPSHFSNYKERDYRDVQIRRVLDYTSTYNNNGNNVDMEQETMASLENQMSYTLYAKAVEFEFDQVNQVLRN

SEQ ID NO: 62307 - DNA, 1557 bp, Unknown
  Obtained from environmental sample
  misc_feature (1)..(1557): n is a, c, g, or t
atgaatgacattcaggtaaaaatcggagacgtaaaccagcttaccccaaaagagatagtcgtcgaactggataaatacatagtcgggcaaaaaaaggccaagagggccgtcgccgtggctttgcgtaaccggatgcggcggctcaagctggatcccgaactgcgcgatgatgtcgctcccaagaatatacttatgatcgggcctacgggcgtaggaaaaacggagattgcaaggaggctcgcgaaactcgccggctcgccttttatcaaagttgaggcgaccaaatataccgaagtaggctacgtgggccgtgacgttgaatccatggtgcgcgatcttatggcttccggtttccagatggtaaaacaggaaatgcaggaggcctttgttgccgaagccgaaaaacgcaccgaggagatccttctggatctgctcctccccggcaccggaaaaaaaaccaagccaaaaaagaccgcgccctcgcccgtggtcaggcccatggggtcttttacattcggcccggaaaacggccagggcgccggccttatcgggaccgcgatacaggtggggattccctcttacgcgaaccagaacgcgcaggaagaggataaagccgaggctgaggcggaaaaggcggaagagaaccaaggcgactcaggggcggctgatccggcggcttcaaggacaagggaaaaattcagaacccaactccgcgaaggcaaacttgaggatcgaaccgtcgagcttatggtaaaccagaacccgcagttcccgccctttgaaatgatgggcgtcagcatggaggacgtggaatcgagcctttccggttttgccaactttttcggcgggggcaagaaaaagaaagtcgtgacaatagcacgcgcgcgggaaataatcaaagccgaggaactggaaaaactgatagaccgcgacagggtaagcgacgaggcccgccagcgggttgaggaaacaggcataatatttatagacgagattgacaagatagccgtcaaaggggagcggagcggagggccggacgtttcccgcgagggagtacagcgcgacatactccccatcgtggagggcgcaaccgttaacacgaaatgggggccggtcaacaccgaccatatcctctttatcgccgccggggcctttaccgtgagcaagccttcggacttaatccccgaattgcaaggccgtttccccctgcgggtggaattggattcgcttgggaaggatgatttcctgcggattctcaccgaaccgaagaacgccctgaccaggcagtacacggaactgctcgctaccgagggcatagagctgggatttaccaccgaggcgattgtgcagcttgcggcccttgccgccgaggttaattccaagcttgaaaatataggggcgcggcggcttcataccattatggaagccctgcttgaagaactgtcgtttgaggcccccgacattgcgcccgccaaagtccaggttacggtggagtatgtgaacaaaaatctggcggatatagtgaaggatcaggacctgggcaggtatatgttataa

SEQ ID NO: 62308 - protein, 518 aa, Unknown
  Obtained from environmental sample
  DOMAIN (62)...(461): ATPase family associated with various cellular activities (AAA)
  misc_feature (1)..(518): Xaa is any amino acid
MNDIQVKIGDVNQLTPKEIVVELDKYIVGQKKAKRAVAVALRNRMRRLKLDPELRDDVAPKNILMIGPTGVGKTEIARRLAKLAGSPFIKVEATKYTEVGYVGRDVESMVRDLMASGFQMVKQEMQEAFVAEAEKRTEEILLDLLLPGTGKKTKPKKTAPSPVVRPMGSFTFGPENGQGAGLIGTAIQVGIPSYANQNAQEEDKAEAEAEKAEENQGDSGAADPAASRTREKFRTQLREGKLEDRTVELMVNQNPQFPPFEMMGVSMEDVESSLSGFANFFGGGKKKKVVTIARAREIIKAEELEKLIDRDRVSDEARQRVEETGIIFIDEIDKIAVKGERSGGPDVSREGVQRDILPIVEGATVNTKWGPVNTDHILFIAAGAFTVSKPSDLIPELQGRFPLRVELDSLGKDDFLRILTEPKNALTRQYTELLATEGIELGFTTEAIVQLAALAAEVNSKLENIGARRLHTIMEALLEELSFEAPDIAPAKVQVTVEYVNKNLADIVKDQDLGRYML

SEQ ID NO: 62309 - DNA, 804 bp, Unknown
  Obtained from environmental sample
  misc_feature (1)..(804): n is a, c, g, or t
ttggaattaacctcggcggcaagggccgcaagctgcacaatcgcctcggtggtaaatcccagctctatgccctcggtagcgagcagttccgtgtactgcctggtcagggcgttcttcggttcggtgagaatccgcaggaaatcatccttcccaagcgaatccaattccacccgcagggggaaacggccttgcaattcggggattaagtccgaaggcttgctcacggtaaaggccccggcggcgataaagaggatatggtcggtgttgaccggcccccatttcgtgttaacggttgcgccctccacgatggggagtatgtcgcgctgtactccctcgcgggaaacgtccggccctccgctccgctcccctttgacggctatcttgtcaatctcgtctataaatattatgcctgtttcctcaacccgctggcgggcctcgtcgcttaccctgtcgcggtctatcagtttttccagttcctcggctttgattatttcccgcgcgcgtgctattgtcacgactttctttttcttgcccccgccgaaaaagttggcaaaaccggaaaggctcgattccacgtcctccatgctgacgcccatcatttcaaagggcgggaactgcgggttctggtttaccataagctcgacggttcgatcctcaagtttgccttcgcggagttgggttctgaatttttcccttgtccttgaagccgccggatcagccgcccctgagtcgccttggttctcttccgccttttccgcctcagcctcggctttatcctcttcctgcgcgttctggttcgcgtaa

SEQ ID NO: 62310 - protein, 267 aa, Unknown
  Obtained from environmental sample
  SIGNAL (1)...(27)
  misc_feature (1)..(267): Xaa is any amino acid
MELTSAARAASCTIASVVNPSSMPSVASSSVYCLVRAFFGSVRIRRKSSFPSESNSTRRGKRPCNSGIKSEGLLTVKAPAAIKRIWSVLTGPHFVLTVAPSTMGSMSRCTPSRETSGPPLRSPLTAILSISSINIMPVSSTRWRASSLTLSRSISFSSSSALIISRARAIVTTFFFLPPPKKLAKPERLDSTSSMLTPIISKGGNCGFWFTISSTVRSSSLPSRSWVLNFSLVLEAAGSAAPESPWFSSAFSASASALSSSCAFWFA

SEQ ID NO: 62311 - DNA, 543 bp, Unknown
  Obtained from environmental sample
  misc_feature (1)..(543): n is a, c, g, or t
atggcgaaaaagaagtttagatcgactaccattatagccgttaggaaggacggcaagatcgctatggcgggggacggacaggtgaccttcggccaaacggtgatgaagaataacgcccgcaaggtacgcaggctgatggacggcaaggtgttatgcggttttgccggttccacggcggatgtttttaccctttttgaccgcttcgaggcgaagctcaaggaatattcgggcgatcttacccgcgccgccgtggagctggcaaaggactggcgcatggatcgcagcctcagacggcttgaggcgatgatcctcgtcgccgatgtttcaaagaccctgcttgtatccggttccggcgacgttatcgagccggctgacaatgccattgccatcggatcaggcggcaattacgcttacgccgcggcgttagccttcctcgacggaagcaattattcggctaaggaaatcgccgaaaaaagcctaaaaatcgccgggaatatctgtatctataccaacatggaaataactctggaggaattgggatga

SEQ ID NO: 62312 - protein, 180 aa, Unknown
  Obtained from environmental sample
  DOMAIN (5)...(179): Proteasome A-type and B-type
  misc_feature (1)..(180): Xaa is any amino acid
MAKKKFRSTTIIAVRKDGKIAMAGDGQVTFGQTVMKNNARKVRRLMDGKVLCGFAGSTADVFTLFDRFEAKLKEYSGDLTRAAVELAKDWRMDRSLRRLEAMILVADVSKTLLVSGSGDVIEPADNAIAIGSGGNYAYAAALAFLDGSNYSAKEIAEKSLKIAGNICIYTNMEITLEELG

SEQ ID NO: 62313 - DNA, 555 bp, Unknown
  Obtained from environmental sample
  misc_feature (1)..(555): n is a, c, g, or t
ttgccgcctgatccgatggcaatggcattgtcagccggctcgataacgtcgccggaaccggatacaagcagggtctttgaaacatcggcgacgaggatcatcgcctcaagccgtctgaggctgcgatccatgcgccagtcctttgccagctccacggcggcgcgggtaagatcgcccgaatattccttgagcttcgcctcgaagcggtcaaaaagggtaaaaacatccgccgtggaaccggcaaaaccgcataacaccttgccgtccatcagcctgcgtaccttgcgggcgttattcttcatcaccgtttggccgaaggtcacctgtccgtcccccgccatagcgatcttgccgtccttcctaacggctataatggtagtcgatctaaacttctttttcgccatactcttctcttccttaattgccttttttcactatacgcccaccgctcaaactaaagttttcgcgccttatctcgcatacaggggcctttcttggggctccccacgntccgcattttctcatcctcaccgcttaacgcggtgcctcttttga

SEQ ID NO: 62314 - protein, 184 aa, Unknown
  Obtained from environmental sample
  misc_feature (1)..(184): Xaa is any amino acid
MPPDPMAMALSAGSITSPEPDTSRVFETSATRIIASSRLRLRSMRQSFASSTAARVRSPEYSLSFASKRSKRVKTSAVEPAKPHNTLPSISLRTLRALFFITVWPKVTCPSPAIAILPSFLTAIMVVDLNFFFAILFSSLIAFFHYTPTAQTKVFAPYLAYRGLSWGSPRSAFSHPHRLTRCLF

SEQ ID NO: 62315 - DNA, 780 bp, Unknown
  Obtained from environmental sample
  misc_feature (1)..(780): n is a, c, g, or t
gtgaggggcttnatcgccgatttaagtttgaaacgcgcgtcagccgccagcgtgaaccgcaggctctcctctgtccggggcttttaccgctggctgaccaaatttcgcgggcgtgttgataatccntgcgacggcggccccggcgggctcatccgcaatgtcaaagcgccgcagactttgccctccctgctatgggaagacgagatggcggattttgcggatctgccggacgagaaaaaaatgctgtggccggcaagggacaaggctttgattttggctatgtactccgcggggctgcgtatttcagaattggtttcattaaatataaagatgatggcagccaacatggagagcgcgagaataacaggcaagggcggcaaggatcgtatggtgttcttttccgaagaggcgcgtcaggcgattcatgattatctgccggaacgggacgcaaggatcaggatggcgggactaaaagccgctgatttgaaaggcgccttattcataagcgggaaggggaagcccatttcggtagcgggcgtgcgctggattatcagtcagtactccacggtttcggggcttgggaaaaacatacacccccacagtttccgccacagttttgccacacaccttgtgaacgcgggctgcgacgtgcgcatcgtgcaggaaatgctggggcacgcccggctttcaaccacgcagcgttactcccatgtcagcattgaaaggttgaagaaggtgtatgagagagcgcatccccactcaaaagaggcaccgcgttaa

SEQ ID NO: 62316 - protein, 259 aa, Unknown
  Obtained from environmental sample
  DOMAIN (75)...(245): Phage integrase family
  misc_feature (1)..(259): Xaa is any amino acid
MRGXIADLSLKRASAASVNRRLSSVRGFYRWLTKFRGRVDNPCDGGPGGLIRNVKAPQTLPSLLWEDEMADFADLPDEKKMLWPARDKALILAMYSAGLRISELVSLNIKMMAANMESARITGKGGKDRMVFFSEEARQAIHDYLPERDARIRMAGLKAADLKGALFISGKGKPISVAGVRWIISQYSTVSGLGKNIHPHSFRHSFATHLVNAGCDVRIVQEMLGHARLSTTQRYSHVSIERLKKVYERAHPHSKEAPR

SEQ ID NO: 62317 - DNA, 573 bp, Unknown
  Obtained from environmental sample
  misc_feature (1)..(573): n is a, c, g, or t
ttggtaaaaaacgcaggcgcaagaaagaacgctctgccgcccttatcgtggattgtctccatggatacttgcgatcctcaacgctacacggaactgcggggcgcgggttttgccgaggcggaaacttttgccaaaaaacttttttcgctgtttccgaatgacagttatgtacaggcggtgcgcgtaaaaggctctgaggacgatacggaaaaattttaccgttactggaaaacagcgagccccaaaagcgaaaaaaacattattatccaaaagtacgatgatttctgcggtattctggagaaaaaacaggcttccgacatttcgcccgttatccgacaatcatgttggcatatcatgagagatttacccgtcttgataaacggagacgttcctctgtgcagagaaaatctttctgtcttaaagggcgaaaaaaaggatatacttggaaatgtatttgcggactcacttgaaactatctggcaaaacggggataaatactacaaggaacaatgcatgaagaaatacactggtctttgcgcggggtgcgatgaatactatacctacaatttttaa

SEQ ID NO: 62318 - protein, 190 aa, Unknown
  Obtained from environmental sample
  misc_feature (1)..(190): Xaa is any amino acid
MVKNAGARKNALPPLSWIVSMDTCDPQRYTELRGAGFAEAETFAKKLFSLFPNDSYVQAVRVKGSEDDTEKFYRYWKTASPKSEKNIIIQKYDDFCGILEKKQASDISPVIRQSCWHIMRDLPVLINGDVPLCRENLSVLKGEKKDILGNVFADSLETIWQNGDKYYKEQCMKKYTGLCAGCDEYYTYNF

SEQ ID NO: 62319 - DNA, 657 bp, Unknown
  Obtained from environmental sample
  misc_feature (1)..(657): n is a, c, g, or t
atgaatactatacctacaatttttaacgaaacaatcattccctataccgctgtcggcggtaaagagcgtgttgcgtccacaggaatttcagccgttgttttaaaccgtgccggacagtatcaaaacagaacgtttttttcagagttggaaaaaaccggttttgacaatatcatttccatagaatcctgcgccccccattacgacatcgaagatctttcaggacgtttcccctttgtacgcttcattctgcccgaaaaagaattgaacttaggcgagcagataaaccttgccgcatccgatattacaagtccgcttttttatgttttctggagcgatatgaaaatagtcgcaggcggaacggcaaaacgaatggcggaacgtttaagtattgagcacgaagataaagataattttgaaaacaaaggcggttttaaaagactctgcacagtcccaataatgatgaattcaaaatacgaagtattaccgactgttgtagttccaatgactcagcgcagaaaaatgactcccgcctttctggaaccgcagaacgaagacgaattaagcctgtacccctttgacggagccggtatctatgacagaaagcgttttattaacataggcggattgacaaacgctaagcaattctttggaatctga

SEQ ID NO: 62320 - protein, 218 aa, Unknown
  Obtained from environmental sample
  misc_feature (1)..(218): Xaa is any amino acid
MNTIPTIFNETIIPYTAVGGKERVASTGISAVVLNRAGQYQNRTFFSELEKTGFDNIISIESCAPHYDIEDLSGRFPFVRFILPEKELNLGEQINLAASDITSPLFYVFWSDMKIVAGGTAKRMAERLSIEHEDKDNFENKGGFKRLCTVPIMMNSKYEVLPTVVVPMTQRRKMTPAFLEPQNEDELSLYPFDGAGIYDRKRFINIGGLTNAKQFFGI

SEQ ID NO: 62321 - DNA, 666 bp, Unknown
  Obtained from environmental sample
  misc_feature (1)..(666): n is a, c, g, or t
atgaaatacgcggcggcggcagccaagaacctgggcgtaaaaatcattacaggttttatgggcagtcccatttgggcgtattggtattctttccctcaaactaccgaacagatgattgatgaagcctacaagcagatcctgaagtcctggacgcccatttttgacgaatttgacaaacacggagtcaagtttgcgctggaagttcatcctacggaaatcgcttttgactactataccgccgagcggcttcttaaagaattcaaaagccgtaaaaccctcggctttaattttgatccttcccacttaatttggcagggagtatctccgcagatttttatcagggattttgctcccaagattttacacgttcacatgaaggacgcggcggtaactttggacggcaaggcgggtatactcggctctttcttaacctttggcgacgtcaagcgcggctggaacttccgttcactcggtcacggcgacgtagactttgaagccattatccgcgagcttaacgccattaactacaagggtcccctttcggttgaatgggaagattccggcatgaacagggaatacggcgcgaaagaagcctgtgattttgtaaagaacatcaacttctcgccgtcagacgtccccttcgacggcgcgctaaaagcggaataa

SEQ ID NO: 62322 - protein, 221 aa, Unknown
  Obtained from environmental sample
  DOMAIN (1)...(162): Xylose isomerase-like TIM barrel
  misc_feature (1)..(221): Xaa is any amino acid
MKYAAAAAKNLGVKIITGFMGSPIWAYWYSFPQTTEQMIDEAYKQILKSWTPIFDEFDKHGVKFALEVHPTEIAFDYYTAERLLKEFKSRKTLGFNFDPSHLIWQGVSPQIFIRDFAPKILHVHMKDAAVTLDGKAGILGSFLTFGDVKRGWNFRSLGHGDVDFEAIIRELNAINYKGPLSVEWEDSGMNREYGAKEACDFVKNINFSPSDVPFDGALKAE

SEQ ID NO: 62323 - DNA, 1848 bp, Unknown
  Obtained from environmental sample
  misc_feature (1)..(1848): n is a, c, g, or t
gtgtctgtttgggaaaagaacgccgaagttctgaaaaaccggtatccgggccttcttgaagacattaccggcgaagaaaaaacaactctcgcacccgaagatattcaagtaattcccgcgtcctccggcgatccgtctctttgcgttaaaggcataaatatccattcgaaccgcgatccggcgcgcgagggccttcgtctcgctcagtctgcggcgggcagcggagcggttgtcatacttggtttcggtcttggttacgccgcaacggcggccgcgcaagtcattgaaaaagggcggccaatcataattgcagaaaagcacagaaaacttcttgtcaaagcgctggagacaagggatttaagcgattttctttccaataacagaataatttttgtagtaggcggcacaggagaaggaataacaaacgccctcagtatcgcggacggatttatttccgcgaacgaaaggacggaaccgtctgttatccgcaacagggcgcttatcgatcttgataaagaatggtacggcgttgttgaagaaaagctccgtacatggactatgagggacgatgttaattcagcgactctaaaacgtttcggaaagcgctgggtgcggaatctgtcgcgtaacataagcgcaatccgcgattacgccggcatttcgcgccttgcgggtttggccgccgacggcgctccggttttccttgccgccgccggacccagccttgacaaggcgcgcccatatttacaggaaatacacaaaaggtgcgttacagtcgctgtagacacctctttccgtttctttacagataacggcatcaaacccgattttgtccttgtagttgatccccagttctggaacagccgccaccttgacaggtgcccgtgcgggaacaccgcgctgatagcggaatccgccgtttacccgcccgttctgcgcctgcctttcaaaaatatttttctttgcggctctctttttccccttggctcctttgttgaaaagcgtgttgatcccaaaggcgctcttggggcgggcggttccgtctcaactaccgcgtgggattttgcgcgcgctttaggctcaaaagaaatttggatcgcaggtctggacctcgcctttcccggtcttaaaacacatttccggggcgccgtctttgaaacccgttccaacgccgcctcaaaccgttttaaccccgccgaaacatgggtagtacgcgccctgcgcgacggttacccgttcaaagccccctgcgcccaaggcggccaggtccttaccgaccgccgcttatccctctacgccgcatggtttgaaaaccgtttccgccaatatccggaaacgaaaaattacgccgtctttcaggacggtcttgcgatagcgggaattcaagcggcaacagcggaaacgcttctttccctccccgagcgccgccccgagattgacaaaaaactgcaagcggcattctcacaaacagacaacgattttaacaatccggaagaaaaacaaaaacgcgccgcccgttacgcgaaagccgtctcttcattaatcagcggtcttgaagaagtcaggaacgccgctcaaaaaggcgcgggaatagcgcagcgtgcgttaaagggcaaacccgatgccggaaaacaaaataaaatcctgaaagaactggacgaaatcacgcgccgcatcacggacagcgaagtgaaagaagtggcgggatttttgttccccgccggaaaaacagacagtggagacgaaggtacggcaaaagattcttttcaagcctatcttgaatccgcaaacaaactttttacttcgctggcgcagacggtggagattaatctggaaaacttaaaataa

SEQ ID NO: 62324 - protein, 615 aa, Unknown
  Obtained from environmental sample
  DOMAIN (206)...(371): Protein of unknown function DUF115
  misc_feature (1)..(615): Xaa is any amino acid
MSVWEKNAEVLKNRYPGLLEDITGEEKTTLAPEDIQVIPASSGDPSLCVKGINIHSNRDPAREGLRLAQSAAGSGAVVILGFGLGYAATAAAQVIEKGRPIIIAEKHRKLLVKALETRDLSDFLSNNRIIFVVGGTGEGITNALSIADGFISANERTEPSVIRNRALIDLDKEWYGVVEEKLRTWTMRDDVNSATLKRFGKRWVRNLSRNISAIRDYAGISRLAGLAADGAPVFLAAAGPSLDKARPYLQEIHKRCVTVAVDTSFRFFTDNGIKPDFVLVVDPQFWNSRHLDRCPCGNTALIAESAVYPPVLRLPFKNIFLCGSLFPLGSFVEKRVDPKGALGAGGSVSTTAWDFARALGSKEIWIAGLDLAFPGLKTHFRGAVFETRSNAASNRFNPAETWVVRALRDGYPFKAPCAQGGQVLTDRRLSLYAAWFENRFRQYPETKNYAVFQDGLAIAGIQAATAETLLSLPERRPEIDKKLQAAFSQTDNDFNNPEEKQKRAARYAKAVSSLISGLEEVRNAAQKGAGIAQRALKGKPDAGKQNKILKELDEITRRITDSEVKEVAGFLFPAGKTDSGDEGTAKDSFQAYLESANKLFTSLAQTVEINLENLK

SEQ ID NO: 62325 - DNA, 1191 bp, Unknown
  Obtained from environmental sample
  misc_feature (1)..(1191): n is a, c, g, or t
atgcttctcgcgatggatccgcgaagcggcgacattataggttccgcctcccttccgaattttgatttgaacaacatccgcgcctcggacgagacaagcagaatgaaccgtcccgttatctgggcttacgaacccggctccgtattcaagatttttacccttgcggcgctgatggattctggcgcgataacaaacaactccgtctttacgtgtaacggctattatgttacaaacagcggcagccgtattaattgtctcggcgctcacggcagggtaaccgcgcgggagataattattcactcctgcaacgccggcgccgcttacgcttccgatcaaataaacagcggcggtttttataaattgctgactgattttggtttcggctcccgcaccggcgccggaagccccggcgagacatccggctatcttttggtcagcgaacagtggtcggaccgttcaaagcccactatcgcgatgggtcaggaaatcgcggtttccgcttaccagatgttacaggcggcaagcgcaatcgcgaacgacggcgtgttaatctctcccagaatagtgtcgaatattatttcaccggacggccgcgttacggaatggaaacctattgaaagacgccgtatcttaaaagaggaaaccgcgaaagacatccgctcttacatggtagacaccgcttccggcataggcacaggctggcgcgccgcggttgaggatctgtcgcttgcggtaaaaaccggaacagcgcagataattgatcccgctacccgcagatattccgagaccgattttatcgcaagctgcatagcgttactccccgccgaatcgccctcgcttattttatatcttgcgatcatcaaaccaaggggtgaaattttaggcggcagaatcgcggctccagcaatacgcgaagcggcggaatcgcttattgactatatcggtattccgcgcggacgcaatcctcaagttgcccatccgtctaccgtaaatattcccgcgcgccgccttccggccataggcagtcatttgcctgatttttcaggcatttcaaaaagggtgttgatcccccttctgttacgcgacgatatcaacgtagagcttcgcggcgaaggctgggtgcgccgtcaaagtccgcctgccggaacaccggttacggacggaatgaacataatactggaactggaatag

SEQ ID NO: 62326 - protein, 396 aa, Unknown
  Obtained from environmental sample
  DOMAIN (342)...(396): PASTA domain
  misc_feature (1)..(396): Xaa is any amino acid
MLLAMDPRSGDIIGSASLPNFDLNNIRASDETSRMNRPVIWAYEPGSVFKIFTLAALMDSGAITNNSVFTCNGYYVTNSGSRINCLGAHGRVTAREIIIHSCNAGAAYASDQINSGGFYKLLTDFGFGSRTGAGSPGETSGYLLVSEQWSDRSKPTIAMGQEIAVSAYQMLQAASAIANDGVLISPRIVSNIISPDGRVTEWKPIERRRILKEETAKDIRSYMVDTASGIGTGWRAAVEDLSLAVKTGTAQIIDPATRRYSETDFIASCIALLPAESPSLILYLAIIKPRGEILGGRIAAPAIREAAESLIDYIGIPRGRNPQVAHPSTVNIPARRLPAIGSHLPDFSGISKRVLIPLLLRDDINVELRGEGWVRRQSPPAGTPVTDGMNIILELE

SEQ ID NO: 62327 - DNA, 474 bp, Unknown
  Obtained from environmental sample
  misc_feature (1)..(474): n is a, c, g, or t
atgcttaacgtcgatcttgtgtggatacatgcgtcggcaaccgtactggaatcgacattggcgcattcgctcaatatgcgcggcgtaaagacgttggttgtcgagatgggagttggaatgcgcatcacggagagttactgtacgcagcttgtagacggcatactaaacctgttgcgcgaacttggaatgtggagcggagagaccgcgcggatgcgttcgccgcttgtctcaaaggatcacggcgttggtttcttaaattcggacgctgggggaatatttattccgcgcgccgcgcatggcagtcacgtaaatacgggcgattgcatcggtatcgtcatagacccgcttaccggttccgttgtcgaggaaacgtttgcttcgtgcgacggcttgttatttacattacgggaatatccggttgtcttcggaggatcgcttttgggacggattatggaggactctaaaaatggttaa

SEQ ID NO: 62328 - protein, 157 aa, Unknown
  Obtained from environmental sample
  misc_feature (1)..(157): Xaa is any amino acid
MLNVDLVWIHASATVLESTLAHSLNMRGVKTLVVEMGVGMRITESYCTQLVDGILNLLRELGMWSGETARMRSPLVSKDHGVGFLNSDAGGIFIPRAAHGSHVNTGDCIGIVIDPLTGSVVEETFASCDGLLFTLREYPVVFGGSLLGRIMEDSKNG

SEQ ID NO: 62329 - DNA, 879 bp, Unknown
  Obtained from environmental sample
  misc_feature (1)..(879): n is a, c, g, or t
ttgtcgaggaaacgtttgcttcgtgcgacggcttgttatttacattacgggaatatccggttgtcttcggaggatcgcttttgggacggattatggaggactctaaaaatggttaaggacattatatactcgatcaaatcgccctatcggcagagtatggacattatagggtacactttcggctcaggcgaacgttcttgctgtgtggtgggagcattgcgcggcaacgaaattcaacagatggcgatctgcgcccagttggtagatacgctcaagcgcatggaggaaaacgaatgtgttttactgggcaaaagcataatgatcataccgtgcgcaaaccattactcaatgaatatcggcaaacgtttctggacaatggacaacaccgacatcaaccggatgtttccgggatacgatcaaggcgagacgacacagcgcattgccgacggattgttcaagtcggtcaaggattatgtctacggtatacaaatggcgagtttttaccgtgacggcgaatttttaccgcacgtcaaggtgatggacaccgatttcagaaagccggaaacctacgagtcgctgtcggatttcggattgccctacggactgattagaataccgcaaccatacgacaccgcgactctcaactacaactggcaggtgtggggctgtcaagcttattcgttattctcgacatacaccgagcatatcgggaagcaatccacgcaaaccgccgtgaatgcgatactacgcttccttatcgccaaaggaatactaagatgggcgctgcacggcggaatgcacacacgtatactaaacgaagggttgataagaaacgtccagacaggctacgccggcatattaaaaaatatgtcgcggtag

SEQ ID NO: 62330 - protein, 292 aa, Unknown
  Obtained from environmental sample
  misc_feature (1)..(292): Xaa is any amino acid
MSRKRLLRATACYLHYGNIRLSSEDRFWDGLWRTLKMVKDIIYSIKSPYRQSMDIIGYTFGSGERSCCVVGALRGNEIQQMAICAQLVDTLKRMEENECVLLGKSIMIIPCANHYSMNIGKRFWTMDNTDINRMFPGYDQGETTQRIADGLFKSVKDYVYGIQMASFYRDGEFLPHVKVMDTDFRKPETYESLSDFGLPYGLIRIPQPYDTATLNYNWQVWGCQAYSLFSTYTEHIGKQSTQTAVNAILRFLIAKGILRWALHGGMHTRILNEGLIRNVQTGYAGILKNMSR

SEQ ID NO: 62331 - DNA, 393 bp, Unknown
  Obtained from environmental sample
  misc_feature (1)..(393): n is a, c, g, or t
gtggggctgtcaagcttattcgttattctcgacatacaccgagcatatcgggaagcaatccacgcaaaccgccgtgaatgcgatactacgcttccttatcgccaaaggaatactaagatgggcgctgcacggcggaatgcacacacgtatactaaacgaagggttgataagaaacgtccagacaggctacgccggcatattaaaaaatatgtcgcggtaggcgacgaagtcgccgagggcgatctgctctgtgagataattcatcctttagaggggaatacgataagccggatagagtcgccgatggaagggacgattttctttgcctacaacaagcagcttgtaatggagcataccgacgtgtttaatatcgtgccgttttccaacgtatga

SEQ ID NO: 62332 - protein, 130 aa, Unknown
  Obtained from environmental sample
  misc_feature (1)..(130): Xaa is any amino acid
MGLSSLFVILDIHRAYREAIHANRRECDTTLPYRQRNTKMGAARRNAHTYTKRRVDKKRPDRLRRHIKKYVAVGDEVAEGDLLCEIIHPLEGNTISRIESPMEGTIFFAYNKQLVMEHTDVFNIVPFSNV

SEQ ID NO: 62333 - DNA, 606 bp, Unknown
  Obtained from environmental sample
  misc_feature (1)..(606): n is a, c, g, or t
gtgtccgcacaggatgcgtttatcgagcagcttaccggcacggtggaaattaagcgggcgaaggaaacttcatttacggccgccaaaaaaggggacataatatttcaggataccgtcatatcgacaaaatttaagagttacgccattgttaaaataggcggcacaaccatatcggtgcgcccattaacggttctgtcattgtcggagattcaaaaattggaagaaagcgaaaccataaacgtaaatttacatatgggaagggtccgcgtggacgttaagccgcccgcgggaacaaaggcgattataacggtaagctcgcccacggcgacggcgtctgtccgcggaaccaactttgaatttgatctcaataacctttatgtaaacgaaggcacggtcagctttgccggggctaacgggcagatggttcttgtcggcgagggcggaaacagccgggcggacaggaacggacaggtgtcaaacccgtgggataatagaaaggcggacttgatgccgccaaaccccgtcgggacaggcgccagggaaatgcccgcttcccccgctgttgcagcgaatgcgattttttccattaatgttaaatttaattaa

SEQ ID NO: 62334 - protein, 201 aa, Unknown
  Obtained from environmental sample
  misc_feature (1)..(201): Xaa is any amino acid
MSAQDAFIEQLTGTVEIKRAKETSFTAAKKGDIIFQDTVISTKFKSYAIVKIGGTTISVRPLTVLSLSEIQKLEESETINVNLHMGRVRVDVKPPAGTKAIITVSSPTATASVRGTNFEFDLNNLYVNEGTVSFAGANGQMVLVGEGGNSRADRNGQVSNPWDNRKADLMPPNPVGTGAREMPASPAVAANAIFSINVKFN

SEQ ID NO: 62335 - DNA, 1635 bp, Unknown
  Obtained from environmental sample
  misc_feature (1)..(1635): n is a, c, g, or t
gtgacagtagagcctaaggaagatttccttccgaaacaggaggcgcggtttgccgaaaaactcgccaggacggagcagggcctgagcgaggcggacagactgcttatcattgataaagccgctgctctggaaaaactccagagcgaaggcgacagccccgaggcgcttgcgacaattccccatctttccaggaatgacctttcccccgaaccggaattgattccccgccggcttgaagacctgacgggactccccgcgctgtgccatgacatttataccaacggcataagctacatcgaccttgcttttccccttgatattcttccaccggaagattaccggtggattccgttttttacgcgggctgtaatttccgtaggtctgccgggaatggattacgccgaagtatcgagtctgcttgcccgtaccgtgggcggcttaaacgtcatagcgcacacaggctcagcggcgggcaaaggaagccccattattaaattcccgtcgggagaatttgaccttattggccgtgactggattgtctaccgcctcaaatgcctggacgaaaaaaccgcggcgtcgctggacatggctctgcgccttataaccgaagcggatttttccgatttaaggcgaattcatgaccttgttatggaaatgaaaaacggggcgcgctccagccttgcgcctaacggacatcattacgcgtcttccagagcaaaccgtttcgcgtcggcttccacacggacggatgaaatatggaacggtataacgcagcttttatttgtccacagtcttgccgagatggatacagctgaaataaccgcgaagttaaataatctgcgtgacacaatagcctcaggcggccttattgccaatcttgcaggatcagccgatgccctaaaatccaacggcatcctgatagccgggcgcttcaaaaactttggccctccccaaaaaccagcagcaggcaaaatggcgccggacgccgtttccggacccgaagtatttgcttcgccgtcactgcagattggctttgccgccatgacgctgcaagccgcggaatatgacactccggcgcagattgccgaaacagttttgtctcaccagctttccaccggcgctttgtgggaaaacatccgcatgaagggcggcgcttacggcgcttctgcttccagcaacggtcttgagcgttgcttctccctgtcaacttaccgtgatcccaatccgctacgttcgctggatacattctgttcaatactcaaagacagcgccgcccggaccgatgatttttccaaaggcggcgcgtcgcaaagtgatgcggcatccgccgcggcggatgccctagagaaaatgattatcggctgttattcaagcgaaactcgcccccgcacgccttcggaaaaatcagtcaacgattttctccgtttcctgtcccgcattgacgatggctgccgcaggcgaagactggaaaggctcatcaacatttccggggatgatatttccgccgcccttggggggatcgtgtcacagcttgccgcgcaaaagccgccaagccgggttattattgccggaatgaacagcgcggaacaggcggctaaatcgctgggggcggaagtgcaactgcttccggtgtag

SEQ ID NO: 62336 - protein, 544 aa, Unknown
  Obtained from environmental sample
  DOMAIN (3)...(265): Peptidase M16C associated
  misc_feature (1)..(544): Xaa is any amino acid
MTVEPKEDFLPKQEARFAEKLARTEQGLSEADRLLIIDKAAALEKLQSEGDSPEALATIPHLSRNDLSPEPELIPRRLEDLTGLPALCHDIYTNGISYIDLAFPLDILPPEDYRWIPFFTRAVISVGLPGMDYAEVSSLLARTVGGLNVIAHTGSAAGKGSPIIKFPSGEFDLIGRDWIVYRLKCLDEKTAASLDMALRLITEADFSDLRRIHDLVMEMKNGARSSLAPNGHHYASSRANRFASASTRTDEIWNGITQLLFVHSLAEMDTAEITAKLNNLRDTIASGGLIANLAGSADALKSNGILIAGRFKNFGPPQKPAAGKMAPDAVSGPEVFASPSLQIGFAAMTLQAAEYDTPAQIAETVLSHQLSTGALWENIRMKGGAYGASASSNGLERCFSLSTYRDPNPLRSLDTFCSILKDSAARTDDFSKGGASQSDAASAAADALEKMIIGCYSSETRPRTPSEKSVNDFLRFLSRIDDGCRRRRLERLINISGDDISAALGGIVSQLAAQKPPSRVIIAGMNSAEQAAKSLGAEVQLLPV

SEQ ID NO: 62337 - DNA, 1665 bp, Unknown
  Obtained from environmental sample
  misc_feature (1)..(1665): n is a, c, g, or t
atgcatcagatggccgagctaagcagggaagtaaagtcgatacttccgcccttgcgaaacgcttgtttccacgggtacacgcgcgttccccgtgtgcaggttcagggagagttcgccttgcgcggtgaagtgcttgatatcttcatgggcggcgatgaagacgcgtacagggttctttttgattttgacaagatagagaccataaaaagttttgacccgttaatgcagggtacgggtaacaaaaaattacccgaattaagtatatgccccatgaaagaagttatctggacagacgacagaatcgaggcattgcaaaaaaatctttctgtttgcaaggaattttccgacggcggcaagtccgtggttgaaagccttattacttctaaaaccgtaaaaggcgaggagatgtttttctcccttgcctttgaaaaacaaagctgtcttttggattacatcgggcggaatggttctttattcctgattgacagggaaaggcttgaaaacacccatgagagccttgtacgcgagtaccacggcttgtattcgagggcggtaagggaaaagtacgaatatcccctgccggagcgtctattgcttaattttgaggaaatgctaaaggaacacgcttcttccgtttcccgcatgatttcgtttagatcgattaagggggaggcaaaaaagggagtctgtcacattgaacttgcctgcgaaccggggcgcagttttttcggcaatatcaattacctaaaagaagaatttgcatctctgcttgaaagcggctggcagatagccgtagcggcggaatcgcaggtgcaggcggatcgcataaaaatgctccttgagccgcataagtccttatcaataatggcagtccctctttccgccgggttttgtctgccggatatcaaatttatgctggtgcaggaaaatgaaattttcggcaggcgtaaacttccgccgcgttccttaaaaaccgtacgttccagcccgatagacaccttccttgaaatcaaccccggtgactacattgtccatgtaaaccacggtatcggtctttttaaaggtatcgaaagattatcgtccggcggaaacgaaagggactacataaagattgaatacgcggacgaggagactgtattcgtccccgtagaacagcttaaccttgtacagcggtatatcggaaacgacggattgcaagcgccgcgattagacaaactaggctccaagaattgggaaaacagaaaaggaagggtaaaaaaatccgtagaagacatcgcgcatagactgatagaactgtattcaaaacgaaaacaggcgcaggggttcgcgttccccaaagacagcgaatggcagacaatgtttgaagccgcctttccgtttgacgagacggaggatcaacttcgctgtatacaggaaatcaagcaggacatggaaagctcctcgcccatggacaggcttgtctgcggcgacgtaggttacggcaaaacagaagtcgctctgcgagcctgcttcaaagcgataatgggcggaaagcagaccgccttcctcgcccccacgacaatccttgttgaacagcactatgaaaactttttggaaagattttcccgcttctccgtaaatgtcgcaatgctttcgcgttttgtagacaaaaagaaatgcgcataa

SEQ ID NO: 62338 - protein, 554 aa, Unknown
  Obtained from environmental sample
  DOMAIN (336)...(434): CarD-like/TRCF domain
  misc_feature (1)..(554): Xaa is any amino acid
MHQMAELSREVKSILPPLRNACFHGYTRVPRVQVQGEFALRGEVLDIFMGGDEDAYRVLFDFDKIETIKSFDPLMQGTGNKKLPELSICPMKEVIWTDDRIEALQKNLSVCKEFSDGGKSVVESLITSKTVKGEEMFFSLAFEKQSCLLDYIGRNGSLFLIDRERLENTHESLVREYHGLYSRAVREKYEYPLPERLLLNFEEMLKEHASSVSRMISFRSIKGEAKKGVCHIELACEPGRSFFGNINYLKEEFASLLESGWQIAVAAESQVQADRIKMLLEPHKSLSIMAVPLSAGFCLPDIKFMLVQENEIFGRRKLPPRSLKTVRSSPIDTFLEINPGDYIVHVNHGIGLFKGIERLSSGGNERDYIKIEYADEETVFVPVEQLNLVQRYIGNDGLQAPRLDKLGSKNWENRKGRVKKSVEDIAHRLIELYSKRKQAQGFAFPKDSEWQTMFEAAFPFDETEDQLRCIQEIKQDMESSSPMDRLVCGDVGYGKTEVALRACFKAIMGGKQTAFLAPTTILVEQHYENFLERFSRFSVNVAMLSRFVDKKKCA

SEQ ID NO: 62339 - DNA, 660 bp, Unknown
  Obtained from environmental sample
  misc_feature (1)..(660): n is a, c, g, or t
atgataaaaaaagcggcttctggaaaaccggatattcaggaattaaggcacacaatcctttttttgcagaccgcgaggaaagtccaattttattcactaacgcccactttatctttaagctggaataacaattctgtttttaccaaaaatccgtggaaagattcatggttcggcaaggatagatggaacaattcaggctctcttacaatctccgtaggagtacgcctgcacagccttattcctttcagcgcggattttcaggctataaaaaatcttgatgatcaaataacaacggcaactcttgggttaacgcagatgatccggggaacggaaattgaaatttacaatacggtgctcgcgctggaaaaaacccgtatcagcgcgcaggcgcaggcgaagacggtaagtttggcggaacagtcataccgtcttacggaacaggcgtatcaggcgggtttgcaggattactttcaggttcaaaacgcggaacagtccatgcggcaggcgcgggtacaaatgcttgaacagcagtttaattaccttaacggtctaatcgaccttgaatattcaatcggggttccgttcggaaccctaagttcaaaaaactttagttcagagaactcgaactcaaagagttcgagctcaaaggagaaccaataa

SEQ ID NO: 62340 - protein, 219 aa, Unknown
  Obtained from environmental sample
  DOMAIN (2)...(192): Outer membrane efflux protein
  misc_feature (1)..(219): Xaa is any amino acid
MIKKAASGKPDIQELRHTILFLQTARKVQFYSLTPTLSLSWNNNSVFTKNPWKDSWFGKDRWNNSGSLTISVGVRLHSLIPFSADFQAIKNLDDQITTATLGLTQMIRGTEIEIYNTVLALEKTRISAQAQAKTVSLAEQSYRLTEQAYQAGLQDYFQVQNAEQSMRQARVQMLEQQFNYLNGLIDLEYSIGVPFGTLSSKNFSSENSNSKSSSSKENQ

SEQ ID NO: 62341 - DNA, 960 bp, Unknown
  Obtained from environmental sample
  misc_feature (1)..(960): n is a, c, g, or t
atgaaatctttttactttaaaaacgcgggaacggcaaaattaattatattatttttaattttatccgtattatttaccggatgcgaacgtattaaagcggcgtacggcaaaaaaaagaatattgaaatgacaagagaagtgccggtgttcgccgttaataccacattggcggtaaaaggacaaattcaggattacttaacattttcaggcgatattgtagccggctctacaatcgacgtttatcccgaagctgtgggaaaagtaacggatatttttgtctccgtcggtcaaagggtaagcaggggcactcaaattgcgtctgtcgatccttcccgtcctggcatgacattccgccaaaacatagcgaccgcgccaatcggcggaactatcgtcatgattcccgctcaagtgggaatgactgtgagtcaggcggttcctcttgcgcgtatagccggcggcggtgcgcttgaaattaaattaagtatagcggagcggtttatctccagaatggcgatgaatcaaccttgcgaaattacccttgacgcgtggcccggcgaaatattccgagggagtatcagcgaaatatcgcctactgtcgatatggcgtcgcgaacaatggaaatacgcgtcaatgtcagggacaacagctcaaaattaaaagcgggaatgttcgcgaaggttcgcgttattacagaacgaaaggacaacattgtaaaaattcccgcggcggctgtaattaatcgctttggggaacagtttgtttatgtaatagaaaaagatgatcaagacaacgacattgtaagaaaaagaatcattgcgcccggcattttaattgacaatgtattggagattcaaaaagggttggagccttccgatgaaatagtaatcagagggcagacgctgttagacgacggctcaagagtaaatatcattgaacgtcttgcgccgttaggagaataa

SEQ ID NO: 62342 - protein, 319 aa, Unknown
  Obtained from environmental sample
  misc_feature (1)..(319): Xaa is any amino acid
MKSFYFKNAGTAKLIILFLILSVLFTGCERIKAAYGKKKNIEMTREVPVFAVNTTLAVKGQIQDYLTFSGDIVAGSTIDVYPEAVGKVTDIFVSVGQRVSRGTQIASVDPSRPGMTFRQNIATAPIGGTIVMIPAQVGMTVSQAVPLARIAGGGALEIKLSIAERFISRMAMNQPCEITLDAWPGEIFRGSISEISPTVDMASRTMEIRVNVRDNSSKLKAGMFAKVRVITERKDNIVKIPAAAVINRFGEQFVYVIEKDDQDNDIVRKRIIAPGILIDNVLEIQKGLEPSDEIVIRGQTLLDDGSRVNIIERLAPLGE

SEQ ID NO: 62343 - DNA, 381 bp, Unknown
  Obtained from environmental sample
  misc_feature (1)..(381): n is a, c, g, or t
atgagcatggtaaaaactgtcgtatcacgaccgactacattcttaattatttttgccttgcttatcggacttggtttcttcgcaatggtaaacctgccaatcgatctgtatccggaaataaatcctcccattatggcggtattcactacttatacgggcgcaggacctgaagaagttgaacgctccgtaacacgtcctttggaagcggttctttccagcgcgtccgggcttgaaaaattaacttctatatccagcaaaggttcaagcatagttattttgaattttacctatggaacggatatgtcggacgcggcaaactcaatccgcgacctgcttgagcgtatcagaactatatgcccacaggcgcgcaaacgccgatga

SEQ ID NO: 62344 - protein, 126 aa, Unknown
  Obtained from environmental sample
  misc_feature (1)..(126): Xaa is any amino acid
MSMVKTVVSRPTTFLIIFALLIGLGFFAMVNLPIDLYPEINPPIMAVFTTYTGAGPEEVERSVTRPLEAVLSSASGLEKLTSISSKGSSIVILNFTYGTDMSDAANSIRDLLERIRTICPQARKRR

SEQ ID NO: 62345 - DNA, 879 bp, Unknown
  Obtained from environmental sample
  misc_feature (1)..(879): n is a, c, g, or t
atggatagcagaatacatttttttagtcagaaggatgtgatccccagtaaaatcgaaagcgagaaactggggataagaggtcggcaggccaatgaatttgcggaattgggctttcctattctaccaggtttcattttggatacagacatagcttcggacataaagctcgatgaggtaaaaaaagatgtcgcagttttgctggataagtgcggggctatagtcggcaagaagttcggggatagcgaaaacccaatgcttcttaaagtggtcatatcttcaaacctggcaattaccacgtatccggcgctgcataacttcggtcttgtcaggccgacaatggacggtttcgccaagtgggttggcaaggattttgccgcccacgaagttatctttcttatacggggtatgctcaaaatagaagagcgcatcaaggaacttgaggcaaagtccgccgagatgaaggaaatcggagatcgtctcaatattgtggatcgtatgcttggtattcaggggccttccaacgagttgggcaagaaagaagaacctattccaattaacaagagtgctattgagtacatgaacgagtacgcgaagttctttcccatagggttctttgaaagcgcggagcagcagcttctcattaccttgactgaaatttcgcggatgttccggatggatgatcagaacgacaccgataccgcccttatgattgcccccatggtctacgggaattacggcaaggaatcctgttcaggggattttttcagccgaaacgtggttaccggggataaaaaactccagggtaaattcttccggggaaaattcaacgagatcggcgcggaaggccagagcatagagaatgtcggagacaaatactaa

SEQ ID NO: 62346 - protein, 292 aa, Unknown
  Obtained from environmental sample
  DOMAIN (3)...(289): Pyruvate phosphate dikinase, PEP/pyruvate binding domain
  misc_feature (1)..(292): Xaa is any amino acid
MDSRIHFFSQKDVIPSKIESEKLGIRGRQANEFAELGFPILPGFILDTDIASDIKLDEVKKDVAVLLDKCGAIVGKKFGDSENPMLLKVVISSNLAITTYPALHNFGLVRPTMDGFAKWVGKDFAAHEVIFLIRGMLKIEERIKELEAKSAEMKEIGDRLNIVDRMLGIQGPSNELGKKEEPIPINKSAIEYMNEYAKFFPIGFFESAEQQLLITLTEISRMFRMDDQNDTDTALMIAPMVYGNYGKESCSGDFFSRNVVTGDKKLQGKFFRGKFNEIGAEGQSIENVGDKY

SEQ ID NO: 62347 - DNA, 786 bp, Unknown
  Obtained from environmental sample
  misc_feature (1)..(786): n is a, c, g, or t
gtggaccttgttgccgcttaccatcacccggatttggggcttttaatagcaaacccaaaaattgccgaagagctggcaaactntggtatgcttcgcaaaagagagctgttggttttatatgccggtaaaggcgccagcccggcggatgatacctgccaaaaggcggctgaactggcggttaaattttttgagggcaaaaaagcgaaagccctgccggaatttttaaaaggcagttttgtcgtcaagaaactcaagaagggcgaggaagaagccgcggataaggccgaggcgaaggcggcaaaggtcgtaaaagtgccgacaaaaggcagaaaagccgcacctgcgaaggcggcaaaaagagctgtcagagccgctaccgccgcgccaagggaaagcgtccgcgtagcgccgcctgtggttaccgccgccgcccccgcgatttcaaagggcccgatgaagatgacgccgatgtattcggtggttgtcgccaacgagctctttcataacggaaacgtggaagcatggaagcgcattgtcgcaagttactctgccaaatacccggagctccaagtgtatatttattacgaaggcgagcgtattttggacatcaactccctgtttaagtgggggaaggtgaaacacggaagctcgattcagtttgcggtttccggcaacgaaattaaagacgtggccaaattacagcgttatctgattcagggagccagcaagcaatttgaagcgttcctgcacggcccggtgaacaatgtgctaaagctctttggttag

SEQ ID NO: 62348 - protein, 261 aa, Unknown
  Obtained from environmental sample
  misc_feature (1)..(261): Xaa is any amino acid
MDLVAAYHHPDLGLLIANPKIAEELANXGMLRKRELLVLYAGKGASPADDTCQKAAELAVKFFEGKKAKALPEFLKGSFVVKKLKKGEEEAADKAEAKAAKVVKVPTKGRKAAPAKAAKRAVRAATAAPRESVRVAPPVVTAAAPAISKGPMKMTPMYSVVVANELFHNGNVEAWKRIVASYSAKYPELQVYIYYEGERILDINSLFKWGKVKHGSSIQFAVSGNEIKDVAKLQRYLIQGASKQFEAFLHGPVNNVLKLFG

SEQ ID NO: 62349 - DNA, 1482 bp, Unknown
  Obtained from environmental sample
  misc_feature (1)..(1482): n is a, c, g, or t
ttgatggccgagccttcaagacaatttgctaaagcccaagacagttacggatgtaaaactttcggtaacatcctggattcagaacttatcagccccattttccattatcaggtagctgtggaatacctcataaaagacctgctcagcaaccatcttatttccacaattgaccatgccattgaaaaggttaaggaagacaggatagatcaaggactggaagagcttacagacagcgaaataatcttcaataaaatcgggcaggttcaaaactttaccgatgacgatgttgaaaacccgaagtccaagcgttataccaacgtttccaagatgattttggagaagatagccaatctccgtgccgaaatcgatcctgagacctttgatcagatgaatatgagggaaaatatcaagaagatcgtcgatattgaaaacatccgaaacaggggcttcaataccgccattaactcaatcacatcaattcttgacacctcaaaaatgggctatcagtacatcgaaaacctcaagaatgccagggaagtttacatccgtgaatatgaggataccgatttggcgaatctgcccgatgaaaggtatcagattaagctcaggtattttgacaatgcccagcttgttgaagatcgcaaggcctacgatgttcagttaaagagcatcgagaccgagattcagcatctttgggataccctcgacgtaatttacgaagacggcaagtccggctttaaagtcaccgattttaacgatttggcgaagaagaagaagccgagcatcaagaagaggcttaaggacaagaccggcgagccgatgtacgaagatatcgccaaggtttgggacgaaatttccttcgtcggcgtgggcgaaacggaagttgaacgctccaatagaacctatctcttcgagaaggacaggctccggaaccgcataatcctgatgcggaacaagatgaagcagatgtacgattatctttatccgattgaaaggcgggttatggaaaatcggctttccttcctggagaaggaatacggtcggtttgaatacacgatcaacccctatcatctgcagcctggaattcttttggatgtcgatattacttccataaagagaaagaaagctactcttgacgcaatggccaacgtgcttaacgaattcctgtccggtgtttccaaaggcttctcggacgctgctttcgcgtccttcagccgccgacgctccacagtgcgggaagaccttgctcagtccttctcgtcaggcgaggacgacaaaccggcagccgctgcggctccagacgcgggttccgcttacctggatctgatcaatactgaagctccggccagtgtttccgacgcggcgcctaaagcgattgcggcacctaaacgcggcagaagccccggtaagccagccggagcggcgtcgaagagccgcggacggccgaaggcggacgccggcacaggactgaaggaagtttaa

SEQ ID NO: 62350 - protein, 493 aa, Unknown
  Obtained from environmental sample
  misc_feature (1)..(493): Xaa is any amino acid
MMAEPSRQFAKAQDSYGCKTFGNILDSELISPIFHYQVAVEYLIKDLLSNHLISTIDHAIEKVKEDRIDQGLEELTDSEIIFNKIGQVQNFTDDDVENPKSKRYTNVSKMILEKIANLRAEIDPETFDQMNMRENIKKIVDIENIRNRGFNTAINSITSILDTSKMGYQYIENLKNAREVYIREYEDTDLANLPDERYQIKLRYFDNAQLVEDRKAYDVQLKSIETEIQHLWDTLDVIYEDGKSGFKVTDFNDLAKKKKPSIKKRLKDKTGEPMYEDIAKVWDEISFVGVGETEVERSNRTYLFEKDRLRNRIILMRNKMKQMYDYLYPIERRVMENRLSFLEKEYGRFEYTINPYHLQPGILLDVDITSIKRKKATLDAMANVLNEFLSGVSKGFSDAAFASFSRRRSTVREDLAQSFSSGEDDKPAAAAAPDAGSAYLDLINTEAPASVSDAAPKAIAAPKRGRSPGKPAGAASKSRGRPKADAGTGLKEV

SEQ ID NO: 62351 - DNA, 633 bp, Unknown
  Obtained from environmental sample
  misc_feature (1)..(633): n is a, c, g, or t
atgattttcaagggagtaatcatggaagcgatgaaaaggactgttgattgcggggctttgcgaaagggcgataacggtaggacggtcatacttaacggatgggtgcaccgcaagagaaaccacggcggtattttttttattaatattcgtgaccgttacggcataacgcaggtaacggttgacaccgaaagcaaacaagagcttgccgccgtatgcgacgaactgcgaaatgagtatgtaatagctgttgaagggcaggtgagtcttcgccctgacggaatggttaaccccggtatggagacgggcgaaattgaggttaccgcttccaaactggtaatactgaacaaggcggaagttctgccttttcaaattgacgaggaaagcaaggcaagcgaagaaacgcggcttaaataccgctatcttgatcttcgttccgcggcaatgcagaanacaataaaaatgaggagcgagacaacattcgccgtgcgcgaatggatgacatctaacggtttttatgagatagagacccctacttttataaatcaacgccggagggggcaaaggactaccttgtcccgtcaagactttatcccggcaaattttacccgcctcccccagtcgccccagctttaa

SEQ ID NO: 62352 - protein, 210 aa, Unknown
  Obtained from environmental sample
  DOMAIN (29)...(114): OB-fold nucleic acid binding domain
  misc_feature (1)..(210): Xaa is any amino acid
MIFKGVIMEAMKRTVDCGALRKGDNGRTVILNGWVHRKRNHGGIFFINIRDRYGITQVTVDTESKQELAAVCDELRNEYVIAVEGQVSLRPDGMVNPGMETGEIEVTASKLVILNKAEVLPFQIDEESKASEETRLKYRYLDLRSAAMQXTIKMRSETTFAVREWMTSNGFYEIETPTFINQRRRGQRTTLSRQDFIPANFTRLPQSPQL

SEQ ID NO: 62353 - DNA, 327 bp, Unknown
  Obtained from environmental sample
  misc_feature (1)..(327): n is a, c, g, or t
atgttgacggtcaggaggaaattgccgccgcccgagggagacgggccggttaacgcgatggacggcgcgcttcgcagggcgttgaaacatttttacccggaactgcatgatgttcgtcttaccgattacaaagtcagggtaattgacggcggcgccgcgacagcggcgaaggtgcgcgtacttatcacttcttccgacggaaggcagaactggacaacggttggagtatctgaagacatcattgacgcaagccgcgccgcccttgttgattctatcgagtacaaattaatagatgacattgaacgccgatttaaggcatatctatag

SEQ ID NO: 62354 - protein, 108 aa, Unknown
  Obtained from environmental sample
  DOMAIN (1)...(96): LeuA allosteric (dimerisation) domain
  misc_feature (1)..(108): Xaa is any amino acid
MLTVRRKLPPPEGDGPVNAMDGALRRALKHFYPELHDVRLTDYKVRVIDGGAATAAKVRVLITSSDGRQNWTTVGVSEDIIDASRAALVDSIEYKLIDDIERRFKAYL

SEQ ID NO: 62355 - DNA, 1347 bp, Unknown
  Obtained from environmental sample
  misc_feature (1)..(1347): n is a, c, g, or t
ttgacgcagctggaaatccttgacaccaccctcagggacggcgctcagggcgaagggataactttctccgttcaggacaaactggcggttgtccgcgcgttagacgatctgggcatcccatggatcgaggcgggcaacccgggaagcaatcccaaagatatggaatttttccgtcttgccgaaagcctgaaacttgaaaacgcgaaactctgcgcctttggatcaacaagaaaaaagggcgtcaaagcgggcgaagaccccggggtcttgagccttcttgacgcgaatacgcaggcggtagtgatcttcggcaagagctgggattttcatgtgacggaagtgttacgcgtaacccacggggaaaacctcgcaatgattgcggaaacaataatgtttctgaaagaaaaggggcggcgggttttttacgacgcggaacatttttttgacggctggaaggcgaaccccgaatacgcccttgctaccctcaggaccgcgatggaagcgggagcggagcgcataatactgtgcgacacaaacggcggaacctttcccgaaacgatagagaaagccgttacagaagccgcgaagatagtatgcgttaacggcgcgtcgtttaacgacgcgaacgcatctctcggcattcacgcgcacaacgacgcggacatggcaagcgcgaacgcgataactgccgtccttgccggatgccgccatgttcagggaacccttgtcggcttcggcgagcgctgcggcaacacaagcctcgcggcggttataccaagccttgaactcaaacttggtttccgctgcctgccggagggaaaaatggaaaaactctccgagataacccggattgtcgcggagacggccaatgtcgcggtgcccggcaatatgccctatgtgggaagccacgcgtttacccacaaggcgggaatgcacgcggacggaattttaaaggcaagtaaatcttttgaacatatcgacccttcccttgtggggaacgaccggcattttttaatgagcgaggtaggcggacgctcggcgatagcggaaagggcgaaaaagattgagccttccataacaagagatcatcctgtaacaatcgccatcgcgcaaaaactaaaaactcttgagtcggagggctggcagtttgagggcgcggacggcagtttcgatcttatggttcgccgcgagcttggccgctacaagccgctgtttaaaatcgaggcttaccgtgtagtaagcgaacatcccacgggcgagacaatagcctgttcccacgcgtgggtcaaagtgcatgttgacggtcaggaggaaattgccgccgcccgagggagacgggccggttaa

SEQ ID NO: 62356 - protein, 448 aa, Unknown
  Obtained from environmental sample
  DOMAIN (12)...(291): HMGL-like
  misc_feature (1)..(448): Xaa is any amino acid
MTQLEILDTTLRDGAQGEGITFSVQDKLAVVRALDDLGIPWIEAGNPGSNPKDMEFFRLAESLKLENAKLCAFGSTRKKGVKAGEDPGVLSLLDANTQAVVIFGKSWDFHVTEVLRVTHGENLAMIAETIMFLKEKGRRVFYDAEHFFDGWKANPEYALATLRTAMEAGAERIILCDTNGGTFPETIEKAVTEAAKIVCVNGASFNDANASLGIHAHNDADMASANAITAVLAGCRHVQGTLVGFGERCGNTSLAAVIPSLELKLGFRCLPEGKMEKLSEITRIVAETANVAVPGNMPYVGSHAFTHKAGMHADGILKASKSFEHIDPSLVGNDRHFLMSEVGGRSAIAERAKKIEPSITRDHPVTIAIAQKLKTLESEGWQFEGADGSFDLMVRRELGRYKPLFKIEAYRVVSEHPTGETIACSHAWVKVHVDGQEEIAAARGRRAG

SEQ ID NO: 62357 - DNA, 330 bp, Unknown
  Obtained from environmental sample
  misc_feature (1)..(330): n is a, c, g, or t
ttgngaagtatgcacgagatgaagctcatcatcgatcttgtaaaccggggcgggcttgcctttatgcgttattcgatctccgacaccgctgaatacggcgattacattaccggaccgaagatcatcaccgaggaaacaaagaacacaatgcggcaggtattaaaggatattcaaaacggcagtttcgcgcggaactggatacttgaaaaccaggtgaaccgtcctttctttaaccgcatgagggcgattgaggcggaacacccaatcgagaaaaccggaaacgagcttcgcgccatgatgtcatggttaaaaaagaacgaggaaaaataa

SEQ ID NO: 62358 - protein, 109 aa, Unknown
  Obtained from environmental sample
  DOMAIN (1)...(104): Acetohydroxy acid isomeroreductase, catalytic domain
  misc_feature (1)..(109): Xaa is any amino acid
MXSMHEMKLIIDLVNRGGLAFMRYSISDTAEYGDYITGPKIITEETKNTMRQVLKDIQNGSFARNWILENQVNRPFFNRMRAIEAEHPIEKTGNELRAMMSWLKKNEEK

SEQ ID NO: 62359 - DNA, 555 bp, Unknown
  Obtained from environmental sample
  misc_feature (1)..(555): n is a, c, g, or t
atggcgcacatgtattacgaaaaagactgcgacttggggatgcttaaaagcaaaaccatcgcggtaattggttatggttcacagggacacgcccacgccctgaacgcaaaggaatcgggcttaaaagtgattgtcggtctttatgaaggctcaaaatcatggaaaaaagcggaagaggcgggctttcaggtaatgacggcgaaagacgcggcgcaggcggcggattttatcatgatcctgattaacgatgaaaaacaggcggctctttacagagaatcaatcgcccctgcgctgaaaaaaggaaaaacactctccttcgcgcacgggttcaacattcactttggacagatagtcccgccgcccgatgtcaatgttgtgatgatagctcccaagggaccgggacacacagtacgcgagcagtacaaattaggcgcgggagtaccctgccttatcgccgttcatcaggacgcaagcggagacgctaaaaaattggctatggcttacgctatgggaataggcggcgcaagagcgggaatattggaaacaactttttaa

SEQ ID NO: 62360 - protein, 184 aa, Unknown
  Obtained from environmental sample
  DOMAIN (14)...(178): Acetohydroxy acid isomeroreductase, catalytic domain
  misc_feature (1)..(184): Xaa is any amino acid
MAHMYYEKDCDLGMLKSKTIAVIGYGSQGHAHALNAKESGLKVIVGLYEGSKSWKKAEEAGFQVMTAKDAAQAADFIMILINDEKQAALYRESIAPALKKGKTLSFAHGFNIHFGQIVPPPDVNVVMIAPKGPGHTVREQYKLGAGVPCLIAVHQDASGDAKKLAMAYAMGIGGARAGILETTF

SEQ ID NO: 62361 - DNA, 687 bp, Unknown
  Obtained from environmental sample
  misc_feature (1)..(687): n is a, c, g, or t
gtgaagcgggaagaggcgagggcgatcgctcaggctccggcggccgcagcgccgaccgcgcctcctcccgtagcggcgcaaccgtccgcccaaacaccggccgcgcctcaagcgccggcaccgcccaaagctccgccgacagaatccgaagaagatgcaaggttacgtatgcgccttatatcgaacttcctcaaagacaacaagacgaaggacgaggagataaagaacgcaatggccgccggcgacatcaaactggcgcaccgcttggcgcacaccctcaaaggcgtggccggcctggtcgcgcaacccggtttgcagagcgcctcatacgtgatagaaaacgccctgaacgcaggcgacaccgacaccgcctcaaaaggccttggaaagctctccgatgaactcaaaaaggcgttggcggaactgaccgcaatttccgaagccgcgcaaccgaagcaagaggcggtcaacacggaaccggccgtaaaactggacaaattcgaggccttggaactgatagacaaactccgtaccctattagaaaacggcgattcagactgcatgaacctgatagacggcctgcgctcaataccggaatcaaagaaactaatagaacaagtggaagattacgatttcgaaccggcattagagacactggacatgataagaaagagtttggcggggtga

SEQ ID NO: 62362 - protein, 228 aa, Unknown
  Obtained from environmental sample
  SIGNAL (1)...(26)
  DOMAIN (58)...(141): Hpt domain
  misc_feature (1)..(228): Xaa is any amino acid
MKREEARAIAQAPAAAAPTAPPPVAAQPSAQTPAAPQAPAPPKAPPTESEEDARLRMRLISNFLKDNKTKDEEIKNAMAAGDIKLAHRLAHTLKGVAGLVAQPGLQSASYVIENALNAGDTDTASKGLGKLSDELKKALAELTAISEAAQPKQEAVNTEPAVKLDKFEALELIDKLRTLLENGDSDCMNLIDGLRSIPESKKLIEQVEDYDFEPALETLDMIRKSLAG

SEQ ID NO: 62363 - DNA, 792 bp, Unknown
  Obtained from environmental sample
  misc_feature (1)..(792): n is a, c, g, or t
gtgcgtctgcgccagatcatcctgaacctgctcacaaacgccgtgaagttcaccaactacggcatggtgaaagtgatgggggcggccgtaaaccaaaccgacgagaacgtgaccatccacttcgaggtgaaggactccggcatcgggatgaacgacgagcaactggccaaggtcttcgaacccttcactcaggccgacaacagcacaacgcgcaaatacggcggcacggggctgggcctcaccatcacgaagaacttcgtggagttgatgggcggcgacctaaaggtggagagcgtaatagggatagggagcaagtttcactttgacgtgaccttccccacctgcgacgagagcacgaagacggagtctttcggcgacgggacgggcggcggcgcggcggacatggagaagccctacttcaacaacgccgagatattggtttgcgaggacaacgagatgaaccagatagtgatcaccgaccacctcgcgcgcgtgggcataaaggcggtgatcgccgagaacggcaaggtgggcgtggaagccgtcgccgcgaaaatggcaaagagcgagaaaccttttgacctgatttttatggatatacaaatgccggtcatggacggcctagaggcggttaagaagctggccgagatgggcaacaagacacccatagtggcccttacggcgaacatcatgaccaccgaccgcgaggcttacaaggcgcacggcatgaacgagtacctctccaacctttcgcgacgcaagacctttggaattgcctgctcaactacataa

SEQ ID NO: 62364 - protein, 263 aa, Unknown
  Obtained from environmental sample
  DOMAIN (143)...(261): Response regulator receiver domain
  misc_feature (1)..(263): Xaa is any amino acid
MRLRQIILNLLTNAVKFTNYGMVKVMGAAVNQTDENVTIHFEVKDSGIGMNDEQLAKVFEPFTQADNSTTRKYGGTGLGLTITKNFVELMGGDLKVESVIGIGSKFHFDVTFPTCDESTKTESFGDGTGGGAADMEKPYFNNAEILVCEDNEMNQIVITDHLARVGIKAVIAENGKVGVEAVAAKMAKSEKPFDLIFMDIQMPVMDGLEAVKKLAEMGNKTPIVALTANIMTTDREAYKAHGMNEYLSNLSRRKTFGIACSTT

SEQ ID NO: 62365 - DNA, 1692 bp, Unknown
  Obtained from environmental sample
  misc_feature (1)..(1692): n is a, c, g, or t
atggcggcatggcaatcgtttttcgacatgttattgagagcgggtcttactatgtcgataaaacactggtttattaaagaccttattgataaagacgccgctgttaccctttgcacccgtccgcgccgatttgggaagacgctgaatcaaacgatgctcaaatgtttctttgaagatacggcgcaaatcgacggcaaggatacccggacgctgtttagtggattgaaaattgaggaggccggagagaggtatatggaacatcaggggcagtatccggtgatattcctgagtttcaaggaggcaaaacaagaaagttttgatcgaacatataatcacctgaaagactgtattgttgaagaatttgagcggcacgcatatgttgttgaaaaaatatccggtgaccgtaacttagaacggtttaaacggttatcctccggcaccggttctatagatgattattcgtgttcactcaaatttttaagtgaatgcttgaaaaactaccacggtaaaaaggttattgttttaattgacgaatacgacgtaccactggaaaattcttggtctcgttccccccgtttctatgctgagatggttaatttcatccgtccgctccttagtagcgccctcaaagacaacccgcacctgcgatttgcggtgatgacgggatgcttgcgcatatccaaagaaagcatttttaccggacttaacaatctgcaagtaatctctatattggataaatattactccgaatatttcggctttacacaggcagagatggatactatgttgaaatactacggactttccgaaaagaggcagatcgttagggattggtacaacggctaccttttcgggaatacggaggtgtataacccgtggagttccgtctttgtggcggatagttggcttgcggacataaatgaacaacctaaaccctactggtcaaacacaagcggtaacgatattgtccgcacgttggtagacatcgccaacgtcgaaatgaaggccgatttggaaaccttaatggccggcaaaacgatctcaaaaccgattcacgaggacatcacgtatgaagagatagatgaggataaaaataaagacccagacaacttctggaactttttatttttcaccggctacctgaaaaaagtcggagaggggcgccaaaacgaacacggcgaatcaatattggatttgtcgattcccaacctcgaattaaagtacatctaccacaccaaaatacaagactggtttaaggagaaggtcagccggaaagattttaacccgctatataaggcacttttgggcggcgacgcggagacggtacagattgaactcggcaacttcctcgtggaaaccataagctatatggacactaaagaggctttttatcacggagtattgctcggcgtactctccgggatgagcgaatttagcgcgaaatccaaccgggagaccggtcttggccggggcgatattattttgcggcatacaagcggtcgcggcaaggccgtcatactcgagcttaaatgtacgcaagatatgcaagaaatcgtaaaattgagcgaagaggccgtgaaacagattgcagacggcaagtatgccaaagaactggaaacggagtgttacaccgatattatcaagtacgggatcgcgttttgtaagaaaagctgtgaagtaaggaaaggatga

SEQ ID NO: 62366 - protein, 563 aa, Unknown
  Obtained from environmental sample
  DOMAIN (1)...(563): Protein of unknown function (DUF1703)
  misc_feature (1)..(563): Xaa is any amino acid
MAAWQSFFDMLLRAGLTMSIKHWFIKDLIDKDAAVTLCTRPRRFGKTLNQTMLKCFFEDTAQIDGKDTRTLFSGLKIEEAGERYMEHQGQYPVIFLSFKEAKQESFDRTYNHLKDCIVEEFERHAYVVEKISGDRNLERFKRLSSGTGSIDDYSCSLKFLSECLKNYHGKKVIVLIDEYDVPLENSWSRSPRFYAEMVNFIRPLLSSALKDNPHLRFAVMTGCLRISKESIFTGLNNLQVISILDKYYSEYFGFTQAEMDTMLKYYGLSEKRQIVRDWYNGYLFGNTEVYNPWSSVFVADSWLADINEQPKPYWSNTSGNDIVRTLVDIANVEMKADLETLMAGKTISKPIHEDITYEEIDEDKNKDPDNFWNFLFFTGYLKKVGEGRQNEHGESILDLSIPNLELKYIYHTKIQDWFKEKVSRKDFNPLYKALLGGDAETVQIELGNFLVETISYMDTKEAFYHGVLLGVLSGMSEFSAKSNRETGLGRGDIILRHTSGRGKAVILELKCTQDMQEIVKLSEEAVKQIADGKYAKELETECYTDIIKYGIAFCKKSCEVRKG

SEQ ID NO: 62367 - DNA, 867 bp, Unknown
  Obtained from environmental sample
  misc_feature (1)..(867): n is a, c, g, or t
ttgctcattgctcattccccggtacccggtacccactccccactccccactccctactcccctctccctactcccttagttctcctccctgtcttcccgggtaccaactgcgaatgggacatggaaagggctttccgtgaagcgggcgcgaggacaagaatcgttattttcaggaaccggaacaaggaagatataacggagtcaaaacaagagctggcgcgggcaatcgccgaatgtcagatacttgcgctgtccggcggattcagcgccggggacgagcccgacggcagcggcaaattcatcgccaatgtactgcgcgccccgattatcgccgacgccgttaacaatttactggaaaaccgggacggactcatactgggaatttgcaacggcttccaggccttgatcaaactggggctggttccttacggcgcttaccgcagagcggaggaatcaatgcccacccttacctttaaccgcgtcggccgccatgtttcgcgcatggtaaacacgctggtaatgccaaattgttccccctggctcgcgctggacaaacccggcgcggttcacgcgctgccggtaagccacggcgaaggccgcctcgttatcagcgaggcggaaggagaaacgttgttcaaaaatgggcagattcccttctgttacgccgatgaaaacggccggccaaccatgctggagccggacaatcccaacggatctgattttgccattgagggcctatgcagtcccgatggcaggatactcggcaagatggcgcattcagaacgccggggcgaatacgttcatatcaatatacccggcgataaacaacaaaatatttttaaagccggagttaggtatttcagctag

SEQ ID NO: 62368 - protein, 288 aa, Unknown
  Obtained from environmental sample
  misc_feature (1)..(288): Xaa is any amino acid
MLIAHSPVPGTHSPLPTPYSPLPTPLVLLPVFPGTNCEWDMERAFREAGARTRIVIFRNRNKEDITESKQELARAIAECQILALSGGFSAGDEPDGSGKFIANVLRAPIIADAVNNLLENRDGLILGICNGFQALIKLGLVPYGAYRRAEESMPTLTFNRVGRHVSRMVNTLVMPNCSPWLALDKPGAVHALPVSHGEGRLVISEAEGETLFKNGQIPFCYADENGRPTMLEPDNPNGSDFAIEGLCSPDGRILGKMAHSERRGEYVHINIPGDKQQNIFKAGVRYFS

SEQ ID NO: 62369 - DNA, 573 bp, Unknown
  Obtained from environmental sample
  misc_feature (1)..(573): n is a, c, g, or t
ttgatcgccgagggcacagcacagaggtgcatcatcaaccagcgcgaagtgaatcaggacacgaagagcttcgcggccgcccttagggtggcgctgaggcaagacccggacgtggtgctcatcggcgaaatgcgcgaccttgagactattcaagccgccctgagcatcgccgaaacagggcacttgacgctggccaccctgcacacgaactcggcggcgcaaacgatcaaccgtattatagacgtcttccccgccgacatgaaggagacggtgcgtgcgcagctctccatggtgctggagggcataataagccaagcgctcctgccccgcgtaggcggcggccgcgtgatggcctgcgagatcatggtggccacaatggccgtccgctcaatgatccgcgaagacaaagtgcaccaactccaaggcatcatagaaatcggccagcagtacggaatgcaaaccatgaacagccaattggccatgctgtacaacagacgcctgatcaccaaaaaggacgccttcggaagaagccccgacccggacagtttgaagaagttgataggggaaccgtga

SEQ ID NO: 62370 - protein, 190 aa, Unknown
  Obtained from environmental sample
  misc_feature (1)..(190): Xaa is any amino acid
MIAEGTAQRCIINQREVNQDTKSFAAALRVALRQDPDVVLIGEMRDLETIQAALSIAETGHLTLATLHTNSAAQTINRIIDVFPADMKETVRAQLSMVLEGIISQALLPRVGGGRVMACEIMVATMAVRSMIREDKVHQLQGIIEIGQQYGMQTMNSQLAMLYNRRLITKKDAFGRSPDPDSLKKLIGEP

SEQ ID NO: 62371 - DNA, 360 bp, Unknown
  Obtained from environmental sample
  misc_feature (1)..(360): n is a, c, g, or t
ttggtgatcaggcgtctgttgtacagcatggccaattggctgttcatggtttgcattccgtactgctggccgatttctatgatgccttggagttggtgcactttgtcttcgcggatcattgagcggacggccattgtggccaccatgatctcgcaggccatcacgcggccgccgcctacgcggggcaggagcgcttggcttattatgccctccagcaccatggagagctgcgcacgcaccgtctccttcatgtcggcggggaagacgtctataatacggttgatcgtttgcgccgccgagttcgtgtgcagggtggccagcgtcaagtgccctgtttcggcgatgctcagggcggcttga

SEQ ID NO: 62372 - protein, 119 aa, Unknown
  Obtained from environmental sample
  misc_feature (1)..(119): Xaa is any amino acid
MVIRRLLYSMANWLFMVCIPYCWPISMMPWSWCTLSSRIIERTAIVATMISQAITRPPPTRGRSAWLIMPSSTMESCARTVSFMSAGKTSIIRLIVCAAEFVCRVASVKCPVSAMLRAA

SEQ ID NO: 62373 - DNA, 1026 bp, Unknown
  Obtained from environmental sample
  misc_feature (1)..(1026): n is a, c, g, or t
ttgcaggacatttcgcgtttcacgcgccagttttccgcgatggtgagcgccgggctaccgctcgtccaatgcctcgacgttttgggggcgcagaccgagagccaagagcttggggccgccataaggcaggtcagcgccgacatacagggcggcaacaacttggccgagtctatggcgaagttcccaaaagcgttcaactccctatactgcaacatggtcgcggcgggcgagcagtccggtaacttggacggcgtgctgacccgtttggccgagtaccaggagaaggcggacgcgttgcgccgcaagataaagggcgccatgacctaccccgccgtcgtcgcggttgtggctgcgggcgccacggtcgccatgctagcgttcgtcatacccaccttcgcgcagatgttcctagacatgggcggatctctgccggcccccacaaaggtggttatggcgctctccgacctcctgctcgcgtattggtgggcgatgatcattgtgattgtagtctccatcacggctttcttgcagtactacaaaacgcctaacggacggatcaatatagataaaatcaagctcaagctaccggtcttcggcgaccttgagcgcaagagttcggtaagccggttcgcccagaccctctccaccctgctatcgagcggcgtttcgatcatagaggcgctcaccatcacagcaaagaccgcgggcaacaagatactggagatgggcataatgcgcacggtggacaagatccagggcggtctatcaatatccgagccgcttcaggagaccggcgtatttccgccgatggtcatccacatgatttccgtgggtgaaaagacgggcgacctctcaggcatgctgaaaaaagtctccgagttctatcaggaggaggtggacgcggccgtagaggcgctgacttcggtgatagagccgataatgatagtcatactagcggtgatcataggcggtatgcttatagcaatgtacctgccgatgttcgacatggtcggtatggtgggttaa

SEQ ID NO: 62374 - protein, 341 aa, Unknown
  Obtained from environmental sample
  DOMAIN (210)...(332): Bacterial type II secretion system protein F domain
  misc_feature (1)..(341): Xaa is any amino acid
MQDISRFTRQFSAMVSAGLPLVQCLDVLGAQTESQELGAAIRQVSADIQGGNNLAESMAKFPKAFNSLYCNMVAAGEQSGNLDGVLTRLAEYQEKADALRRKIKGAMTYPAVVAVVAAGATVAMLAFVIPTFAQMFLDMGGSLPAPTKVVMALSDLLLAYWWAMIIVIVVSITAFLQYYKTPNGRINIDKIKLKLPVFGDLERKSSVSRFAQTLSTLLSSGVSIIEALTITAKTAGNKILEMGIMRTVDKIQGGLSISEPLQETGVFPPMVIHMISVGEKTGDLSGMLKKVSEFYQEEVDAAVEALTSVIEPIMIVILAVIIGGMLIAMYLPMFDMVGMVG

SEQ ID NO: 62375 - DNA, 891 bp, Unknown
  Obtained from environmental sample
  misc_feature (1)..(891): n is a, c, g, or t
atgtctccatccgaatccgtcataaacctgctgacaaacgccctcgtcgaggacttgggcgaggacggggatatcaccacagcggctattttcgacgtttatgataccggggaggcgctgatccgttgcaagcagaagggcgtgctctccggcataacgctcgtggcgccgctttttgagcttgtcgacaaatacctgtcgtcgcatatatcgtcggcctccgcggcgccggccacaaccgtcgaaacgtattgcaacgacggcgatcctgttgaactaggcaaggcggtctgccgcataaagggcgcggtcaggtcgattcttgccggcgagcgcactatcctcaacctgatccagcgtctctcgggcatcgcgacgctcacgtcggtaatggcgcaagaactttcaagcagcggcgggactacgcggttgcttgacacgcgcaaaactattcccggtatgcgcgctcttgaaaaagccgccgtgcggcacggcgggggggtcaaccaccgcgccgggctttacgacatgatactgatcaaggacactcacgtaagacgcgccggcggcataacggcggcgctcaccaaagcgctcgagtggcgcggcggcaacgctatcccgcagatcgaggtagaggtgcaatcgatagaagagttcgtccaagccctgcggctgaagccggataggataatgctcgataacatgagcccaaaggagatagagatctgcgtggacgaacgcgacgcctccggtctcaagattgagcttgaagccagcggaaacataacgctgggcattatctccgcaatcgccgcgacaaacgtggactacatatcctgcggggcgatcacccacagcgcgcctgcgctgactctcggccgattctga

SEQ ID NO: 62376 - protein, 296 aa, Unknown
  Obtained from environmental sample
  DOMAIN (20)...(122): Quinolinate phosphoribosyl transferase, N-terminal domain
  misc_feature (1)..(296): Xaa is any amino acid
MSPSESVINLLTNALVEDLGEDGDITTAAIFDVYDTGEALIRCKQKGVLSGITLVAPLFELVDKYLSSHISSASAAPATTVETYCNDGDPVELGKAVCRIKGAVRSILAGERTILNLIQRLSGIATLTSVMAQELSSSGGTTRLLDTRKTIPGMRALEKAAVRHGGGVNHRAGLYDMILIKDTHVRRAGGITAALTKALEWRGGNAIPQIEVEVQSIEEFVQALRLKPDRIMLDNMSPKEIEICVDERDASGLKIELEASGNITLGIISAIAATNVDYISCGAITHSAPALTLGRF

SEQ ID NO: 62377 - DNA, 1251 bp, Unknown
  Obtained from environmental sample
  misc_feature (1)..(1251): n is a, c, g, or t
atggaaacaacggattcaactagccaattttataaagacataattggcgtacatgccccatgggtgattacagctgtaacaatggacgatgcatccaggaaagtaacaatacggatagagcatgatcctgagaaaatactggcctgcccaatatgcgcacaaagcaccaagctgcatgaccatcgggtacgggtgttaaggtatttagacacctgtcagtacgagacttttcttgaagtgcatgtgccgagaatacggtgcgaaaaagacggagtgcagcaaatacagattccgtttgcggaaaaacattcccggtttaccggccggtttgaaatggctgtcctggtatggcttcaaagcagccccatatctgacgtggcggaaaacttcgacatgagctgggacgaagtggacgggatattgcagcgggctgtcaagcgggggcttgcccggaggaagcggcagaaagtagtcaacatggggatcgacgagacgtcatatcaaaaggggcacaaatatgtgaccataatccaggacaaagaccgggattgcgtgatagacgtgcttgacgaccggaaggcggaaactgtcgaaaaatggcttaaaacgcaggaaaaaagcgatttaagcgaggtaaacagcatatccatggatatgtgggacgcgtatataaaagcggtaaaagcggcgattccgggagcgaaggagaagatagcgtttgaccggtttcatgtgagcaagcatataaacgaagcgttggacaaagtgaggaggcgggaacacggtgcttttatgaaacaggccggggaaagcccgctcagcaagagccggtttcagtggctgataaattcgaaccgtacggacaaccgaagcgggaaacggaaagcgtttttgagtttgtcgcggcttaatctggaaacggcgagggcatggaggataaaggagactgccaacagcctgtgggattatgtttacatgaatgtggcggaggccgcatggaagaaattgctttggtggataagccacagccgcataccggaaatgatacaggcaggaaaaacgatacggaattatttctggggcatactaaatgctatacgcttaaatgcaacaaacggaatggtcgaagcaaagaacaattccattcagcggattaaacgaatggcttgtgggtttagaaatccggaaaggttcaaaaacgcaatccttttccacttgggcaaattggacatttttccttccaccatttag

SEQ ID NO: 62378 - protein, 416 aa, Unknown
  Obtained from environmental sample
  DOMAIN (159)...(260): Transposase
  misc_feature (1)..(416): Xaa is any amino acid
METTDSTSQFYKDIIGVHAPWVITAVTMDDASRKVTIRIEHDPEKILACPICAQSTKLHDHRVRVLRYLDTCQYETFLEVHVPRIRCEKDGVQQIQIPFAEKHSRFTGRFEMAVLVWLQSSPISDVAENFDMSWDEVDGILQRAVKRGLARRKRQKVVNMGIDETSYQKGHKYVTIIQDKDRDCVIDVLDDRKAETVEKWLKTQEKSDLSEVNSISMDMWDAYIKAVKAAIPGAKEKIAFDRFHVSKHINEALDKVRRREHGAFMKQAGESPLSKSRFQWLINSNRTDNRSGKRKAFLSLSRLNLETARAWRIKETANSLWDYVYMNVAEAAWKKLLWWISHSRIPEMIQAGKTIRNYFWGILNAIRLNATNGMVEAKNNSIQRIKRMACGFRNPERFKNAILFHLGKLDIFPSTI

SEQ ID NO: 62379 - DNA, 324 bp, Unknown
  Obtained from environmental sample
  misc_feature (1)..(324): n is a, c, g, or t
ttgaatccgttgtttccatcccttaaatctatcatttttccctgtttcccactatattcccagaagagccaaaattattttctaaaagaaattcccaaaggatgcacggcaataatggacaatgcaaggttccactcaaaggagcggctgcgcaagctagcgagaggaaaggtgagattattgttcctgccgccgtattcaccagactacaaccctatagaaaaatcatgggcaaatatgaaacgctatctccgcgataatatgcataattataaatttgttgattctgcaatttatgactattttggctattcagttatttaa

SEQ ID NO: 62380 - protein, 107 aa, Unknown
  Obtained from environmental sample
  misc_feature (1)..(107): Xaa is any amino acid
MNPLFPSLKSIIFPCFPLYSQKSQNYFLKEIPKGCTAIMDNARFHSKERLRKLARGKVRLLFLPPYSPDYNPIEKSWANMKRYLRDNMHNYKFVDSAIYDYFGYSVI

SEQ ID NO: 62381 - DNA, 594 bp, Unknown
  Obtained from environmental sample
  misc_feature (1)..(594): n is a, c, g, or t
gtggtatttatcaaccttaaagctctgacaggcggcccaaacggaaggtcgtttaccacaagcattgtactgaatggccaactggcctttatattcacaacggcaacgctggtcgtcattcttgcgctgttgcaaaattttctccgttcaacctatggccgcgctattaaggcgtgcagggaagacgagattgcggctaacgcaaacgggattaacattttccgctacaagatgatcggttttgtcattgccgcttttatcgccggcataggcggttgtgtctatgtgctggttgtcggctttgtcaggccggatatagcgcagttcctcagatccatcgacttccttatttatgtcgtgctgggcggcatgggttccatgaccggttcgattcttgcggcttatgtccttacctatttgcaggaatttctgcgtttcctgcaagattaccgccttttgatatatccgataatactgatatttgtcatgctgttccgtccaaagggccttatgggaatgaaagaattttccattgtgggttttgttgataaaatttccggcaaattcctcaagcgggcgaagggagaagcatag

SEQ ID NO: 62382 - protein, 197 aa, Unknown
  Obtained from environmental sample
  DOMAIN (2)...(163): Branched-chain amino acid transport system / permease component
  misc_feature (1)..(197): Xaa is any amino acid
MVFINLKALTGGPNGRSFTTSIVLNGQLAFIFTTATLVVILALLQNFLRSTYGRAIKACREDEIAANANGINIFRYKMIGFVIAAFIAGIGGCVYVLVVGFVRPDIAQFLRSIDFLIYVVLGGMGSMTGSILAAYVLTYLQEFLRFLQDYRLLIYPIILIFVMLFRPKGLMGMKEFSIVGFVDKISGKFLKRAKGEA

SEQ ID NO: 62383 - DNA, 552 bp, Unknown
  Obtained from environmental sample
  misc_feature (1)..(552): n is a, c, g, or t
atgaaccggattggccttgcgcggacttttcagaacatacgcctgttttccaatctttctgtcgaggacaatatccgcatagcgttacattccggcaggaccagcggccccctggacgcgctgttccgcctgaagcctttcagggttgacgaggaacggatgcacgcccaggcgggtgaattgctttcccttttcaagattgaaaaaaagaaagatgaactggcccgcaatcttccttatggcgagcagcgcagactggagattgcccgcgccctggcttctaacccctgcctcctcttgctggatgagcccgccgccggaatgaacccccaggaaaccgaagatttgatgaagacgataaaatttatcagaaatgaatttcacctgacgattcttttgatcgaacacgatatgcacctggtaatggggatatgcgaacggctcattgtgctggattacgggcggacaatcgcttcaggctcgccggaagaaatccggcagaacccggcggtgataaaagcttaccttgggacggatgctgtcaatggctga

SEQ ID NO: 62384 - protein, 183 aa, Unknown
  Obtained from environmental sample
  DOMAIN (1)...(154): ABC transporter
  misc_feature (1)..(183): Xaa is any amino acid
MNRIGLARTFQNIRLFSNLSVEDNIRIALHSGRTSGPLDALFRLKPFRVDEERMHAQAGELLSLFKIEKKKDELARNLPYGEQRRLEIARALASNPCLLLLDEPAAGMNPQETEDLMKTIKFIRNEFHLTILLIEHDMHLVMGICERLIVLDYGRTIASGSPEEIRQNPAVIKAYLGTDAVNG

SEQ ID NO: 62385 - DNA, 750 bp, Unknown
  Obtained from environmental sample
  misc_feature (1)..(750): n is a, c, g, or t
ttgggacggatgctgtcaatggctgagacactgttgaaagttgaaaacctcgttgtcaattacggggccatacgcgccctgaagggcgtctccttcgaagtcgccaaaggggaaataatcaccttgattggcgcgaatggcgcaggtaaaagcacaacgcttaacgcgatctccaacgttataaagaaagcttccggtactgtgatctttgacggcagggatataagttcagccccgcctgacagcatcgtcgcttccggcctggtacaggttccggaaggtcgtcgcattttcgcgaacttgagtgttcgggacaatttggaaatgggcgcgtattcgcggcgctctgttactgcgacagaaaaacaggccatacgtaaagacatggaaagggtgtttgagatttttcccaggcttaaagaacgtatgcgtcaggtaggggggacgctttcaggcggcgaacagcagatgctcgcaatgggtcgctcgcttatggccagcccccgtctcctgcttcttgatgagccgtcaatgggccttgcccccatccttgttgacgagattttctcggtcatcaagggaattaacgaaacagggacaacggtgctgcttgttgagcaaaacgcttacaaagcccttgatctcgcgtcgcgggcatatatccttgaaacaggggaaattgttaaaaacggtttaaccgccgaattaatgaaagatgaagctgtaaaggctgcctatttaggaggatga

SEQ ID NO: 62386 - protein, 249 aa, Unknown
  Obtained from environmental sample
  DOMAIN (37)...(225): ABC transporter
  misc_feature (1)..(249): Xaa is any amino acid
MGRMLSMAETLLKVENLVVNYGAIRALKGVSFEVAKGEIITLIGANGAGKSTTLNAISNVIKKASGTVIFDGRDISSAPPDSIVASGLVQVPEGRRIFANLSVRDNLEMGAYSRRSVTATEKQAIRKDMERVFEIFPRLKERMRQVGGTLSGGEQQMLAMGRSLMASPRLLLLDEPSMGLAPILVDEIFSVIKGINETGTTVLLVEQNAYKALDLASRAYILETGEIVKNGLTAELMKDEAVKAAYLGG

SEQ ID NO: 62387 - DNA, 327 bp, Unknown
  Obtained from environmental sample
  misc_feature (1)..(327): n is a, c, g, or t
atgtctttacgtatggcctgtttttctgtcgcagtaacagagcgccgcgaatacgcgcccatttccaaattgtcccgaacactcaagttcgcgaaaatgcgacgaccttccggaacctgtaccaggccggaagcgacgatgctgtcaggcggggctgaacttatatccctgccgtcaaagatcacagtaccggaagctttctttataacgttggagatcgcgttaagcgttgtgcttttacctgcgccattcgcgccaatcaaggtgattatttcccctttggcgacttcgaaggagacgcccttcagggcgcgtatggccccgtaa

SEQ ID NO: 62388 - protein, 108 aa, Unknown
  Obtained from environmental sample
  misc_feature (1)..(108): Xaa is any amino acid
MSLRMACFSVAVTERREYAPISKLSRTLKFAKMRRPSGTCTRPEATMLSGGAELISLPSKITVPEAFFITLEIALSVVLLPAPFAPIKVIISPLATSKETPFRARMAP

SEQ ID NO: 62389 - DNA, 645 bp, Unknown
  Obtained from environmental sample
  misc_feature (1)..(645): n is a, c, g, or t
atgcaagtatccaaaatcatgaccaggaatccggtttttatacatccagagctctcgctgaccgatgcccgctcgctcatggacaaggaaagaatcggccacctgcctgtgctcaataaaaacaacgagcttgtgggtcttatcacaagggcggatctgataaaagcagggccgtcgtccgcgaccagccttgatatgtacgagatcagctacctgctttcaaaactcaaggtagaaaaggtgatggaaaaaaatgtgatcatcgttcaggaaaatgaagttgtggaagaggcggcgaggatcatggcggatcagggtattggctgcctgcctgtgatgaacggctctcttttgaccggcattattaccgacactgatattttccattttttcattgacgcttatggggcgcgccacaagggcatacgaataacggttaatttcaaggaaaagcccggccagttcgcggcgtttgcaggcgcggtagcggaaaagggaggtaacatcgttgcttctgtttcttcagaaggcgatgatgtggctcaccgccgcgcgaccttcaagataacgggtatcagccgcgccgcggtagaagaagccgccaaaaaattagacggcggggaaattgaggacatccgggaataa

SEQ ID NO: 62390 - protein, 214 aa, Unknown
  Obtained from environmental sample
  DOMAIN (142)...(214): ACT domain
  misc_feature (1)..(214): Xaa is any amino acid
MQVSKIMTRNPVFIHPELSLTDARSLMDKERIGHLPVLNKNNELVGLITRADLIKAGPSSATSLDMYEISYLLSKLKVEKVMEKNVIIVQENEVVEEAARIMADQGIGCLPVMNGSLLTGIITDTDIFHFFIDAYGARHKGIRITVNFKEKPGQFAAFAGAVAEKGGNIVASVSSEGDDVAHRRATFKITGISRAAVEEAAKKLDGGEIEDIRE

SEQ ID NO: 62391 - DNA, 648 bp, Unknown
  Obtained from environmental sample
  misc_feature (1)..(648): n is a, c, g, or t
atgctctacataagtttcaccgggcctcgtttcgatcctgaagcggtaaaggccatgctggatcagcgcaggtcaagcatggcctttcaggaaaatgatcccaacgcggttttccagcgggaaattatccgtaccataaatgggaatccccggcttcatccgcttgaaaaagaggatttgcaaaaagtaaataacgaccaggcccttgcctttatcaaaagatgcttaaaccccggcgattataccttcgtcattaccggaagcgtggatattccccttctccgttcccttacagaaacatatctggcttcaattccggcttccgctccttttgacgcgtgggccgatattgacactggacggccatctgatacggtcaaggagataaaaaaagggaaagaagcaagaagcacggtttacctgagctggttcaaccctctgccttataccgaggagaaaagcgccgcagtatccgtgttgaacgaataccttgatattgtgcttaacgatgaaantagggagactctgggaggggtttactcagtctcgtcctgggtttctatttcccctcttccaggggagagctctcaggcggtgcgtattttatctgcgatccgaaaagggttgaagaactcgtccctgcggtaa

SEQ ID NO: 62392 - protein, 215 aa, Unknown
  Obtained from environmental sample
  DOMAIN (62)...(214): Peptidase M16 inactive domain
  misc_feature (1)..(215): Xaa is any amino acid
MLYISFTGPRFDPEAVKAMLDQRRSSMAFQENDPNAVFQREIIRTINGNPRLHPLEKEDLQKVNNDQALAFIKRCLNPGDYTFVITGSVDIPLLRSLTETYLASIPASAPFDAWADIDTGRPSDTVKEIKKGKEARSTVYLSWFNPLPYTEEKSAAVSVLNEYLDIVLNDEXRETLGGVYSVSSWVSISPLPGESSQAVRILSAIRKGLKNSSLR

SEQ ID NO: 62393 - DNA, 888 bp, Unknown
  Obtained from environmental sample
  misc_feature (1)..(888): n is a, c, g, or t
atgttatttggcaaaaccgttaaggtaccggcggtggaaaaccccgtttatgtcggggacagacccgcggaagagatggatttatcgattattacttacgacgccgcgtcggctgaatatatcaaattatcaagtgttgatgaaataacaaaatatcaaaccggttcaaaaaaattatgggtaaatatcagcggattaaaaaacatcggttctataaaagcgctgggaaagttatacgacattcaccccttaaccatagaagatattttgaatacagagcagcacccgaaagttgaaatatttgaaaattaccgctttttatcgataaagacaatacagcatgaaaaagaatttcatcacgagcttgctaaaagaagaaagcgatttttctttttccaaaaagaagaagaagaaatgctgcaggaatttgtaattgatcaagtcagcgtaatcatcatgaaaaacactttgattacttttcaggaaatagaaggcgattcatttgacgcgataagggagaagatcttaacaggcgcgggagaaatccgcacaatggaaatggattacctgtcgtacgaaattatcgacgcggttgtcgatgaatatttcctcgcgttaaaccatctggaagacgatgtcgaggattttgaggaccgcgcgacaaaaacaagcgatgatatgtttcttcaggaactgcaggacaccaagagatatcttttgaaaataaaaagggctatttcccccttaaaagaaaatgttaccataattttaaaaacaaaacaaatttttcctgacagacgagttaaaaccatttacgcaaaatttgctggaaaattacataacgccgagaatttagtagagcattaccgcgatggctgtcgaacataa

SEQ ID NO: 62394 - protein, 295 aa, Unknown
  Obtained from environmental sample
  DOMAIN (55)...(292): CorA-like Mg2+ transporter protein
  misc_feature (1)..(295): Xaa is any amino acid
MLFGKTVKVPAVENPVYVGDRPAEEMDLSIITYDAASAEYIKLSSVDEITKYQTGSKKLWVNISGLKNIGSIKALGKLYDIHPLTIEDILNTEQHPKVEIFENYRFLSIKTIQHEKEFHHELAKRRKRFFFFQKEEEEMLQEFVIDQVSVIIMKNTLITFQEIEGDSFDAIREKILTGAGEIRTMEMDYLSYEIIDAVVDEYFLALNHLEDDVEDFEDRATKTSDDMFLQELQDTKRYLLKIKRAISPLKENVTIILKTKQIFPDRRVKTIYAKFAGKLHNAENLVEHYRDGCRT

SEQ ID NO: 62395 - DNA, 780 bp, Unknown
  Obtained from environmental sample
  misc_feature (1)..(780): n is a, c, g, or t
atggccgccgccgagatggatgccaatgaagccgaatatccaagggaagaggcggatggcggcggctctccttcggcaaattttcccgaagcggaacgcaagctgattaagcgcgcaaacgtgagcatcagggtggaaaatcttgccgctgccgatgacgctgtaactgcaatgatgaaaaagtacgacgcttacgcggcatcctcgaatgttgaggaaaactcgcgctattattcactgcgcgtcccggcaaattattacgacatctttctcgccgaaaccggcggcatgggaaggcttataaaccgctacgaaaacacagaagacgtaactttgcgttactacgatcttgaagggcggctcgcgacaaaaaaagaactgttaaaaacttttcaggcttatcttggaaaggcaaaaaccattgaggaaattctttctgtggaagcccgcatatcggatcttcaatacgatattgagggaacgggtatacagttccgtaatcttgccaacaagatagactacgccacagttgatcttagtttgttcggccccgtaagctccgttccgtaccgcggcttaactttaggcgagcgcgttaaacagcttctcggcggcttcggcggatttttgtctacggtcgcgatggtgttaatcggcattgtcgtttacgggattccgattcttttccttttggggatgcttatcatgctcttcttcggcagagtcgggcttgcaaggaaactttgggggctgattaattcaaaacggggtgatacttaa

SEQ ID NO: 62396 - protein, 259 aa, Unknown
  Obtained from environmental sample
  misc_feature (1)..(259): Xaa is any amino acid
MAAAEMDANEAEYPREEADGGGSPSANFPEAERKLIKRANVSIRVENLAAADDAVTAMMKKYDAYAASSNVEENSRYYSLRVPANYYDIFLAETGGMGRLINRYENTEDVTLRYYDLEGRLATKKELLKTFQAYLGKAKTIEEILSVEARISDLQYDIEGTGIQFRNLANKIDYATVDLSLFGPVSSVPYRGLTLGERVKQLLGGFGGFLSTVAMVLIGIVVYGIPILFLLGMLIMLFFGRVGLARKLWGLINSKRGDT

SEQ ID NO: 62397 - DNA, 402 bp, Unknown
  Obtained from environmental sample
  misc_feature (1)..(402): n is a, c, g, or t
gtgagtcagacggagcaggggacgccgcagggcgggaatctgtcgccgttgttaagcaacatatacctgacgaagtttgacaagatgctagaggcacggggacataagtttgtgaggtatgcggacgactgtaatatctatgtcaaaagcgcaagagccgcggaacgggtgatggaagggtgcataaaatatcttgaagggaaactgaaattgaaggtgaaccgaaagaaaagcgccactggaagccctgggaagctgaagtttctgggatttagtttgtaccaatggaaagggaaaatcgggatacgagtacacgaaaagccgcttaaacggttcaaagaacgattgaaagaactgacgagccggaagcggggcggaacgataggggcagatattggctga

SEQ ID NO: 62398 - protein, 133 aa, Unknown
  Obtained from environmental sample
  misc_feature (1)..(133): Xaa is any amino acid
MSQTEQGTPQGGNLSPLLSNIYLTKFDKMLEARGHKFVRYADDCNIYVKSARAAERVMEGCIKYLEGKLKLKVNRKKSATGSPGKLKFLGFSLYQWKGKIGIRVHEKPLKRFKERLKELTSRKRGGTIGADIG

SEQ ID NO: 62399 - DNA, 363 bp, Unknown
  Obtained from environmental sample
  misc_feature (1)..(363): n is a, c, g, or t
ttggctgaaataacccaattaatgaatgggtggctaggatattatcgtgtggcagacatgaagaactatctgcaaaggataagtgaatggctgaggcggcggatacggcaactgtattggaaacggtggaaacgagtgaaaccgcggtatgagaacctgataacattgggcgtagcccgggacaaagcatggcaatgggcgaacatccggaaaggctgctggtgtacagccgggagctggatactgacgacaacaatggacaaccgttattttgaaacgcttggatttccgaacatactcaagcggtatgaggaactgcgagagcgagccaagcggttagagattttgcatggaacctgttga

SEQ ID NO: 62400 - protein, 120 aa, Unknown
  Obtained from environmental sample
  misc_feature (1)..(120): Xaa is any amino acid
MAEITQLMNGWLGYYRVADMKNYLQRISEWLRRRIRQLYWKRWKRVKPRYENLITLGVARDKAWQWANIRKGCWCTAGSWILTTTMDNRYFETLGFPNILKRYEELRERAKRLEILHGTC

SEQ ID NO: 62401 - DNA, 594 bp, Unknown
  Obtained from environmental sample
  misc_feature (1)..(594): n is a, c, g, or t
gtgaattatctttcttttgaaaaagtttttaaaaaattcggaatagtctctgtttcgcaggttaaggctaccaagttggtttttgacaaaaataattttgggcggtgggaaaagcagggcttgctcattaagcttaggaatggctattacgcttttgcggatatagcgagcaacgaaggctttgctcattatgcggcaggcaaaatatacaaaccatcttatataagtttacgcacggcacttgcttttcatggaattatcccagaagctacagacgagattacatctgtatcttctttgaaaacttcaacttttgaaaatagcttgggcactttttcttataaaaaaataaaaccgagtttaatgttcggctacaatgctgtggaaaaaaacggcttcacattttttattgcaagcccggaaaaagctattttggatttactgtatcttgaaccatcttataactttaaaaaagaactgcgaaatttacacttggattgggataaactaaccacttttgccaagatgtttgagaagcaaattattttagaaaaaattgaactgctgaaaaaaaaatttttggaggatatatga

SEQ ID NO: 62402 - protein, 197 aa, Unknown
  Obtained from environmental sample
  misc_feature (1)..(197): Xaa is any amino acid
MNYLSFEKVFKKFGIVSVSQVKATKLVFDKNNFGRWEKQGLLIKLRNGYYAFADIASNEGFAHYAAGKIYKPSYISLRTALAFHGIIPEATDEITSVSSLKTSTFENSLGTFSYKKIKPSLMFGYNAVEKNGFTFFIASPEKAILDLLYLEPSYNFKKELRNLHLDWDKLTTFAKMFEKQIILEKIELLKKKFLEDI

SEQ ID NO: 62403 - DNA, 1392 bp, Unknown
  Obtained from environmental sample
  misc_feature (1)..(1392): n is a, c, g, or t
ttgctgctatttctaaaaagtcattattttttatatatagtgtatcgtaaaccggaggatactatgtctgttcaagaattcaaaaaaggtctcgtatgtttcctttttcttttcatttcaatgctttttgttttagcgagctgctccacgaattcatcggagtcggatgctgtgagttcaagcgctggcaatactggcaatagcttgtcaagtagctctggcaatgccccggtaattccaagctccgatagccgcccttcaagcagttacgaagttgtaactccaggcaattacagcagttccatagttgcaaactcaagcgattctggtgaggaaggttcaagcagttccgtgggcgatccaatgtacgttacgctgaagtgcgagggtcttcaagcaacggttgaaagaggcggcactatcactccaccaactttaacttgcagcgatggcagcacagcaactaatgaaacttggtctggtcgtccgcaaaacaacgccggatgggtggtgagccaaaaccctacttctactggttatcccataagtgttagtgctacttgcggcgatgtttcgggtttaacagccgattgcggtacggtagcggttggcacaggtactcctacatcaagcagttccgttgcaggaggaagttcaagcagccgtgctaattcaagcagttccgttgcaggaggaagttcaagtagccgtgctaattcaagcagttccgttgcaacaaccgtaagttcaagtagccaagcagcgtctggtcctattaccacacgttcttggactaatgtcaattacgtgccgtccaccgccactgggaaaaagcacgaccgccaaagattagatcttacattgccgagttcggggaacggacctttcccgttgatattgtatgtccacggcgggggatttaccggcggggagtggaagttatctactaaccaaagaaacgggcttctttcagccgctacaggcaagggttatgccattgccagcgccggatacctcttgtacggtaacaatccccaaaatccgtctttcccgtatatggtggaggatattttggcggctatacgccatttaagagccaacgcagaaacataccatcttgacccaaataagttcgtcatatcgggttactcggcgggaggctacttgtctaatatagtttgcgccctttctggcaacacgacccacaattatgatataacctcgctcggcaacgctggtgtttccagtgatgttcaggcggcggcaagttcggcgggggcttacggatttctccaagttggtagaacaatctggaagtacaatgcacaattctatggctggcggaccattggggggcagcttaacagacaatacgcaatccatgaaagataa

SEQ ID NO: 62404 - protein, 463 aa, Unknown
  Obtained from environmental sample
  misc_feature (1)..(463): Xaa is any amino acid
MLLFLKSHYFLYIVYRKPEDTMSVQEFKKGLVCFLFLFISMLFVLASCSTNSSESDAVSSSAGNTGNSLSSSSGNAPVIPSSDSRPSSSYEVVTPGNYSSSIVANSSDSGEEGSSSSVGDPMYVTLKCEGLQATVERGGTITPPTLTCSDGSTATNETWSGRPQNNAGWVVSQNPTSTGYPISVSATCGDVSGLTADCGTVAVGTGTPTSSSSVAGGSSSSRANSSSSVAGGSSSSRANSSSSVATTVSSSSQAASGPITTRSWTNVNYVPSTATGKKHDRQRLDLTLPSSGNGPFPLILYVHGGGFTGGEWKLSTNQRNGLLSAATGKGYAIASAGYLLYGNNPQNPSFPYMVEDILAAIRHLRANAETYHLDPNKFVISGYSAGGYLSNIVCALSGNTTHNYDITSLGNAGVSSDVQAAASSAGAYGFLQVGRTIWKYNAQFYGWRTIGGQLNRQYAIHER

SEQ ID NO: 62405 - DNA, 315 bp, Unknown
  Obtained from environmental sample
  misc_feature (1)..(315): n is a, c, g, or t
atgaaaggcatgaaatttgacctcgctaaactcgcacaaattgcagtcatttggcttgcctttgtgttcaccattgcggcagttgcaattgcaatcagcgccctcaccggaccgccatcacccccatttgggcatctgctatcatttgcgcaggggcacccacaacctccgccaccgccgcatttgcagggtcaggggcacccgcctccgccaccgcatttgcgtgggcaagggcatgtgccgccacatttgcgcgaggggcaccagccgccgccgcattgcggcagggcaagggcatggctcggccgattctga

SEQ ID NO: 62406 - protein, 104 aa, Unknown
  Obtained from environmental sample
  misc_feature (1)..(104): Xaa is any amino acid
MKGMKFDLAKLAQIAVIWLAFVFTIAAVAIAISALTGPPSPPFGHLLSFAQGHPQPPPPPHLQGQGHPPPPPHLRGQGHVPPHLREGHQPPPHCGRARAWLGRF

SEQ ID NO: 62407 - DNA, 888 bp, Unknown
  Obtained from environmental sample
  misc_feature (1)..(888): n is a, c, g, or t
ttgaatactcttcgtattaacggaaatctgtacaataaaatcataataagtaaggatttgatcgctgatgttctgccgccgcctgggtacatcatcgaatcatatctggatgttttgcaagcggtagatgaaaccgaccctgataagattgattattttttcaaggaacttaagcggcttgaaactgattacaatgaacgtcatcggtattgggtaaatgaacctctgctggaacagggggcattaagagatgccatgataacaggggcttatgatccggcgatccaattttttaatattatcttcaaccagtttatacccgccctgcaaaaaggcgatagtgaatatgcaaaaaaacttgcgtatggcgatttgaaatccctgtatacaacacatcgtaaaagcgtggatcaggttgttctgggagctacagaaaagcacgaaaaatccgaagacttggccgccataacaattcaacgtgatacaaagacgctttttaccattgcctttgccgttattgccgttgcggtaattctaagcatggcaatacgattttcaattgtaaaaccaatcgtcaatgtggctaatatccttaaaattgtagcagagggcgatctgacgcaaagcatcaatgttgatacaaaagacgaaataggcgctcttgcccatgactttaacttttctatgggaaaaattaaaagccttatagcgacaataaaatacaaaatcagcggtcttgaacataccagttatgaactttccgttaacatggataatacttctgcagccgtgcagcaaattacatcgaatcttgacagcatgagaaacctcatgattaaacaggaaaacggcgcgggaagaagccggcagggcggtaggggatattaa

SEQ ID NO: 62408 - protein, 295 aa, Unknown
  Obtained from environmental sample
  DOMAIN (165)...(234): HAMP domain
  misc_feature (1)..(295): Xaa is any amino acid
MNTLRINGNLYNKIIISKDLIADVLPPPGYIIESYLDVLQAVDETDPDKIDYFFKELKRLETDYNERHRYWVNEPLLEQGALRDAMITGAYDPAIQFFNIIFNQFIPALQKGDSEYAKKLAYGDLKSLYTTHRKSVDQVVLGATEKHEKSEDLAAITIQRDTKTLFTIAFAVIAVAVILSMAIRFSIVKPIVNVANILKIVAEGDLTQSINVDTKDEIGALAHDFNFSMGKIKSLIATIKYKISGLEHTSYELSVNMDNTSAAVQQITSNLDSMRNLMIKQENGAGRSRQGGRGY

SEQ ID NO: 62409 - DNA, 1161 bp, Unknown
  Obtained from environmental sample
  misc_feature (1)..(1161): n is a, c, g, or t
atgtcatcttcagctattgaggaaatgacagctaacattaattcggtaactcagacgcttgcggaaaacagcaagaacgtcggtgttttggttgaagcgtcagaaaacggcaaaacaggactccagacagtcgcgcaggaaatacgggaaattgctcatgattccgaaggcctgctggaaataaactcggtgatgaacagtattgcaagtcaaacaaattttctttcgatgaatgcggcaattgaagcggctcatgccggagaggttggcaagggttttgcggtggttgccgatgaaatacgcaaattagccgagtcgtcgagtaagcagtcaaaaaccaccgccgtaatgctgaaaaaaataaaaacgtccatagacaacattacaaaatcatctaacgatgtgcttaatcgttttggggcaatagactcaagcgtaaaaacagtttcagaacatgagcaaaatatactgaattcaatggaagaacaggaaacaggcggaaaacaaatactggaatccataagccgtctgagggacataacccactcggttaaaaaagggtctgatgacatggcaagttcaggtgaaacattggtcaaggaaacagacgaatttataaaaaccagtcaggaagtagcggaaggcatgaacgatatattgacaggcatcaaccagataaaagtttcggtaaaccatgtaaacgaaatgagtctggagaataatcgtaatttcgacgctttaaaacaggaaacagagaaatttaaggacaccgtaggcaacgagcggaaaaaaatccttatcgttgatgatgacgacattcatcttgaaatgatagaaaccgcgctgtcagacgaatacgaggtgtcaacagccaaatccggcaaagaagccctgggcttgttctatcagggccttgtccccaacttaattttactggacttgataatgcccgatatggacggctggaacacctacaccagaataaaagccataggcggcctgtacaacaccccgatagcctttttcacgtcttcggacgaccccaaagacaaacaacacgcccgcgaaatgggggcggttgattacatcaaaaaaccttatgaaagaaacgacctcttattcagggtgggaagaatcatgaaacagggggcggcggcatga

SEQ ID NO: 62410 - protein, 386 aa, Unknown
  Obtained from environmental sample
  DOMAIN (4)...(215): Methyl-accepting chemotaxis protein (MCP) signaling domain
  misc_feature (1)..(386): Xaa is any amino acid
MSSSAIEEMTANINSVTQTLAENSKNVGVLVEASENGKTGLQTVAQEIREIAHDSEGLLEINSVMNSIASQTNFLSMNAAIEAAHAGEVGKGFAVVADEIRKLAESSSKQSKTTAVMLKKIKTSIDNITKSSNDVLNRFGAIDSSVKTVSEHEQNILNSMEEQETGGKQILESISRLRDITHSVKKGSDDMASSGETLVKETDEFIKTSQEVAEGMNDILTGINQIKVSVNHVNEMSLENNRNFDALKQETEKFKDTVGNERKKILIVDDDDIHLEMIETALSDEYEVSTAKSGKEALGLFYQGLVPNLILLDLIMPDMDGWNTYTRIKAIGGLYNTPIAFFTSSDDPKDKQHAREMGAVDYIKKPYERNDLLFRVGRIMKQGAAA

SEQ ID NO: 62411 - DNA, 312 bp, Unknown
  Obtained from environmental sample
  misc_feature (1)..(312): n is a, c, g, or t
atgggaaagaaaggtacagaacggcgtgtttacacgaaggagttcaaggctgaagctgtagcattggccgagaaaaaggaaaaaccagtaagccgtatcgcggttgatctgggaatcaacgagaatatgctgcgccgatggatgcaggcttctcgggagtcggcgggaagcggcctgcaagcgttcccaggccacggacggccaaaggatgcggagcttgcccgcttgcggaaggagaacaaagcactcagggaggcaaatgaaatcctaaaaaaagcggcggtcatcttcgcacaaggagaaccccagtaa

SEQ ID NO: 62412 - protein, 103 aa, Unknown; identical to SEQ ID NO: 31036
  Obtained from environmental sample
  DOMAIN (8)...(90): Transposase
  misc_feature (1)..(103): Xaa is any amino acid

SEQ ID NO: 62413 - DNA, 630 bp, Unknown
  Obtained from environmental sample
  misc_feature (1)..(630): n is a, c, g, or t
gtggcctgggaacgcttgcaggccgcttcccgccgactcccgagaagcctgcatccatcggcgcagcatattctcgttgattcccagatcaaccgcgatacggcttactggtttttcctttttctcggccaatgctacagcttcagccttgaactccttcgtgtaaacacgccgttctgtacctttctttcccatcttttcctctccttcagttttattccacgcttatctttgtgtccaccagatggggtaaggtccaagcatttggagttgaagctgcgggaagaagcgagcggaattcttaactggcttctggaaggcacggcgaaatggaagcgggaaggcttaaaggctccgaaagcggtattgctggctaccgatgagtaccggggggaaatggacgttatcggcaatttcttaaaggaacggtgcgtccagcagaaggagctttctataaggattagggaactatacaaagcttatactgactggtgcgacgagaacaacgaacacgctgtaagcgagcggtttctttccatgcggcttaaagaaatggggtttgaacagaccaggacggcagaggcgaggtattgggtggggattggattaaaaataacagataacaaataa

SEQ ID NO: 62414 - protein, 209 aa, Unknown
  Obtained from environmental sample
  misc_feature (1)..(209): Xaa is any amino acid
MAWERLQAASRRLPRSLHPSAQHILVDSQINRDTAYWFFLFLGQCYSFSLELLRVNTPFCTFLSHLFLSFSFIPRLSLCPPDGVRSKHLELKLREEASGILNWLLEGTAKWKREGLKAPKAVLLATDEYRGEMDVIGNFLKERCVQQKELSIRIRELYKAYTDWCDENNEHAVSERFLSMRLKEMGFEQTRTAEARYWVGIGLKITDNK

SEQ ID NO: 62415 - DNA, 303 bp, Unknown
  Obtained from environmental sample
  misc_feature (1)..(303): n is a, c, g, or t
atgataaataaacatataaaactggatcatgttgggaaaattctctttgaggaatttatggaaccgcacaaattgtctcagaatgcccttgcaaaagctataggtgtggttcccagccgtattacagatatagtaaatgggcgtagaggaattactgttgatactgccttgcgattaactcgtctttttggtctttcggaagggtattttttacgtttgcaggaacatattgaaactactttgataaaacaaaaaattaatgcggaacttaagaagattgttcctataaagaagattgcttag

SEQ ID NO: 62416 - protein, 100 aa, Unknown
  Obtained from environmental sample
  DOMAIN (16)...(70): Helix-turn-helix
  misc_feature (1)..(100): Xaa is any amino acid
MINKHIKLDHVGKILFEEFMEPHKLSQNALAKAIGVVPSRITDIVNGRRGITVDTALRLTRLFGLSEGYFLRLQEHIETTLIKQKINAELKKIVPIKKIA

SEQ ID NO: 62417 - DNA, 924 bp, Unknown
  Obtained from environmental sample
  misc_feature (1)..(924): n is a, c, g, or t
atgatcactaaaatcgccggggtgcggcacgattcggaagccgactgcccgatgtggaaacagttcatccgggagattatgggctacaagcccgagctgattgactatctccaggttgcggcgggctgggcgataagcggggacaccagcgagcagtccatgttcatcctctacgggacgggggcgaacgggaaaagcacgttcctcaacgtcatccagcgcatcctgggggattacgccatcgcgacctacgccgaaacgttcatgaagcgtaacaacgacacggcgaccaacgacatcgcacggctgcgcgggacgcgctttgttaccacgcctgaaaccgagcaggggaaacggctttcggaacacctgatcaagcaggtgacgggcaacgattccatgaccgcgcggttcctttacggggagtatttcaacttcgtgccgacgttcaagattttcatggcaagcaaccacaagcctgtaatcagggggacggatcacggcatctggcggcggataaagctgataccttttacgactacaattcctgaagaaaagatggacaggtatttggagcagaagcttttggaagagaagccgggcatactgaactggctggttgagggggcgctccgctggcagaaggaaaggctgaggacgcccgcgataatcgccaacgcgactgacgagtaccggggcgagatggacgtaatcgggaacttcatcagggaacggtgcgtccagacgcctgagctgtcgatacgggcaagggagctgttccgcgtctatcaggaatggtgcggggagaacaacgagcttgctaccagcgagcggatgttcgggcttcgcatgaaggagctgggcatggcgcagaagcgggctgccgatgggcggtactggctggggttggggcttcaggggtaa

SEQ ID NO: 62418 - protein, 307 aa, Unknown
  Obtained from environmental sample
  DOMAIN (1)...(290): Poxvirus D5 protein-like
  misc_feature (1)..(307): Xaa is any amino acid
MITKIAGVRHDSEADCPMWKQFIREIMGYKPELIDYLQVAAGWAISGDTSEQSMFILYGTGANGKSTFLNVIQRILGDYAIATYAETFMKRNNDTATNDIARLRGTRFVTTPETEQGKRLSEHLIKQVTGNDSMTARFLYGEYFNFVPTFKIFMASNHKPVIRGTDHGIWRRIKLIPFTTTIPEEKMDRYLEQKLLEEKPGILNWLVEGALRWQKERLRTPAIIANATDEYRGEMDVIGNFIRERCVQTPELSIRARELFRVYQEWCGENNELATSERMFGLRMKELGMAQKRAADGRYWLGLGLQG

SEQ ID NO: 62419 - DNA, 750 bp, Unknown
  Obtained from environmental sample
  misc_feature (1)..(750): n is a, c, g, or t
atgatagattggccgagcggcacgagggtttcctatcttggcggccgcacattccgcccgcgtccgctggacaaggtgattgaagaactttccggtattgaaaataaccggctctttgtcgtggacaactctctggcgcaggacaaagaatgggaaatggatctgttccgtgaaatgataccgataaaaaagaagtggatcagccacaccatcgaagacgatccaaaagtgctggaactcgccgcccgcgcgggagcatggtatgtgtatcaggctatctatgatacgtcggattatataagagaacgcgtgaaacgctaccatgactacggtatcggcgtagagggtacgattctgttgggactggacaaccaaaccgaagacgacatcaaaagtctcattgacttcctcctgcggattgaacttgatttggcggagtttaccgtaatgacccctttcccccatactaaagcctgggatgacctgaacaggcagggacggatttttgatcatgactgggagcattttaacgctgggcaggtggtctttaccccgaaaaacataagcgccgaacgattgcaggaactgtacgattttgcgtggaaaactttttatcaggatgagtctcaggaagaaaaaatgttccacctgctttacaccgtagtaaatcgcgaaatggaagacggaacttaccgaccccgaaacaggcggctgattcataaatccttcggcaaggatgtaaaaagctga

SEQ ID NO: 62420 - protein, 249 aa, Unknown
  Obtained from environmental sample
  misc_feature (1)..(249): Xaa is any amino acid
MIDWPSGTRVSYLGGRTFRPRPLDKVIEELSGIENNRLFVVDNSLAQDKEWEMDLFREMIPIKKKWISHTIEDDPKVLELAARAGAWYVYQAIYDTSDYIRERVKRYHDYGIGVEGTILLGLDNQTEDDIKSLIDFLLRIELDLAEFTVMTPFPHTKAWDDLNRQGRIFDHDWEHFNAGQVVFTPKNISAERLQELYDFAWKTFYQDESQEEKMFHLLYTVVNREMEDGTYRPRNRRLIHKSFGKDVKS

SEQ ID NO: 62421 - DNA, 759 bp, Unknown
  Obtained from environmental sample
  misc_feature (1)..(759): n is a, c, g, or t
atggttacgagtgaacacaaacacgcgccgctttatgcgccgcttttttttctgcttattctcctctgttcatgccggactataaatcgcggcagggcggaactcaatattcccccttccatagtctacttcagttttgatgacgggcctaacgccaaagacgatacaaccgcccgtctgctggacgtgcttaaaaaatatcaaattaaagctatattttgcctgctgggtgaaaacgcggaacgctatcccgatctggtcaaacgtatgtatgatgaaggacactgtattgtcaatcacgggtattccgacaaatgggcaagcgggatgaaaccggatgaattcagggataatctgctccggggggaagcggcgatttccgcggctctgggacacagtatgtctcccaggctgtaccggccccagggcggcttttataccggggcgcaggaaaaaattcttcgcgacgagggctatatattggttctgaataatgtcagggtgtatgacgccgttattgacggaacaaaacaggataaggtcgcgagggatattgtaagaaaggttgaaaaacagggcggagggattattctgctccatgacgcgaggaattcctatgttgaggcggaagcgtggctcgcgaaaaaccccgatggcgtcgctaaccgctcatggatacccgataccgtagaaaagataataaccgccctattggacaaggggtttattttaaacaattccgataactacccttattga

SEQ ID NO: 62422 - protein, 252 aa, Unknown
  Obtained from environmental sample
  DOMAIN (35)...(162): Polysaccharide deacetylase
  misc_feature (1)..(252): Xaa is any amino acid
MVTSEHKHAPLYAPLFFLLILLCSCRTINRGRAELNIPPSIVYFSFDDGPNAKDDTTARLLDVLKKYQIKAIFCLLGENAERYPDLVKRMYDEGHCIVNHGYSDKWASGMKPDEFRDNLLRGEAAISAALGHSMSPRLYRPQGGFYTGAQEKILRDEGYILVLNNVRVYDAVIDGTKQDKVARDIVRKVEKQGGGIILLHDARNSYVEAEAWLAKNPDGVANRSWIPDTVEKIITALLDKGFILNNSDNYPY

SEQ ID NO: 62423 - DNA, 636 bp, Unknown
  Obtained from environmental sample
  misc_feature (1)..(636): n is a, c, g, or t
atgagattttttgtttcacttatgcatttcatcggaattgtaaatctggaaaccgataagcgggaaaattaccggcgtctttcatcaaagatagtagtcgcgaaccatccgtcgcttcttgacgtggttatgcttctttcacttattccaaacgccgactgtattgtaaatacggatttaaaccgcaactttattgtaaaaggtattatacgccagctctatatactcaattcactagatctggaaagcatttttcaggcttgcgcggaatcattaaagcagggaaactgcttaatcatttttcccgaaggaaccagaacccaccgctacgggaaaacgattctcaagaggggggccgcccgcgtttccctgtattcaggctgtaatattgttccggtgcatataggaggtacggacaaatttggactgggtaaaaaagatccctggacgggatttaatccccgcgagcgttatgtctaccgtctcagtatggggcctgaaattgatccccaaaaatacagggatctccccgcgccaaaagcggtacgggggataaccagggaaatggtcgcttttctgttccccgcaaaggaggcgtcggctataagcgccgcggaagaagatggttacgagtga

SEQ ID NO: 62424 - protein, 211 aa, Unknown
  Obtained from environmental sample
  DOMAIN (13)...(136): Acyltransferase
  misc_feature (1)..(211): Xaa is any amino acid
MRFFVSLMHFIGIVNLETDKRENYRRLSSKIVVANHPSLLDVVMLLSLIPNADCIVNTDLNRNFIVKGIIRQLYILNSLDLESIFQACAESLKQGNCLIIFPEGTRTHRYGKTILKRGAARVSLYSGCNIVPVHIGGTDKFGLGKKDPWTGFNPRERYVYRLSMGPEIDPQKYRDLPAPKAVRGITREMVAFLFPAKEASAISAAEEDGYE

SEQ ID NO: 62425 - DNA, 2391 bp, Unknown
  Obtained from environmental sample
  misc_feature (1)..(2391): n is a, c, g, or t
gtggcgacatttgcccgcgaaaactaccgcattgcccgttcgttgaacttttcgttaccggcgcccgtcgatatcccgcaaattatgatgcaaccggcgcaaggaagttattatttcttcgcgtcgatcgcgcctaaaatagaaacgcgcaaaaagcagtgggccggcgatttggcaatcatttgggatgtttcgcttagcggctcgcaacgcgatttaaaccgtgagtttgaagcgcttgacatcattttcgccgaaaagaaaaacgttaacgtctacctttactatttaaacaataccttaactaaaatgataaataaaaacaccgccaacggcgagcacatagttaccgacggaaattgggacggactaaaaaacattttgaagaaagcggtctttgacggcggcaccgatttttctaaaatcaacttagacgcccttgccggaaatgaaattttgtttttctccgacggtatctcaacattgagcgacgctgatttcatactgaataccaaagttaccgtaaaatcccctatgcactgcgtcgtctcctccgcaaaagccgactacagcgctatgaaattgattgccggcaaaacaaagggcaaatttgtgaatctcaacgccctgtcttccgaaaaattaaaaaacgagttgttgtacgaaacattgcaatttttaggaacggaacacggggaatccgtacgcgaagtatatccgagcatcgcaacaccgatctacggtaatttttcactgtccggtatttcagaggtaaatgatgctgaaataactttgcttttcggtttcggtaataaggtcgaaaaacgattcaaggtaaaattagacgctaaaaaagcaagcaatcaaggaaacgtgcataaactttgggcgcaaaagaagatcgccgacctcgacttaaactacgaaaagaaccgcgccgacctcacggaactcgggcagcaattcggcattatcacgcgaaacacatccctcatcgtactcgaaaccgttgacgactacatccgctacaacattacgccgcccgccgagttgcgggcagaatatcaaaataggcaaaaaggaagggaagaacagcaacgaaatatggaacgcaacctgctcagagaagcgacggcggcgacccaaaagataagaaaatggtggaacaccgattttgcgcccccaaaacccaaatatcccacgccggatagtgaaaccgaattctcgagcgcaagcgagaaactaggtacaacaactctctctcgagacgaagtaaaccaacgtatttcggaaatgacggaacgcgctactcaaagaaatgaacgcgcacggcaaaaaagcgaacgtgcgccgcgaagaaacgagcgctcgccgcaaaaaaacgaacgcgccgcaaataccggtaatgcccaaaaatcaatggcgttcgaggccgccgaagttatgggctacttagacaaccccacgccgatttacatcgttgatatcgacgatccgaacgcggatcccattaccatcgatcctgatttccgcggaggaagcggaataaggagatcaggtggcggatcatccgtcagttccggcgccacgagccgcagcgccgcgtccggaataggatacggatcgggatccgacgccgccgttagtaaaaaaccacgtgaagaaaatgcctcccagccgaccattacaattaaacccatccgaaaggataacgattatcttaacaagttgacgggaaacatcgcggaagattacaaaacgtaccagaaactaagagacgattacgcctcgtcgccgacattttattttgatatggcggattggttttatacacataaagacaaaaaactcgcgcttcgcgtacttacgtctattgccgatctagacctcgaaaacgcgttgctctatcgattgctcggctatcggcttaaagaatacggtgagtacgcgatagaaaaatttgtctgtaaaaaagtggtccagtggcggccaatggaaccgcaaagctaccgcgactacgcgctggccctagccgacaacggcgagacgcaagcggcgctcgattcgctctatggcctgctcacaaaaggctattcggagaacatcggcaacaacagccccggaatagacgaagttgtaattaccgaaataaatcatttgatcgctaaaaacgcaaatctaaacaaatcaaaaatcgatacaagcgtgataacaaatattcccgtcgatatccgcgtcgtcataaactggaatatgaacaacaccgacatcgacctgcacgtaatagacccctacaaggaagagtgctactacagccaccgcgaaacgaagatcggcggacgtataagcgccgacaacacaagcggctacgggccggaacagttcctttga

SEQ ID NO: 62426 - protein, 796 aa, Unknown
  Obtained from environmental sample
  misc_feature (1)..(796): Xaa is any amino acid
MATFARENYRIARSLNFSLPAPVDIPQIMMQPAQGSYYFFASIAPKIETRKKQWAGDLAIIWDVSLSGSQRDLNREFEALDIIFAEKKNVNVYLYYLNNTLTKMINKNTANGEHIVTDGNWDGLKNILKKAVFDGGTDFSKINLDALAGNEILFFSDGISTLSDADFILNTKVTVKSPMHCVVSSAKADYSAMKLIAGKTKGKFVNLNALSSEKLKNELLYETLQFLGTEHGESVREVYPSIATPIYGNFSLSGISEVNDAEITLLFGFGNKVEKRFKVKLDAKKASNQGNVHKLWAQKKIADLDLNYEKNRADLTELGQQFGIITRNTSLIVLETVDDYIRYNITPPAELRAEYQNRQKGREEQQRNMERNLLREATAATQKIRKWWNTDFAPPKPKYPTPDSETEFSSASEKLGTTTLSRDEVNQRISEMTERATQRNERARQKSERAPRRNERSPQKNERAANTGNAQKSMAFEAAEVMGYLDNPTPIYIVDIDDPNADPITIDPDFRGGSGIRRSGGGSSVSSGATSRSAASGIGYGSGSDAAVSKKPREENASQPTITIKPIRKDNDYLNKLTGNIAEDYKTYQKLRDDYASSPTFYFDMADWFYTHKDKKLALRVLTSIADLDLENALLYRLLGYRLKEYGEYAIEKFVCKKVVQWRPMEPQSYRDYALALADNGETQAALDSLYGLLTKGYSENIGNNSPGIDEVVITEINHLIAKNANLNKSKIDTSVITNIPVDIRVVINWNMNNTDIDLHVIDPYKEECYYSHRETKIGGRISADNTSGYGPEQFL

SEQ ID NO: 62427 - DNA, 771 bp, Unknown
  Obtained from environmental sample
  misc_feature (1)..(771): n is a, c, g, or t
ttgggtgaggaggttattatgatacagcaaacccgccaattattacgggaactccgccttcccgccatggaaaaagcgtattccgcccaactggaacttcccgcctgcagcgcgttgggctttgacgaacggttcgccatgctggtgcaggccgaagatgaaagccggaaggagaaaaagcttgcaaggcttttgaaagccgcctgcctgagggaaggcggcgcatgccttgaggaggtggactgctggccgggcagaaaccttgaaaaaagcgcggtggcccttcttgccgactgccggtggattcgcaaagggcataaccttttggtatcaggcgcttgcggaacaggcaagacctatctgacgagcgcgttcggcaacgccgcctgccgtcagggatattctgtccgctgttaccgccttccccgccttcttgtggatttgcatatttcacggggggacggctcctgggagaagatcctgggcgatcttaaaaagcccgacctgctcatccttgacgacttcggcctcgccccccttgagccactgcaatgccgggactttctggaagtggtggaagaccgttatgcgtcagcctcgacggtagtggcttcccagcttccggtatcctgctggcacggggtctttgccgatgcgacaattgccgatgcggtgttggaccggctgcttcaaggtgcgtaccgctttgagcttaaaggcccctccaggcggcaacggaatgtgccggatgaaggcacggcggcggaataa

SEQ ID NO: 62428 - protein, 256 aa, Unknown
  Obtained from environmental sample
  DOMAIN (28)...(57): IstB-like ATP binding N-terminal
  misc_feature (1)..(256): Xaa is any amino acid
MGEEVIMIQQTRQLLRELRLPAMEKAYSAQLELPACSALGFDERFAMLVQAEDESRKEKKLARLLKAACLREGGACLEEVDCWPGRNLEKSAVALLADCRWIRKGHNLLVSGACGTGKTYLTSAFGNAACRQGYSVRCYRLPRLLVDLHISRGDGSWEKILGDLKKPDLLILDDFGLAPLEPLQCRDFLEVVEDRYASASTVVASQLPVSCWHGVFADATIADAVLDRLLQGAYRFELKGPSRRQRNVPDEGTAAE

SEQ ID NO: 62429 - DNA, 708 bp, Unknown
  Obtained from environmental sample
  misc_feature (1)..(708): n is a, c, g, or t
ttggtggaaggcagcatcgggtggcttgagacctggcttgtccaatggctgaaaggcggcgggccttcgccccggcagttttcaagcttcgccgaacttaacgcggcggtaaaaatccgccttgccgaactggtgaaacggccgttccagaaaagggcgggcagccgggaaagcgtgttcctggagcttgaccgccccgccctgcgccctctgccgggcaccccttatgaacaccccagttacgtcgaaaggcgggtgccaaacaactaccacgttgaatatacgggcttttactactcggtcccccaccggtactataaacagcaggtaaccgtaaaagcgacatattcggtcattgaagtgtacgcggacaggcttaaccggatagccgtccacgaacggcgctacaccgggagccggtatagtacggagcgcagccacatgccgcccgcccaccaggcgcagcaggacgcgaaccggtttgacgggaagcgcttcaggagctgggcgtcgtcaatcggggtgaacgccttttacgtcattgacagcctgctgaaagaacgggaagcggaacagacagcctaccgcgcctgtatgggtatcctgcagctctcgcgaaagacggaaaacgcgcgtcttgagggcggcctgccggaaggcccggaatcctggggacaatttcatatgccgtcatcaaaaacattttaa

SEQ ID NO: 62430 - protein, 235 aa, Unknown
  Obtained from environmental sample
  misc_feature (1)..(235): Xaa is any amino acid
MVEGSIGWLETWLVQWLKGGGPSPRQFSSFAELNAAVKIRLAELVKRPFQKRAGSRESVFLELDRPALRPLPGTPYEHPSYVERRVPNNYHVEYTGFYYSVPHRYYKQQVTVKATYSVIEVYADRLNRIAVHERRYTGSRYSTERSHMPPAHQAQQDANRFDGKRFRSWASSIGVNAFYVIDSLLKEREAEQTAYRACMGILQLSRKTENARLEGGLPEGPESWGQFHMPSSKTF

SEQ ID NO: 62431 - DNA, 1305 bp, Unknown
  Obtained from environmental sample
  misc_feature (1)..(1305): n is a, c, g, or t
atggcagactcggcaaggaagagcaggaaagggtgttcgatccggcgccaaaaggcaaaacaaggtggttctgtcacgaatatcgcggaaacatcggttactatagaaggaatcaccgccgtaatcgattcgggactgtcaaaactcaactggtacaacccgaacagctttacatcgagccttgtggaagcgccgatctccaaagcgtcggcaaaccagcgcaaggggcgggccggacgcacccgcgagggaagctgttaccgtctgtacacgcgcgatgattttgaagaacgcccgcaatttacaacagaggaaatcttccgcacggatctttccgaggttatcttgagaatgtccgaccttggaataactgattttgaaggctttgactttatctcaacgcccggatacgaagggcttgaagccggaatagaaacattgaacctgcttcacgcccttgaaagcgaccgcactctttccaatataggcaagatgatgacggaattccccctcgcgccccgtcaatcaaggataattgtggaggcgatcctccgttatcccaatgttctgcgcgaaaccctggttgcggcggcgtttctttccacgcaaagcccctatctgctgccgcccggtgaagaaacagaagcccgcaaggcccacggccgtttccgcgatgataatggggattttgtttcatatctaaaaattttcaaagcctactgcgattctccgcacaaaaccagattctgcgagaaaaattaccttgatgagaaggcgatggcggagattgtgaatgtggtcgcccagcttgaggaaattatcgccaacctgaaaatccccgtgcttgcgggcgggaatgccaatgattacctctgctgtatcgccacagggatgatccagttcgtctgcgtccgcgagggcgcggccaaaggcggcggcggcgccagaggcggcggcggaaaacacggcgcatccaaaaaaaacgtcacataccgcagtctgaccgcggacagaataaccatacaccccggctccgtgatgttccgcactgacccaatatacatagtggccggagagattgtccgcaccagcaggatgtacgccatgtccgtttcacccttgtcaaaggaaatcatggaaaaattaggactggggaccagggattggggactggggactggggaggaaagaaaagaaaaaaaatctcacgcggaggcacatcgtacctctggtacgcggcataaaggacgcaaaggggagaagagaaagaagtcaaagaagagggacaggggggatgagcagtaa

SEQ ID NO: 62432 - protein, 434 aa, Unknown
  Obtained from environmental sample
  DOMAIN (142)...(234): Helicase associated domain (HA2)
  misc_feature (1)..(434): Xaa is any amino acid
MADSARKSRKGCSIRRQKAKQGGSVTNIAETSVTIEGITAVIDSGLSKLNWYNPNSFTSSLVEAPISKASANQRKGRAGRTREGSCYRLYTRDDFEERPQFTTEEIFRTDLSEVILRMSDLGITDFEGFDFISTPGYEGLEAGIETLNLLHALESDRTLSNIGKMMTEFPLAPRQSRIIVEAILRYPNVLRETLVAAAFLSTQSPYLLPPGEETEARKAHGRFRDDNGDFVSYLKIFKAYCDSPHKTRFCEKNYLDEKAMAEIVNVVAQLEEIIANLKIPVLAGGNANDYLCCIATGMIQFVCVREGAAKGGGGARGGGGKHGASKKNVTYRSLTADRITIHPGSVMFRTDPIYIVAGEIVRTSRMYAMSVSPLSKEIMEKLGLGTRDWGLGTGEERKEKKSHAEAHRTSGTRHKGRKGEKRKKSKKRDRGDEQ

SEQ ID NO: 62433 - DNA, 912 bp, Unknown
  Obtained from environmental sample
  misc_feature (1)..(912): n is a, c, g, or t
atgcctcaatggaggagcgggatcatgcgatgcaaaatcaggaagcctctgttcttgcccgtaattaatcatggtatcttcacgccctgcttggcaatctttctttcttcttctgttttcttttgtataggcctttatgcccagcaggatgccatacccgacggctttgtgcggatacaaggcggaaccttcacgatgggcagccctcctaacgagccggaacgtagaaataatgaaatccagcatcaagtaacagtgggtagtttttacatgggaaaatacgaagtaacgcagaaagagtatcaggaaataatgggaaccaatccgagcaatttcagaggggatgaaaatctgccggtggaaaatgtaagctggtatgacgcgatagagtactgcaacaagcggagccaagaggaagggctgaccccggcgtatacgataaataaaaaccatcgtgatccgaataatagaagcggcagggattctgtcgaatggatagtaacatgggataagaatgccgacggctaccgtctgccgaccgaggcggagtgggagtacgcgtgccgcgccgggacaaccggcgcgtacaacaccggagcgaacataagcgataacaccggctggtacagcgcgaacagcagaggtaagactcatccggtagggcaaaaatccgccaacgcctggggactgtatgatatgcacgggaacgtgtgggagtggtgctgggactggaaaggtgtttctacaagcggtgaccggactgatcccgtgggagcggtttccggagcttcccgtgtgatgcgcggtgggggttggtactatccggctttgttcgcccgttcagcctatcggggtgacggcaatccgagcgaccggagcaggagttccggcttccggctggtaagacagtga

SEQ ID NO: 62434 - protein, 303 aa, Unknown
  Obtained from environmental sample
  DOMAIN (52)...(302): Domain of unknown function (DUF323)
  misc_feature (1)..(303): Xaa is any amino acid
MPQWRSGIMRCKIRKPLFLPVINHGIFTPCLAIFLSSSVFFCIGLYAQQDAIPDGFVRIQGGTFTMGSPPNEPERRNNEIQHQVTVGSFYMGKYEVTQKEYQEIMGTNPSNFRGDENLPVENVSWYDAIEYCNKRSQEEGLTPAYTINKNHRDPNNRSGRDSVEWIVTWDKNADGYRLPTEAEWEYACRAGTTGAYNTGANISDNTGWYSANSRGKTHPVGQKSANAWGLYDMHGNVWEWCWDWKGVSTSGDRTDPVGAVSGASRVMRGGGWYYPALFARSAYRGDGNPSDRSRSSGFRLVRQ

SEQ ID NO: 62435 - DNA, 786 bp, Unknown
  Obtained from environmental sample
  misc_feature (1)..(786): n is a, c, g, or t
ttgatggatgaaggcggaactttcatgatgggcagccccgccaaagagccggagcggcgcgacaatgaaatccagcatcgggtaacgctgagttcttttttcatgggcaagtatgaggtaacgcagaaagagtatcaggaaattatgggaacgaatccgagccgtttcaagggggataatctgcctgtggagatggtaagctggtataacgcggtggagtactgcaacaagcggagcgagaaggaagggctgagcccggcgtatactatcgataaagaaaatatcgatatatataatatatataattcaagcggtatagacaggtttaaatggacggtaacgtggaacaggaacgccaacgggtaccgtctgccgaccgaggcggaatgggaatacgcgtgccgggccgggaaaaagacgccgtttaatacggggaacaaccttaccacaagccaggctaattataacgggagtttgccgtacaacaacaacgcggaaggggagaacaggcaaaagacaacgccggtggggagtttcgcgccgaacgcctggggcctgtacgacatgcacgggaacgtgacggaattgtgctgggacagatacggaagatacgctagcgggccgcagattgatccggccggcacgggctctaaatttgactttgagcgcgtgtctcgcggcgggggttggaacggtacggcgggaggcgcccgttcggccgcgcggttctgcgaaaacccgagccacacatggggatccattggtttcagagtggtaaggcaatga

SEQ ID NO: 62436 - protein, 261 aa, Unknown
  Obtained from environmental sample
  DOMAIN (4)...(260): Domain of unknown function (DUF323)
  misc_feature (1)..(261): Xaa is any amino acid
MMDEGGTFMMGSPAKEPERRDNEIQHRVTLSSFFMGKYEVTQKEYQEIMGTNPSRFKGDNLPVEMVSWYNAVEYCNKRSEKEGLSPAYTIDKENIDIYNIYNSSGIDRFKWTVTWNRNANGYRLPTEAEWEYACRAGKKTPFNTGNNLTTSQANYNGSLPYNNNAEGENRQKTTPVGSFAPNAWGLYDMHGNVTELCWDRYGRYASGPQIDPAGTGSKFDFERVSRGGGWNGTAGGARSAARFCENPSHTWGSIGFRVVRQ

SEQ ID NO: 62437 - DNA, 1101 bp, Unknown
  Obtained from environmental sample
  misc_feature (1)..(1101): n is a, c, g, or t
ttgtttcgttacgtctttttttcaggtgtccttaaccgtcgcaaagctttgtccctttcgatggtaataacttccaaagccgtaccagtcggcggggaaggagagcttgttatcgcgttcggcgcggcttctggcgggaaacgcttttggaacatccctgccgtactcatccgctgtgagctttgccttgaaaccaaagacggccgcgttatacgccactttgtaaatccggctgtcgagagtttcagcagttttcctgtaagggagaggggggcttatttaagcaaatgcgacagacttgtcatctttgacgctcccggctttttttcccttaatttttcaatttctcaaaatgaaaacccgcgtcttctggcgcttccgcgtccggctgaagaagccctctcgcttcttccaagatcaggcggaacggaagtgcgcaacgaacctcattaccgtaaaagcaatgaattgatcaaccaccggccctatgttccgggagatgatccgcggcgcattaactggaagctttacagccatgtagcgtcgggagagctttttgtgcgcgaaggcgaaagcgagcctccgccctgttcccgccttcttattctgatcgataccgaggccgacagctcactttactctccagacgaaggacgccgggtggtagacttgttatgcgaaaacgctctggcatcagcgctgagattttcttctaggggaacggatgtgcttataggctgtactggcggcgggatcataggcggcggtgaggaaagcgctcctttggattcaagccagcttgccgccacgttggcatatcccgctgctataagctggcctgcgtcttcaggcgagctcccccaggcacccggcgaaacaggcgtccttgtccttgcccttccaagaaaagtctcaggcgatacttttacttcacaatcagctttgaacaagtttcttaaaaaccgccagcaggaaacggacatcgtctttatttacaacactgagtgtagaaaagtgaaggaaatagaacaagaagccgcacgatgtgtcagtttctattcaggtaaattcggcgtacatgctagcagggtaataaaatga

SEQ ID NO: 62438 - protein, 366 aa, Unknown
  Obtained from environmental sample
  DOMAIN (88)...(193): Protein of unknown function DUF58
  misc_feature (1)..(366): Xaa is any amino acid
MFRYVFFSGVLNRRKALSLSMVITSKAVPVGGEGELVIAFGAASGGKRFWNIPAVLIRCELCLETKDGRVIRHFVNPAVESFSSFPVRERGAYLSKCDRLVIFDAPGFFSLNFSISQNENPRLLALPRPAEEALSLLPRSGGTEVRNEPHYRKSNELINHRPYVPGDDPRRINWKLYSHVASGELFVREGESEPPPCSRLLILIDTEADSSLYSPDEGRRVVDLLCENALASALRFSSRGTDVLIGCTGGGIIGGGEESAPLDSSQLAATLAYPAAISWPASSGELPQAPGETGVLVLALPRKVSGDTFTSQSALNKFLKNRQQETDIVFIYNTECRKVKEIEQEAARCVSFYSGKFGVHASRVIK

SEQ ID NO: 62439 - DNA, 1935 bp, Unknown
  Obtained from environmental sample
  misc_feature (1)..(1935): n is a, c, g, or t
ttggccgagctgcgaatgacaagcgccttggcattggcgaagatgaaacaaagaccgcnctttgataaagcgtgggcaaaacagcagaaatattttgacgctgtgcaaaaaatgggagtggaggcgctgcaagaggcgcgcaaagccaaccgtccggttatttgtactttgggaaggccttacaacgcgtttacaccggaagcaaacatgggtattccgcgtaaatttacaacgcggggttactcgatcattccgtttgacattctgccgttccacgatgaggagattttccccaatatgtactggtattacggccagcaggacatgaaagcctccgaattgcttaaaaaagaagataatatttaccttgcgtttattaccaacttttcatgcgcacccgattcatttattcttcactatgttaaatggctgatggggcaaaaaccattccttgtgctggaactggattcacactcggcggacgcgggaattgatacgcgcgttgaggcgttccttgatattatcgacggctaccgcgcgaagaagaacgagatagagaccgagcgttatgataacggttggcgttttgttacggagaaattagcgaccggcaaatttgatttgcgcatagacaatattaagacaggcgaaaaagtgcctattgtaggaaacaagcgcgtaaaagttctgctttccaatatgggaaatatctccaccgagtacatgggagcggcggttcgcagccttggcattaacgctgaagctttccctgtcgcaaccagcaaaaccgttcagattgcccgcgcccacgcgtctggaaaagaatgcgtgcccagccatcttgttcttggaagcgctttggaattcttcttcagcgaaaaataccgcaaggatgagttgtacctgctgtttgtgccgataactacgggaccgtgcagaacagggcagtattatgtgtattatgaaaatcttttccgcgatttacacctggaaaatgtcgtgatttttattttatcttcagataattcatatacggagttaggttcggaattttcaaagcaaatgtggataggacttgtgttatccgattatcttaaagatattcaatgctcactcaaggcatgcgccgtagatccggcaaaagcccaagaagaatatgaaaaatcgtggcgaagggttatgcatgccgtagagcataatcctaaaaatctgtggaaagaattaaaacatgtcgcaagggatgtaaaaagaattccgttaaagagaaaagttaccggctgtccgcgcgttcttgtggtaggtgaaatttatgtgcgccgcgatgattttgccgtcggcgaattgatagacctgatgagcgaacgcggtattgttgtaaaagtagccggaatcagcgaatggatacattatctggattatatgcgcgaatattcgcttaacaagttgataaaattacggccgcgcggaaaacgaatgttctcagtaccatggaaaaaattaaagacgcttcaaattgaaaaatggtggaaacatcatatcgagaaaaaaacgctggctatcttaaagccgacaaaactaataccggaaacgcctcacgatatgcgccatattatgtcatttacaagagagcactttgtaaaccttgaacttaattcagagattgcggtttcttccggttcggctgcggcggcgatggacgccggttattcgggcattgtaaacatcagcccgtttgcctgccttatcgggcgcgtaattgaaggcctgttcactccgtgggcgcgcgagcgcaattacccgattttatctgtggaagtagacggcaaccttctgccgccgaacattgtaaacaaacttaacatttttatggttaacgttctgcgctttaagggaggaaacgatctttcttctctggtagacggggcatcttcatga

SEQ ID NO: 62440 - protein, 644 aa, Unknown
  Obtained from environmental sample
  misc_feature (1)..(644): Xaa is any amino acid
MAELRMTSALALAKMKQRPXFDKAWAKQQKYFDAVQKMGVEALQEARKANRPVICTLGRPYNAFTPEANMGIPRKFTTRGYSIIPFDILPFHDEEIFPNMYWYYGQQDMKASELLKKEDNIYLAFITNFSCAPDSFILHYVKWLMGQKPFLVLELDSHSADAGIDTRVEAFLDIIDGYRAKKNEIETERYDNGWRFVTEKLATGKFDLRIDNIKTGEKVPIVGNKRVKVLLSNMGNISTEYMGAAVRSLGINAEAFPVATSKTVQIARAHASGKECVPSHLVLGSALEFFFSEKYRKDELYLLFVPITTGPCRTGQYYVYYENLFRDLHLENVVIFILSSDNSYTELGSEFSKQMWIGLVLSDYLKDIQCSLKACAVDPAKAQEEYEKSWRRVMHAVEHNPKNLWKELKHVARDVKRIPLKRKVTGCPRVLVVGEIYVRRDDFAVGELIDLMSERGIVVKVAGISEWIHYLDYMREYSLNKLIKLRPRGKRMFSVPWKKLKTLQIEKWWKHHIEKKTLAILKPTKLIPETPHDMRHIMSFTREHFVNLELNSEIAVSSGSAAAAMDAGYSGIVNISPFACLIGRVIEGLFTPWARERNYPILSVEVDGNLLPPNIVNKLNIFMVNVLRFKGGNDLSSLVDGASS

SEQ ID NO: 62441 - DNA, 1263 bp, Unknown
  Obtained from environmental sample
  misc_feature (1)..(1263): n is a, c, g, or t
atgcacaacgattttacactgtttaccagaacgtatcctaacggaacgaaggtggtcttttaccatgcctacaatgaggacggaaagcgggtcgggccgtggactactaactgtctgactaaaacggcggctagaaactattgccataagctgttaaaagagggaacgctaattcccaataaatcaaaggttttgacgtttggcgaatttgcggcggggttctggaagcgcggctcggagtacgtcaaaaaccaagagagcaggtcggatattactgacaactatataaacaactgcgcgggtttaactaaaaatcagcttataccccattttggcgatatgccgttagacaagattacggataaggacgtaaatagctggctgttggggttcggggaacggaaaattgaaaaggacggcaaaatagagattatccactatcggaacacttacgctaacacgacattcgggacattgagtacaatgctcggcgaagctgtacggcaggggcttattccggctaacccttgcgaaagagtgaagcggcttaaaaacgataagaagaaaattgagattctcaaggttgaggaagttcaaaaacttttcccaaaaaattataaaacggtatggggagataaaaaactcgcttatgtcgcttgccgtctggcttcggttactggtatgaggattggggaaattctcgggcttcggggtgaatatgtttttgacgattatattcacgtttgcggtcaaagtgggagtggcggcggttataagccatacactaaaaccaaacaaaaccgcaatattcccctagtacctgaaataatcgcgctgttgcgggggcttaataacggcaaggggtttgtgttctcaaaggacggcggggctacctcgattacagaatgtactgtccgcttggattattatcaagcattggaaaaaatagggataagcgaagatgagagggagcgaagggcaatcactatacacggctggcggcatttcctgaataccgaattgctgaaacagggcttgaccgtcatgcaggtgcagggcgttaccgggcataaatcagacaagatgaccgaaatgtataaccacccttccgcaagccaaataaacgatgttatgaaagcgcaatcggccattgccggaactcaaaagccggaaaaagaaaaaatgccgaaagaaaccggaaaggcaaaaaccgggcagaagggtttgtcgattgtaaaaatgcccagacggaaatccgcataa

SEQ ID NO: 62442 - protein, 420 aa, Unknown
  Obtained from environmental sample
  DOMAIN (192)...(376): Phage integrase family
  misc_feature (1)..(420): Xaa is any amino acid
MHNDFTLFTRTYPNGTKVVFYHAYNEDGKRVGPWTTNCLTKTAARNYCHKLLKEGTLIPNKSKVLTFGEFAAGFWKRGSEYVKNQESRSDITDNYINNCAGLTKNQLIPHFGDMPLDKITDKDVNSWLLGFGERKIEKDGKIEIIHYRNTYANTTFGTLSTMLGEAVRQGLIPANPCERVKRLKNDKKKIEILKVEEVQKLFPKNYKTVWGDKKLAYVACRLASVTGMRIGEILGLRGEYVFDDYIHVCGQSGSGGGYKPYTKTKQNRNIPLVPEIIALLRGLNNGKGFVFSKDGGATSITECTVRLDYYQALEKIGISEDERERRAITIHGWRHFLNTELLKQGLTVMQVQGVTGHKSDKMTEMYNHPSASQINDVMKAQSAIAGTQKPEKEKMPKETGKAKTGQKGLSIVKMPRRKSA

SEQ ID NO: 62443 - DNA, 603 bp, Unknown
  Obtained from environmental sample
  misc_feature (1)..(603): n is a, c, g, or t
ttgggcgccttcaggcgtgttgatataagattgaaaagcctttattgccgaatcggtaatccaggcctgccctgccgggctttcaagccagtcctgagtgctgggctgcaaaagccaggccttgctaatttcttcggcgagccaggcctgcccttcggggcttttaatccatgcctgcccggtgttggcggcaagccaagccttgccgtcggggccatccatccatgcctgccacgactgccccgcagcccccgcaagccaggcaactccttcggggcttgcaagccaggccttgccctgagggctgttaatccatgcctgccaggcgtcgacagtggtgccgagaagccatgccttcccttcgtcggtctggagccattcctgagcgtcggcggaacgccccggcgctccctgcggcccctgcgctccttgcggcccctgcttcccttccgagcctgtgagggaaaactccccgcaggaagaagcgagcagcagggccaaagccagaaagaaggacgcgaaaatctttcttttggatttcatagaaacctcccaaaaaataaaatgagaaaaaattggaaagcggcaacgccgcctaattaa

SEQ ID NO: 62444 - protein, 200 aa, Unknown
  Obtained from environmental sample
  misc_feature (1)..(200): Xaa is any amino acid
MGAFRRVDIRLKSLYCRIGNPGLPCRAFKPVLSAGLQKPGLANFFGEPGLPFGAFNPCLPGVGGKPSLAVGAIHPCLPRLPRSPRKPGNSFGACKPGLALRAVNPCLPGVDSGAEKPCLPFVGLEPFLSVGGTPRRSLRPLRSLRPLLPFRACEGKLPAGRSEQQGQSQKEGRENLSFGFHRNLPKNKMRKNWKAATPPN

SEQ ID NO: 62445 - DNA, 2223 bp, Unknown
  Obtained from environmental sample
  misc_feature (1)..(2223): n is a, c, g, or t
atgaaatccaaaagaaagattttcgcgtccttctttctggctttggccctgctgctcgcttcttcctgcggggagttttccctcacaggctcggaagggaagcaggggccgcaaggagcgcaggggccgcagggagcgccggggcgttccgccgacgctcaggaatggctccagaccgacgaagggaaggcatggcttctcggcaccactgtcgacgcctggcaggcatggattaacagccctcagggcaaggcctggcttgcaagccccgaaggagttgcctggcttgcgggggctgcggggcagtcgtggcaggcatggatggatggccccgacggcaaggcttggcttgccgccaacaccgggcaggcatggattaaaagccccgaagggcaggcctggctcgccgaagaaattagcaaggcctggcttttgcagcccagcactcaggactggcttgaaagcccggcagggcaggcctggattaccgattcggcaataaaggcttttcaatcttatatcaacacgcctgaaggcgcccaatggctcgccgcagcccagttcacctggctttcaagcgcagagggaaagcaatggattcagacccctgaaatcctggaattccttgaatggcttttggggcttttaagaaagcccacgggctccgaaataagcccttcatgggccatatcccttatcgataaaggcccacatgaatttacaatcgcggacaacgccgtccttgtcgctgatactgggcaaatagcggaatacacccttacgttaagcgaaacgccggctttccgctctgcccgctctgcagtgggtgaatggaaaaccggaacagacggcaaggtaaactttgacggccttaacccggataccaagtattatgtatgggcacgctccaaggaaaacgatattttctcttccggcaacgcgaaggcaagcctgggcggcaccgtttcgaccgatgtcctttattccgaaataagccctatatgggcagtaacgctgataagcaaaagccagcatgaattttccataaaggacgacgcggccctgctttacgataccgggcagggcatcgagtacgccctttcgctggttcccgatcaggtgccgaacggatccgcagggactgtccacgaatggatatccggctcgggcggcaaagctgttttcggcggccttagcgtttattccaggtattatgtttgggcaaggccgaagaaaaattctgtttacgacgcgggcgccgcgagcatgggcggccctgccgtcaccctggccacgcctgagttcattggcttcatggaaagctttattgtcccttcctcggtcggcgctcctttcagcccggcttactccgacggcccggcgcacgggcagacgatagccacaaccccttccttattcaccgacagcgtgcttgcccccaacggcaaggttatcctggttccgggttattcaaacaatatagggatctacgatcctattgctaacgcttactctgacggcccggcgcacggcaaggtcaaaaccgaaaaatacgctttcataggcggcgtgcttgcccctaacggcaaggttattttggtaccgcttgcctcagccaacatagggatatacgaccccattgcaaacacttatgttgacggtccggcacacggcaaggggacaaacgcattcctgggcggcgtgcttgcccctaacggcaggattattctggtgccggctgactcggccaatataggtatttacgaccccattgcaaatacatacactaacgggccggcgcatggtaaagtaggagcatcattcgagggcggcgtcgttgcccctaacgggaaaattatccttgtgccatacaactcagccaacataggaatctacgatcccgccgcaaatacttatgtcaacggtccggcgcacggcaaagaagcaaaagcattctccggcggcgtgcttgcccctaacggcaagattatcttggtaccggccggctcatccaacatagggatatacgatcccggtgcaaacacctatgtcgacggtccggctctctccaagctaaccgacgcattcgttggcggcgtgcttgcccctaacggcaaaattattctggtgccggccaactcggccaacatagtgatattgtctatcccagaccttgaacgcagccttgctctttgcttaagcccgtttatccataagttctaa

SEQ ID NO: 62446 - protein, 740 aa, Unknown
  Obtained from environmental sample
  SIGNAL (1)...(27)
  misc_feature (1)..(740): Xaa is any amino acid
MKSKRKIFASFFLALALLLASSCGEFSLTGSEGKQGPQGAQGPQGAPGRSADAQEWLQTDEGKAWLLGTTVDAWQAWINSPQGKAWLASPEGVAWLAGAAGQSWQAWMDGPDGKAWLAANTGQAWIKSPEGQAWLAEEISKAWLLQPSTQDWLESPAGQAWITDSAIKAFQSYINTPEGAQWLAAAQFTWLSSAEGKQWIQTPEILEFLEWLLGLLRKPTGSEISPSWAISLIDKGPHEFTIADNAVLVADTGQIAEYTLTLSETPAFRSARSAVGEWKTGTDGKVNFDGLNPDTKYYVWARSKENDIFSSGNAKASLGGTVSTDVLYSEISPIWAVTLISKSQHEFSIKDDAALLYDTGQGIEYALSLVPDQVPNGSAGTVHEWISGSGGKAVFGGLSVYSRYYVWARPKKNSVYDAGAASMGGPAVTLATPEFIGFMESFIVPSSVGAPFSPAYSDGPAHGQTIATTPSLFTDSVLAPNGKVILVPGYSNNIGIYDPIANAYSDGPAHGKVKTEKYAFIGGVLAPNGKVILVPLASANIGIYDPIANTYVDGPAHGKGTNAFLGGVLAPNGRIILVPADSANIGIYDPIANTYTNGPAHGKVGASFEGGVVAPNGKIILVPYNSANIGIYDPAANTYVNGPAHGKEAKAFSGGVLAPNGKIILVPAGSSNIGIYDPGANTYVDGPALSKLTDAFVGGVLAPNGKIILVPANSANIVILSIPDLERSLALCLSPFIHKF

SEQ ID NO: 62447 - DNA, 1881 bp, Unknown
  Obtained from environmental sample
  misc_feature (1)..(1881): n is a, c, g, or t
ttggtcagccaggatctaacattacttggccatcccaacccggaatatatcggaaagaaatttaacgatccggaaattcccctttcaattttaaccgaagaactggtaagcaggggaacaatgtcagagatcgagtggattaactggaaaggcgaaaaagtcgtcggttttttcaggacgctttccaacggatggcgcctgggccttttcgcgcaaaaaaggatatattattaccctgtatacaatatggcgatgatcctcaccctgttgggctttgcgcttgcgtcagtactgatagtagtcctgattcgcgttgacgccgcgaaaaacaaatcggatatagaaaacaggcataagagcgcgttccttgccaacatgagccatgagatacgcacgcccatgaacgccataatcggcatgaccacgattggaaaatccgccggtactactgaacgcaaagattactgccttgccaaaatagaggacgcttcgaaccatctgcttggcgttattaacgatattctggatatgtcaaaaatagaagccgacaaattcgaacttaccccggaggaattcgatttggaaaaaatgctccggcgggtagtgaatgtcgtcaatttccgtatagatgaaaaacatcaaaaattatcggtacatatagacagctcaattccccggatgctcataggggacgatcagcggatagcgcaggtcatcaccaatctgcttgggaacgcgataaaatttacgccggaaaacggctccatcacccttactgcgcgccttgcgggaaaaggaaacgacatttgtaccctgcagatttcggtaagcgacaccggaatcggcataccccccgaacagcaggaaaagatcttcaactcttttgaacaggccgaatccagcacaacccgcaaatacggaggtaccgggctcggactcgcgatttccaaaagaatagtggaaatgatgggcggcagtatttgggtgcagtcagaacaggggaaaggctcaacttttatctttaccattcaggtgctgcgcagtacgaatgaaaaactcgcgcttttatcccctgatattaatttgagcaacctccgcgttttaaccgtggacgatgattcggatattctaacgtacttccttgaaataatgcagggtttcggcataatgtgcgatgtcgccataagcggggaaaaagcgcttgaacttatagaccataacggcggctaccatatctattttatagactggaaaatgcccgacatggacggcatacagcttgcccgtgaaataaaatcacgcgtgtcggaacatcccattgtaataatgatctccgccgccgaatggagcgcgattgccgataaagcgaaatcggcgggcgtcgacaaattcctttccaaacccctgttcccctcttccattgcggaagtgatcaatgaatgtctgggcgtgagcaaaaagcaggcggaaaaatcgaagtccggggattttaccggcatttttgcgggacggcgcattttgctggttgaagacgtggaaattaaccgcgagattgtactggccctgcttgaaccgacaaagctggagatagactgcgccgagaacggggcgcaggcggtccgcatgttcggcgaggccccgcgcaagtacgaaatgattttcatggatatacaaatgcctgaaatggacggttatgaggcgacgcggaaaatcagatcgctggatgcacaggaggcaaaaaccataccgattgtagccatgacggctaacgtcttcagagaggatattgaaagatgcctcgacgccggcatgaacagccatgtgggcaaacctgttgattttgatgaagtcctgaacagccttcgcaagtatttgggctaa

SEQ ID NO: 62448 - protein, 626 aa, Unknown
  Obtained from environmental sample
  DOMAIN (118)...(183): His Kinase A (phosphoacceptor) domain
  misc_feature (1)..(626): Xaa is any amino acid
MVSQDLTLLGHPNPEYIGKKFNDPEIPLSILTEELVSRGTMSEIEWINWKGEKVVGFFRTLSNGWRLGLFAQKRIYYYPVYNMAMILTLLGFALASVLIVVLIRVDAAKNKSDIENRHKSAFLANMSHEIRTPMNAIIGMTTIGKSAGTTERKDYCLAKIEDASNHLLGVINDILDMSKIEADKFELTPEEFDLEKMLRRVVNVVNFRIDEKHQKLSVHIDSSIPRMLIGDDQRIAQVITNLLGNAIKFTPENGSITLTARLAGKGNDICTLQISVSDTGIGIPPEQQEKIFNSFEQAESSTTRKYGGTGLGLAISKRIVEMMGGSIWVQSEQGKGSTFIFTIQVLRSTNEKLALLSPDINLSNLRVLTVDDDSDILTYFLEIMQGFGIMCDVAISGEKALELIDHNGGYHIYFIDWKMPDMDGIQLAREIKSRVSEHPIVIMISAAEWSAIADKAKSAGVDKFLSKPLFPSSIAEVINECLGVSKKQAEKSKSGDFTGIFAGRRILLVEDVEINREIVLALLEPTKLEIDCAENGAQAVRMFGEAPRKYEMIFMDIQMPEMDGYEATRKIRSLDAQEAKTIPIVAMTANVFREDIERCLDAGMNSHVGKPVDFDEVLNSLRKYLG

SEQ ID NO: 62449 - DNA, 834 bp, Unknown
  Obtained from environmental sample
  misc_feature (1)..(834): n is a, c, g, or t
atgaattttattatgttcactgatgcgcactgccatccctttgatctcgcgggatgtttacctgatgccgaagaagagcggcggaatcttggcgtgatctgcgcctcaagcgcggctacgctggaagaatttgaatattgcgagcggctttcgattcaggcaaaacaggataaggccgcgccgttattgccgtgttttgccgtacacccgcaaatggcgttaataattaaaaccacccccaatgttacgcgatattcattgcaggacaatttgtctgttctggacacgcttgcgcggcagggccgcctttgcgcggtgggggagaccggctttgatttatacaacgccgatttcagggaaactgaaaaaacacaggatgagctgtttgcggcacatcttgaaacagccttgcaatacggtctgcctctggtgatacattcgcgccgcgcgatgcacaagatctttgccagcgccgaggcgctaaaaaaatgcagggctgttgtgtttcattcatggtcaggcacgcagggtgagggcgaggcgctgctcaggcggggcattaacgcctttttttcatttggcgcggcgataacgcttaaccacagggaaatgacgcgctgctgcgccgctttcccggcggaacgcctgctcaccgagacggacgccccgttccagcccccccgcggcagggagttctcccgttacgcggatataaaggcggttcttggggcgatggaagccctgcgcggcggcgccgtcagcggcggcgccgttaacggcgggacgaaaatggaaaaaattattgaaacaaatttccgcgccgcgttctattaa

SEQ ID NO: 62450 - protein, 277 aa, Unknown
  Obtained from environmental sample
  DOMAIN (5)...(277): TatD related DNase
  misc_feature (1)..(277): Xaa is any amino acid
MNFIMFTDAHCHPFDLAGCLPDAEEERRNLGVICASSAATLEEFEYCERLSIQAKQDKAAPLLPCFAVHPQMALIIKTTPNVTRYSLQDNLSVLDTLARQGRLCAVGETGFDLYNADFRETEKTQDELFAAHLETALQYGLPLVIHSRRAMHKIFASAEALKKCRAVVFHSWSGTQGEGEALLRRGINAFFSFGAAITLNHREMTRCCAAFPAERLLTETDAPFQPPRGREFSRYADIKAVLGAMEALRGGAVSGGAVNGGTKMEKIIETNFRAAFY

SEQ ID NO: 62451 - DNA, 1080 bp, Unknown
  Obtained from environmental sample
  misc_feature (1)..(1080): n is a, c, g, or t
ttgatactgaaacagatggggaataagtttaaacactttatttttaacctttaccggcataatgaaacgcagattcaccagttaaagtaccttttttgggaatgcacccgccgctgtaatattaattgtattcactgcggttctgactgttcagctaacgtccggaatcaggatatgccatttgatgattttctgaacgcgatactgccttttgagaacgaaaataaaaaagaacctattgttatcgccattaccggaggggagccttccctgcgcgaagaccttccggattgcgggcgaaaattgcgcgagcatgggtttttatggggcatggtaaccaacggctacaattacaccgccaatttgcactcaaagctgatgtctgcggggttaggttcaattacggtaagccttgacggctttgaagcttcacataactggcttcgcggcaatccgcagagttttaacagggcggttaaagcgattgacattatagcggccgcgcgcgggctcacctacgacattgtaacctgcgttaatcaaaaaaacatcggcgaacttgaagcgcttaaagattttttaaaaagtcataatgtaaaagcatggcggctgtttacgattttcccaataggacgggcggcaaataaccctgacttgcgtttaactccagatcaattacattggcttatggattttattgtccgctcccgcgccgacagccgtataaaggtttacttcagctgtgaagcctacacgggcgattacgagggaaaggtgcgcgacggttattttttctgccacgccggcgtcaatatcgcctcggtcttaattgacgggtcaatctcagcctgcccgaatatcaaccggcattttattcagggaaatatttacaaggacaattttcaggatgtatgggaaaaccgctttgaggtaatgcgcgaccgcacatggacaaaaacgggtatttgcaaaaaatgccgcgattttaaaaactgcaaaggcggcgccatgcacatgtggaacgaaaaacaggacgagattatgcggtgtcaccaccatgatataaatagttgtatgtaa

SEQ ID NO: 62452 - protein, 359 aa, Unknown
  Obtained from environmental sample
  DOMAIN (33)...(194): Radical SAM superfamily
  misc_feature (1)..(359): Xaa is any amino acid
MILKQMGNKFKHFIFNLYRHNETQIHQLKYLFWECTRRCNINCIHCGSDCSANVRNQDMPFDDFLNAILPFENENKKEPIVIAITGGEPSLREDLPDCGRKLREHGFLWGMVTNGYNYTANLHSKLMSAGLGSITVSLDGFEASHNWLRGNPQSFNRAVKAIDIIAAARGLTYDIVTCVNQKNIGELEALKDFLKSHNVKAWRLFTIFPIGRAANNPDLRLTPDQLHWLMDFIVRSRADSRIKVYFSCEAYTGDYEGKVRDGYFFCHAGVNIASVLIDGSISACPNINRHFIQGNIYKDNFQDVWENRFEVMRDRTWTKTGICKKCRDFKNCKGGAMHMWNEKQDEIMRCHHHDINSCM

SEQ ID NO: 62453 - DNA, 858 bp, Unknown
  Obtained from environmental sample
  misc_feature (1)..(858): n is a, c, g, or t
atgagtaatgaaacgcccaagtggcgtaaaatgaaaaaaaaagaaagcgatttaaaagcctccgaaacattattgcttaaaattgaaaacaaatgcgtaagcgcctgcgggcggtttctctctcttgatgaaacaaaaggccatgtttggatgttaaacgaaaataaaacaagcgtttcggcgttaataatttattcaaaaagcacagtaattcccgtattatgcggcaagaaagaacttcctccccccgattttctaaaagaatttgtcaaaaaaaagaaaatacactcgttacaggggcagaaagaggatgtacttgttctggaaaacataattaaacaaatgggagcgcaaacttctgatattttcgattacgatcttatgagtcttgacaaacagcccgaccaaaaatgtttttcatccggccctgtaaatcttattttacgcgccccccgtttaatagatttagacgctatagcccccttacaggcggcgtatgaaaaagaagaagttttacccagcggttcaagcttaagtcccgcgacaagcagggtaaacctcgcccacattatcgcaaaaggacagatcctttgcgccgaaatcgacggccgcatagtaggaaaaataaacataaacgccgtctcctttacaaggtatcaggtaggcggcgtctacgttcaccccgatttccgcaacttgggaatagcgcgccgaatggcggcagaatttatcgcttctttaattaattcaggaaaaggggtaaccctattcgtaaaaaaaacgaatctacacgctaaacgtttatataccggactcgggtttaccgtttcaggcgattacaggataacttatttttaa

SEQ ID NO: 62454 - protein, 285 aa, Unknown
  Obtained from environmental sample
  DOMAIN (205)...(282): FR47-like protein
  misc_feature (1)..(285): Xaa is any amino acid
MSNETPKWRKMKKKESDLKASETLLLKIENKCVSACGRFLSLDETKGHVWMLNENKTSVSALIIYSKSTVIPVLCGKKELPPPDFLKEFVKKKKIHSLQGQKEDVLVLENIIKQMGAQTSDIFDYDLMSLDKQPDQKCFSSGPVNLILRAPRLIDLDAIAPLQAAYEKEEVLPSGSSLSPATSRVNLAHIIAKGQILCAEIDGRIVGKININAVSFTRYQVGGVYVHPDFRNLGIARRMAAEFIASLINSGKGVTLFVKKTNLHAKRLYTGLGFTVSGDYRITYF

SEQ ID NO: 62455 - DNA, 918 bp, Unknown
  Obtained from environmental sample
  misc_feature (1)..(918): n is a, c, g, or t
ttgtcccgtacgaatgctggctgccgaagcatacccgcggttatgagcggccacctcgcctttcctttgacgcaggcaaaagatacgcccgcttccctgtcttcttggttcttaaacgagctgttacgcgataagataggctttaagggaatcgtaataacggacgatttaatgatgactggagccacctcttttttgggaaccctttcccgcaccgcgaaacaggcgttaatagcgggtaacgatataatcatgttttcaaacacgccccttctttacgatcctgtttggaccttattgataaattcaatgaaagaagacgaggcgttccgcaggattgtaagaaacgccgcgcgaaaaacgctggaattaaaattaaaacaccttcgcggaagcgcaagcgtaccgtatattcccgatcccgagcgcgtacaggccgggatatccgatcaggaaggcgctgtttttttcatgaacctcgctgcgcgaagcgtaaccatcgtaaagccgtctcccgcaaatttagttttcccggttacaaaagataacgccgggcgcgtgcttttagcgggcaaattcaacgattttttctcttacggaaaaaccgccttcccaaacgcttccttttacagatactcgggcgcgggagacgctgatatttttacgtcatttgcgcgtaacgcggatacggtaattttctgcctttcggacacgacagatttgcgtttattgcgtgctattcagcaattaggcaagaaagttatagttctttctgtattaaatcccgtatatatagaaagcgtcccctgggtaagcggagccgtcgcggtttacagttacgctcccgaatcattcgcggcaggtttttccgccataataggaagaattcccgcgcagggaattctgccctatgagtaa

SEQ ID NO: 62456 - protein, 305 aa, Unknown
  Obtained from environmental sample
  SIGNAL (1)...(26)
  misc_feature (1)..(305): Xaa is any amino acid
MSRTNAGCRSIPAVMSGHLAFPLTQAKDTPASLSSWFLNELLRDKIGFKGIVITDDLMMTGATSFLGTLSRTAKQALIAGNDIIMFSNTPLLYDPVWTLLINSMKEDEAFRRIVRNAARKTLELKLKHLRGSASVPYIPDPERVQAGISDQEGAVFFMNLAARSVTIVKPSPANLVFPVTKDNAGRVLLAGKFNDFFSYGKTAFPNASFYRYSGAGDADIFTSFARNADTVIFCLSDTTDLRLLRAIQQLGKKVIVLSVLNPVYIESVPWVSGAVAVYSYAPESFAAGFSAIIGRIPAQGILPYE

SEQ ID NO: 62457 - DNA, 429 bp, Unknown
  Obtained from environmental sample
  misc_feature (1)..(429): n is a, c, g, or t
ttgccgagagggtatgcttatgggcggcgcgaatctcttggtcaaggcgccgtggtggtagccacgaacttcggtatgagcaaagcggtcataggcctcacgatagtggctttcggcacaagcctgccggaacttgccacatcggtggtggccgccgtcagaaaacacaacgacatcgcgataggcaatgtggtaggctcaaacttattcaatattctatgtatcctaggcgtagtaggagctatgggtacggccggcgacgacgacgcgcgcggagtaaagtttatcgacctgatgttcatgtcgctgataaatttcgtcctattggcgccgctgatagccaaaaacgtattgaacagatggataggcggcttgctggcaggttcatacgttgcgtatatattgatactggcgttgcatatattttga

SEQ ID NO: 62458 - protein, 142 aa, Unknown
  Obtained from environmental sample
  DOMAIN (11)...(137): Sodium/calcium exchanger protein
  misc_feature (1)..(142): Xaa is any amino acid
MPRGYAYGRRESLGQGAVVVATNFGMSKAVIGLTIVAFGTSLPELATSVVAAVRKHNDIAIGNVVGSNLFNILCILGVVGAMGTAGDDDARGVKFIDLMFMSLINFVLLAPLIAKNVLNRWIGGLLAGSYVAYILILALHIF

SEQ ID NO: 62459 - DNA, 1458 bp, Unknown
  Obtained from environmental sample
  misc_feature (1)..(1458): n is a, c, g, or t
atgtatcctaggcgtagtaggagctatgggtacggccggcgacgacgacgcgcgcggagtaaagtttatcgacctgatgttcatgtcgctgataaatttcgtcctattggcgccgctgatagccaaaaacgtattgaacagatggataggcggcttgctggcaggttcatacgttgcgtatatattgatactggcgttgcatatattttgatattggagaccgttattctgatgataactaccgttttaggcacaagcgtaataacaaaaatcgtcttcgccctgggcatgttaatggtaataggcgactttgccgccacgctcttcacaatattataccagaagtctatatataagcgccgccgcgcctcgtacgaccccgcctacgctcctccgtgcaccgttgtggtaccctgcaaaggcgttcccaagaacttcggcgacaatctccgcggattcttgcagtttgactatcctgactacgaagttatatatgtgaccgagagttcggacgacgccgccgtgccggagattaaaaagatactctcggaagacggccgcgtcaagtttgccgtggcgggcttgtctgcgcggtgcgcgcagaagaaactacacatgcttgcggcgctgcgcgaggcgcgtcccgactccgaggtcttcgttttcgcagactccgacatcaaacccggcgctagttggcttagggagatcgtgctaccgctgcagagcgataacgtctccgtaaccacaggcttccgctggctctttccggccaaaggcacgataggggagctatgccacgcctacgtcaacatattcatctacacctgcttctgcacggcaagctacatcggcggcgtgggcttgtggggcggcacaatggccatcaggcggaaggactacgtggatctgggcgtggaaaaggcgtggagccgcgccgcggtggacgacatgagcctctccaccctcgtgctcaaaaacaaacgcaaagccgtggtggtcgccgactgcatcacgacgaccgacgacctcatctccacggttggcgcgaccgtctcgtggttcgagcgccagattatgtaccttaagtcctaccagcgggcgctgtgggtctttccggcgttgcctatggggctgcttgtcggttggctcatgctgctattgccttacgcggcggtcgcgccgttcgttatggcggagcctacgacgttcttggaacagggtggcggcgcgtcgctgatattcatactcggccacaccgccgtggccatgctgtatcccgccttgggaaagatgccgtttttctggcgttttttgctctttcaaccggtgcttagactggcgcagatggtgtcgtattttaaaacgtggacgacgcggactataacatgggcgggggtaaagtacaagctggacttttggggtgacgttcgggagatcgacagggggggcggctga

SEQ ID NO: 62460 - protein, 485 aa, Unknown
  Obtained from environmental sample
  DOMAIN (134)...(305): Glycosyl transferase family 2
  misc_feature (1)..(485): Xaa is any amino acid
MYPRRSRSYGYGRRRRRARSKVYRPDVHVADKFRPIGAADSQKRIEQMDRRLAGRFIRCVYIDTGVAYILILETVILMITTVLGTSVITKIVFALGMLMVIGDFAATLFTILYQKSIYKRRRASYDPAYAPPCTVVVPCKGVPKNFGDNLRGFLQFDYPDYEVIYVTESSDDAAVPEIKKILSEDGRVKFAVAGLSARCAQKKLHMLAALREARPDSEVFVFADSDIKPGASWLREIVLPLQSDNVSVTTGFRWLFPAKGTIGELCHAYVNIFIYTCFCTASYIGGVGLWGGTMAIRRKDYVDLGVEKAWSRAAVDDMSLSTLVLKNKRKAVVVADCITTTDDLISTVGATVSWFERQIMYLKSYQRALWVFPALPMGLLVGWLMLLLPYAAVAPFVMAEPTTFLEQGGGASLIFILGHTAVAMLYPALGKMPFFWRFLLFQPVLRLAQMVSYFKTWTTRTITWAGVKYKLDFWGDVREIDRGGG

SEQ ID NO: 62461 - DNA, 576 bp, Unknown
  Obtained from environmental sample
  misc_feature (1)..(576): n is a, c, g, or t
ttgctggaccgcaagttctccgggaaactcgaccgcgtcgactttgtattgatggtgggtaacaacagcaaagccgccgcgttcgacagggcgcggtcgcacggcatccccgctctgcacatagccccgtcgcacttcccaaacgaggagtcntacgccgaacgcctgttgtcagcccttaaagaggccggagttgaactgatagtcctagccggatacatgaaaaaactgccgcccgccatagtgggccaataccgcaaccgcataatgaacatccaccccgccctcctcccggccttcggcggcaaaggcatgtacgggtcaaacgtccacaaggcggtgatagattacggcgccaaaatctccggcgtaacggtccacttcgtagacgacgaatacgaccacggccctataatcatgcaaaaagttgtccccgtgctggataccgacgacgaccaaaccttagccgcccgtgttttagaagccgaacacgaatactactggcgggcagttgaagccgttgcggaggggaagataaagatagttggaagacgggttgtatgggataaggattga

SEQ ID NO: 62462 - protein, 191 aa, Unknown
  Obtained from environmental sample
  DOMAIN (1)...(171): Formyl transferase
  misc_feature (1)..(191): Xaa is any amino acid
MLDRKFSGKLDRVDFVLMVGNNSKAAAFDRARSHGIPALHIAPSHFPNEESYAERLLSALKEAGVELIVLAGYMKKLPPAIVGQYRNRIMNIHPALLPAFGGKGMYGSNVHKAVIDYGAKISGVTVHFVDDEYDHGPIIMQKVVPVLDTDDDQTLAARVLEAEHEYYWRAVEAVAEGKIKIVGRRVVWDKD

SEQ ID NO: 62463 - DNA, 1131 bp, Unknown
  Obtained from environmental sample
  misc_feature (1)..(1131): n is a, c, g, or t
atggaaggcgcagccttccgtctaaaaaagaatttaaagaatttgactttaatttctttgaccttgatttttattatgcaaaacctaaaagacctaacattaccgcaactcgaggaattcgccctctccctaggcgaacagcgcttccgcgccaagcaaatcttcaagtggatgtaccaaaagcgcctccccggcttctccgaaatgaccaacatgcccaaaaccctgcgcgccgccctctccgaccgcgcctccgtcgccaagctcccacccgtccgcgctctggaatccgccgccggcgacgccgtgaaattcgcttttgccctcaatgacccggacacctactacgccgtcgagagcgtcctcctcatagacggcgagcgccgcaccgcctgcctctcctcgcaactcggctgcggtctgggttgcgcattctgcgagacggcgaagctgggcttcatacgcaatttgtcgccgtcagagatattggggcaactcatcgggatgaacgactatcaggccgcccgcggcgacaagattgtgaccaatatcgtcttcatgggcatgggcgaggcccttagcaactacgaaaactttatggccgccttgtccataatcatgcacgaggacgctttcaatttgggcgcaaggcggatcaccgtctccacggcgggcgtcgtgccgcacatagagaggctaatgggcgagggcttgtcgattggtttggccatatcgctcaacgcgtggaacgacgagatgcgcggcgaactcatgccggtcaataggaagtacccgatagcgagtttggtcgacgcggccaagcgctactacaaccggacgggccggcgggtcaccttcgagtacgtgctcatagagggcaagacggacacagcggaggcggcggaggcgctttccaggcttttaggcggtttcccgtgcaaagtaaacctgataccggtgaacccggtcgattccaagatgtcggcgccctgcgacggagccgttcagaaattcgcggacgaactttatgggcggggtctggcggcgacggttaggaagagccgcggacgggacgttttcggggcttgcgggcagttgacggcggagttgatagggtcaaaacgccgctaa

SEQ ID NO: 62464 - protein, 376 aa, Unknown
  Obtained from environmental sample
  DOMAIN (133)...(307): Radical SAM superfamily
  misc_feature (1)..(376): Xaa is any amino acid
MEGAAFRLKKNLKNLTLISLTLIFIMQNLKDLTLPQLEEFALSLGEQRFRAKQIFKWMYQKRLPGFSEMTNMPKTLRAALSDRASVAKLPPVRALESAAGDAVKFAFALNDPDTYYAVESVLLIDGERRTACLSSQLGCGLGCAFCETAKLGFIRNLSPSEILGQLIGMNDYQAARGDKIVTNIVFMGMGEALSNYENFMAALSIIMHEDAFNLGARRITVSTAGVVPHIERLMGEGLSIGLAISLNAWNDEMRGELMPVNRKYPIASLVDAAKRYYNRTGRRVTFEYVLIEGKTDTAEAAEALSRLLGGFPCKVNLIPVNPVDSKMSAPCDGAVQKFADELYGRGLAATVRKSRGRDVFGACGQLTAELIGSKRR

SEQ ID NO: 62465 - DNA, 879 bp, Unknown
  Obtained from environmental sample
  misc_feature (1)..(879): n is a, c, g, or t
gtgtaccggcgcaaatccccggtatcccctgatcgaggaaatcaaacagatgtatctcagcgcttactatggcaagaatattcatctgggcggttccaaaggaaagaaggagcgggcgtaatgggtaactacaaactggacaaaataattgccgttcggacggcgaagacaatctaccgcgaaggggacaaagtaattaaactattgggcgatgaataccttgcgccggacgtgctttccgaggcgcacaaccttgccgccgtggaagagaccgccttaaaggttcctaaattggtagaggtaacaaaaatcaacggcaaatgggccatcgtttgggaatatgtcgaaggaaccagccttgaccggctcatggacaaaaacaaggacaaggtaccgcagtatcttgaacgctttgttgacattcagattgatatgcaccgctatagtgcgacaaggcttcctctgcttgccgaaaagatggatcgtaagataaaagcctccggtcttgatgccaccacccgctatgagcttttgggaaggctggcagggatgcccaaacacaccaagctttgccacggcgactttaaccccagcaacgtcataatcaacgataaagacgaggcgtacatcatcgactggtcccacgccgcccagggtaacgcctcggcggacgctgcacaaacctatctgctgttctggcttgcgggtaacatcactctggcggaaaagtaccttgcgttgttctgcgaaaaaagcgacacagcgaaacagtacgttgaaaagtggctttccattgtggcggcttctcagcttcccaaggctaagccggaagaaaaagaatttttgctgcattgggccaatgtagtggaatacgagtaa

SEQ ID NO: 62466 - protein, 292 aa, Unknown
  Obtained from environmental sample
  DOMAIN (48)...(228): RIO1 family
  misc_feature (1)..(292): Xaa is any amino acid
MYRRKSPVSPDRGNQTDVSQRLLWQEYSSGRFQRKEGAGVMGNYKLDKIIAVRTAKTIYREGDKVIKLLGDEYLAPDVLSEAHNLAAVEETALKVPKLVEVTKINGKWAIVWEYVEGTSLDRLMDKNKDKVPQYLERFVDIQIDMHRYSATRLPLLAEKMDRKIKASGLDATTRYELLGRLAGMPKHTKLCHGDFNPSNVIINDKDEAYIIDWSHAAQGNASADAAQTYLLFWLAGNITLAEKYLALFCEKSDTAKQYVEKWLSIVAASQLPKAKPEEKEFLLHWANVVEYE

SEQ ID NO: 62467 - DNA, 1566 bp, Unknown
  Obtained from environmental sample
  misc_feature (1)..(1566): n is a, c, g, or t
gtgnnnnncgattatcgccgacggccgagaacggcgagcgtataccttgaccctcaaaagtgcgcggacaaacttgccgcctttagcgcccgcatgaagacctgccgcattgtgctaaatacgccatcggcgcacggaggcatcggcgacctgtacaacttccgcctgaagccctcgctcaccctgggctgcggtagttggggcggcaattcggtttcggagaacgttggcgtcaaacatcttttaaatatcaaaacattggcggcaaggagggaaaatatgctgtggttccgcgctcccgaaaaggtatatatcaaacgaggatgcctccccgtggctctggacgagcttaaaaacgtgatgggaaaaaagcgggctttcatcgttaccgataccttcctctaccaaaacggctataccaaatgcatcaccgacaagctggacagcatgggcattgtccatgaaaccttctttgacgtcgctcccgacccgaccttgggctgtgccaagagaggtgcggcattggtagccgctttcaagcccgatgtgatcatcgcgctgggcggcggctcggcaatggacgcgggcaaaataatgtgggtgctctacgaacacccggaagcggattttgaggatatggccatgcgctttgccgacatccgcaagcgggtctacaccttcccaaaaatgggagaaaaagcttactttatcgcgataccgacctccgccggaacgggcagcgaggtaacgccgtttgccgtcatcaccgacgaaaccaagggcatgaagtacccgcttgcggattaccaactgatgcctaaaatggcgattgttgacgcggacatgcagatgaacgcgcccaaggggcttaccagcgcatccggcattgacgccctgacccacgccctggaagcctatgcttcggtcatggccacagacttcaccgacggcctcgcgatacaggccatcaaaatggtttttgaatggctgcccaaggcttacaacgaaggcgccgcgaatcctgtagcgcgggaaagaatggccaacgccgctaccatagcgggcatggcctttgccaacgctttcctcggcgtctgccactcgatggcgcacaaactcggcgcgttccaccacataccccacggcgtcgccaacgccctgatgatcagcgaagtgctccgctacaacgccgtcgaggttccgcccaagatgggaaccttcccccaatacgatcatcccaagaccctttcccgttacgcggaaattgcggacgccatggatttcgccggcaaaaacgacgaggaaaaacttgaaagcttgatcgccgccgtggaatggcttaaagatcagatagggatcaagaagaccatcaaggattacaacattgatgaaaaagattttcttgcccgccttgatgaaatgagcgaacaggcttttgacgatcagtgtaccggcgcaaatccccggtatcccctgatcgaggaaatcaaacagatgtatctcagcgcttactatggcaagaatattcatctgggcggttccaaaggaaagaaggagcgggcgtaa

SEQ ID NO: 62468 - protein, 521 aa, Unknown
  Obtained from environmental sample
  DOMAIN (100)...(496): Iron-containing alcohol dehydrogenase
  misc_feature (1)..(521): Xaa is any amino acid
MXXDYRRRPRTASVYLDPQKCADKLAAFSARMKTCRIVLNTPSAHGGIGDLYNFRLKPSLTLGCGSWGGNSVSENVGVKHLLNIKTLAARRENMLWFRAPEKVYIKRGCLPVALDELKNVMGKKRAFIVTDTFLYQNGYTKCITDKLDSMGIVHETFFDVAPDPTLGCAKRGAALVAAFKPDVIIALGGGSAMDAGKIMWVLYEHPEADFEDMAMRFADIRKRVYTFPKMGEKAYFIAIPTSAGTGSEVTPFAVITDETKGMKYPLADYQLMPKMAIVDADMQMNAPKGLTSASGIDALTHALEAYASVMATDFTDGLAIQAIKMVFEWLPKAYNEGAANPVARERMANAATIAGMAFANAFLGVCHSMAHKLGAFHHIPHGVANALMISEVLRYNAVEVPPKMGTFPQYDHPKTLSRYAEIADAMDFAGKNDEEKLESLIAAVEWLKDQIGIKKTIKDYNIDEKDFLARLDEMSEQAFDDQCTGANPRYPLIEEIKQMYLSAYYGKNIHLGGSKGKKERA

SEQ ID NO: 62469 - DNA, 1206 bp, Unknown
  Obtained from environmental sample
  misc_feature (1)..(1206): n is a, c, g, or t
ttgcagtaccgtatcgataaaaagacgggaaataaattatcggttcttggtttcggctgtatgcgttttccgcataaactcggaatgacggacatgcacaaaaccgaagaacttgtgatgcacgcaattgaaaaaggcgtaaattattttgacaccgcatggatttaccccggcaatgaagaagcgttaggcgcagtattaagccgaaataacgcgcgaaacaagatttatattgcgaccaaactgccgattcttttgctcaatccttcccgcgatagcaaaattgattttgacaaatatttaaatcaatctcttgaaaggctaaaaacggattatattgattattatttaatgcacatgataaccgacatggatcagtggaaaaaactgagggatgccggaattgaaagctggttagcgcagaaaaagcaaacagggcagataaaacacataggtttttcttttcatggatcggtgagcgaatacttaaaaattttaggcgcttatgactgggaactctccctaatacaatacaattattttgatgaaaattatcaggcgggcgttatggggcttaaagccgccgccgcaagaatgcccgttgtaatcatggaaccgcttctcggcggaaaacttgcgacaggactgccgaaagacgccgttaaaattttcaaaaacgccgatgaaaatttaacgcccgcaggctgggcgcttaactggctatggaatcagaaggaagtaactgcgattatttccggcatgaacgcaaaagaacaactggaagaaaatatctcccttgccgaaaaatcttccgccggaatgttagacgacaataaattagcagtttacaaatcggcgcttgatgttataaaacgttcctgcaaagtacgctgtacaggctgtaattactgtatgccgtgtcccgcaggcgtaaatattcccggttctttctcggcgtataataccgtgtattcaatgggctactatgagggaataaaacaatacgccatgagtacgggaatgacgcaggaaaagagtagcagtccgcgtctgtgcgtaaaatgcggcaaatgcgaatcgcactgtccgcagagcattcagattatgaaagagcttgacgaggttaagaagaaaatggagtcgcctgttatcagatttatcggctattgcgcgcgggctgttgtggggaataaaaggaagaagtga

SEQ ID NO: 62470 - protein, 401 aa, Unknown
  Obtained from environmental sample
  DOMAIN (345)...(368): 4Fe-4S binding domain
  misc_feature (1)..(401): Xaa is any amino acid
MQYRIDKKTGNKLSVLGFGCMRFPHKLGMTDMHKTEELVMHAIEKGVNYFDTAWIYPGNEEALGAVLSRNNARNKIYIATKLPILLLNPSRDSKIDFDKYLNQSLERLKTDYIDYYLMHMITDMDQWKKLRDAGIESWLAQKKQTGQIKHIGFSFHGSVSEYLKILGAYDWELSLIQYNYFDENYQAGVMGLKAAAARMPVVIMEPLLGGKLATGLPKDAVKIFKNADENLTPAGWALNWLWNQKEVTAIISGMNAKEQLEENISLAEKSSAGMLDDNKLAVYKSALDVIKRSCKVRCTGCNYCMPCPAGVNIPGSFSAYNTVYSMGYYEGIKQYAMSTGMTQEKSSSPRLCVKCGKCESHCPQSIQIMKELDEVKKKMESPVIRFIGYCARAVVGNKRKK

SEQ ID NO: 62471 - DNA, 948 bp, Unknown
  Obtained from environmental sample
  misc_feature (1)..(948): n is a, c, g, or t
atgatcgcgagcttgnggagaattgacgagcagaggggcgttgaaaggcgtatcaccgacatccagcaactggaaaaacagcccaggataattattgttgacgaagaggaaaaccaggttgcatcctacttcctgcccggaggagcgattttacaggttgatgaaggcgaaaagataagggccgggcgtaccatcgcaaaaacccttaaagaatcgatccaggcaatggacattacatcgggtcttccaagggtaaacgagctctttgaagcccgcaagcccaaaagccccgcagttttggcggaagtttctggcgttgtccgctttaaaaacattgtaaaaggcaaacgggttatcattgttgaagacgcgttcggaaaggaatataaacaccttatacctatgaccaaacggcttttggtgcgcgatggcgacagcattgaagccggtgaacccctctgcatgggcgcaatcaatccgcatgacatcctccacatacttggcgaatcaaaccttcagcgctatctgatgaatgaaatcaagcaggtttacaactatcagggcgtgtctataaatgacaagcatgtcggcgtgattatccgccagatgatgaggaaggttgaaattttgcgtgttggggataccaggtttatttacggccagctggtcgataaatacgcctttaaggaagaaaacaaccgtgtcattgacgaaggcggacagcccgccgttgcccggcccgtgttccaggggatctccaaagcggctttaaatattgattctttcctttccgccgcaagtttccaggaaacaaccagggttcttaccaatgcggcaattgccggttccaccgactacctccggggcttaaaagaaaacatcattatcggtcatcccattcccgcagggaactggcatgaagcgttatcacaatgtaaaactctttga

SEQ ID NO: 62472 - protein, 315 aa, Unknown
  Obtained from environmental sample
  DOMAIN (32)...(265): RNA polymerase Rpb1, domain 5
  misc_feature (1)..(315): Xaa is any amino acid
MIASLXRIDEQRGVERRITDIQQLEKQPRIIIVDEEENQVASYFLPGGAILQVDEGEKIRAGRTIAKTLKESIQAMDITSGLPRVNELFEARKPKSPAVLAEVSGVVRFKNIVKGKRVIIVEDAFGKEYKHLIPMTKRLLVRDGDSIEAGEPLCMGAINPHDILHILGESNLQRYLMNEIKQVYNYQGVSINDKHVGVIIRQMMRKVEILRVGDTRFIYGQLVDKYAFKEENNRVIDEGGQPAVARPVFQGISKAALNIDSFLSAASFQETTRVLTNAAIAGSTDYLRGLKENIIIGHPIPAGNWHEALSQCKTL

SEQ ID NO: 62473 - DNA, 453 bp, Unknown
  Obtained from environmental sample
  misc_feature (1)..(453): n is a, c, g, or t
atgaaagaaattgttattctatcaatgtatctttccgaattgtttaatagcttaaatacaatgcccgtgtatttgaacgaattaatacgcccgttaatttcaacaacgggttttgttataacaaatggcggtaatgccggctgtgtcgtagttggcggctgtgtctcgccaggctgcgttgtagtcggttgtttcgtagttggctgtgtcgcagtcggctgtgtaacagtcggctgcgttgcatttggctgtgtagttactggttgtgtcatggtaggttgcgttgtagccggttgtgtcgccggctgcgtaatggtcggctgtgtcatacccggtaaatcagcgacaatccaacctggattctcgcaagccataaatagaagaaccaataaaaacaatgggtttttagtagttcccggtaccgttttactttgtttaactttcattctgtaa

SEQ ID NO: 62474 - protein, 150 aa, Unknown
  Obtained from environmental sample
  misc_feature (1)..(150): Xaa is any amino acid
MKEIVILSMYLSELFNSLNTMPVYLNELIRPLISTTGFVITNGGNAGCVVVGGCVSPGCVVVGCFVVGCVAVGCVTVGCVAFGCVVTGCVMVGCVVAGCVAGCVMVGCVIPGKSATIQPGFSQAINRRTNKNNGFLVVPGTVLLCLTFIL

SEQ ID NO: 62475 - DNA, 684 bp, Unknown
  Obtained from environmental sample
  misc_feature (1)..(684): n is a, c, g, or t
atgaaagttaaacaaagtaaaacggtaccgggaactactaaaaacccattgtttttattggttcttctatttatggcttgcgagaatccaggttggattgtcgctgatttaccgggtatgacacagccgaccattacgcagccggcgacacaaccggctacaacgcaacctaccatgacacaaccagtaactacacagccaaatgcaacgcagccgactgttacacagccgactgcgacacagccaactacgaaacaaccgactacaacgcagcctggcgagacacagccgccaactacgacacagccggcattaccgccatttgttataacaaaacccgttgttgaaattaacgggcgtattaattcgttcaaatacacgggcattgtatttaagctattaaacaattcggaaagatacattgatagaataacaatttctttcatgctttttgacgcgaaaagtcagacaagcccatttacaggcagcaacaagtttgaaataacaaaacacgattttcttgctcccggggaaaacaaggaaataagcatttcccttgatcaatatatttatgttgctccggctgaaccgtatttaattgattttttctatatctcggaaatacattacattgacaacgctgtatggagggatccatacggagtatacagggtgaggtggtaa

SEQ ID NO: 62476 - protein, 227 aa, Unknown
  Obtained from environmental sample
  SIGNAL (1)...(26)
  misc_feature (1)..(227): Xaa is any amino acid
MKVKQSKTVPGTTKNPLFLLVLLFMACENPGWIVADLPGMTQPTITQPATQPATTQPTMTQPVTTQPNATQPTVTQPTATQPTTKQPTTTQPGETQPPTTTQPALPPFVITKPVVEINGRINSFKYTGIVFKLLNNSERYIDRITISFMLFDAKSQTSPFTGSNKFEITKHDFLAPGENKEISISLDQYIYVAPAEPYLIDFFYISEIHYIDNAVWRDPYGVYRVRW

SEQ ID NO: 62477 - DNA, 795 bp, Unknown
  Obtained from environmental sample
  misc_feature (1)..(795): n is a, c, g, or t
ttgcctaggaaaaaaggggcatcgctctattatcgagggcatagtaacgtcgattatgttttagagccttcgttgtttagaaaaaataataatattaagaatgaacatttaatgtttaaagaatttcttaaagagaaacctgaactattttctgaagacaaatcaacgttagaaaaattagtaaaaatgcagcattttggattatcaacacgtttattagacatcacacaaaatccattaatagctatttattttgcatgcgtgtctcatgataataaaactgcctctaaaaaagatggtgaaattgttattctgtctattgatggtcgattaatgaaatacaatgatagcgatactgtgttgatccttagtaatttatgtaaattaaaaccttctgaaaaaatatttgatacaaatctttcacgagaagattttaataatacaaataatgttcaaaaacttctttgggaaattaagcgtgaaaaacaaattttttatgatattattaatccaaagcatattaatagtattattcctgtcaaggtggcaaaaaacaatgaacgtatacaaatacaaaatggattgtttttattatttggtatgggaaaagataatgaaaaactgacaataaactcagactggattgtaaaaacaaaaaaaaacgaacgtctcattattgacgcaaagtcaaaagaaaaaatacgtaatcagttggaagaaataaatatatctcaaaagacactatttccaggactagagagtactgcacgatatattaagagaatttattcttaa

SEQ ID NO: 62478 - protein, 264 aa, Unknown
  Obtained from environmental sample
  misc_feature (1)..(264): Xaa is any amino acid
MPRKKGASLYYRGHSNVDYVLEPSLFRKNNNIKNEHLMFKEFLKEKPELFSEDKSTLEKLVKMQHFGLSTRLLDITQNPLIAIYFACVSHDNKTASKKDGEIVILSIDGRLMKYNDSDTVLILSNLCKLKPSEKIFDTNLSREDFNNTNNVQKLLWEIKREKQIFYDIINPKHINSIIPVKVAKNNERIQIQNGLFLLFGMGKDNEKLTINSDWIVKTKKNERLIIDAKSKEKIRNQLEEINISQKTLFPGLESTARYIKRIYS

SEQ ID NO: 62479 - DNA, 1014 bp, Unknown
  Obtained from environmental sample
  misc_feature (1)..(1014): n is a, c, g, or t
atgagtgaagttacatataacaacgaacatacggaaaattggggaaatatatcccgtaattatcacaaaaagaaaaaagcgctggaaatttcatttaaaatttgccgcgcggtgcttctttttggaatgtgctttttaattattcagccgctgcttgataaattaagcgtcagcttcatggcagaacaggatttgtatgacagtacggtaatcagtatcccgcgaaactttacgacaaataattacagaacagcaagtcaattattggttttttggaaatctctttatgaaactgttggtatagtaacaataagttccgtacttcagatttcggcttgtacccttgcggcttatggttttgcccgttataaatttcctcttaagggcttttggtttttctgtgtaatgcttattatcgttattccgcctcatacaattatggcgtcgctgtatttgaattttcactttttcgatatattaggaatattccgcgctgttacgggcggtcctgttaatttattaaacagcgtttttgggttttggctgctttccgctacaggtatggggcttaagagcggattatatatttttatgttaagacagtactttagaggcatgccgaaagaattggaagaagcggcatgggtagacgggtgcggcaaattcagaacatttatccaaattatgattccggacgcaagcccgatgcttacctcatgtttccttttttcctttgtgtggcaatggacggattcgttctattcgacattgtttttaaataactacagaatgttgtccagcggacttggttcgatagccgaacgggttgttcaatggtggtcggcgattaattcggtaagcggagccggtgtagcgtcaacagcgccggttggcgttgttcagacaatgatagcgacaggtatgcttatgtgtcttgcgccgttaattattctgtatttgatagcgcaaagggcgtttgtcgaatcgttaagtcaaacgggaataaagatgtaa

SEQ ID NO: 62480 - protein, 337 aa, Unknown
  Obtained from environmental sample
  DOMAIN (91)...(332): Binding-protein-dependent transport system inner membrane component
  misc_feature (1)..(337): Xaa is any amino acid
MSEVTYNNEHTENWGNISRNYHKKKKALEISFKICRAVLLFGMCFLIIQPLLDKLSVSFMAEQDLYDSTVISIPRNFTTNNYRTASQLLVFWKSLYETVGIVTISSVLQISACTLAAYGFARYKFPLKGFWFFCVMLIIVIPPHTIMASLYLNFHFFDILGIFRAVTGGPVNLLNSVFGFWLLSATGMGLKSGLYIFMLRQYFRGMPKELEEAAWVDGCGKFRTFIQIMIPDASPMLTSCFLFSFVWQWTDSFYSTLFLNNYRMLSSGLGSIAERVVQWWSAINSVSGAGVASTAPVGVVQTMIATGMLMCLAPLIILYLIAQRAFVESLSQTGIKM

SEQ ID NO: 62481 - DNA, 1047 bp, Unknown
  Obtained from environmental sample
  misc_feature (1)..(1047): n is a, c, g, or t
atgaagacggaacaagagtcgttgttaacgcaagcgataatgactttatatttaacggtaataatcttagcgctgacacatatactgtgcttagaaaaggtcaataaggcagggggaataatgtattttatcaaaagaggcgataaattatcactgacgcttgaaggcaaaaatgcaattaccggatatatatttttacttccgtttttaatcggattttttgcttttatgttttttcccattgtggaatctcttcagatggtattcagcaatgtaaaaatagacgtagaaaagcagggattttccatggaaaatatcggcttggaaaatattatccgcgttgtcgctgtcgatcctgaatttaacagattccttgctgaagaaatcgcgcgtatggttttaattgttcccgcgattattattttcagtttgtttgtcgctcttattttgaatcaggaatttaaagcaagaggttttgttcgcgccgtcttctttctgcctgtaattctttcatcgggtgttatgataggattggaaacaaacaattcgcttttaaacagtatggcggacattattaaagaaggcaatttaatgaagtcgtccgtaacaaaagtgcttgaagatattttagtctcggaaggcgcggcaagcgattttatgggttatatattccgcattattaatcagatttatgctatcgctatggcttcaggtattcagataattatcttcctgtccgcgctgcagacaattccgccaagtatgtttgaggcggcgaaaatagaaggcgctaccgcatgggaatgtttctggaaaattacatttcccatggtaagctccttaattcttgttaacatagtttacagcgttgtagattattttatcagaacagataaccgtgttatggaaaaaataaatcttaccacaataagaatgatgaatttcgggtttggaacggcaatggcatgggtttacttccttgctgtaatttctattattggaattgcgatggctataatttccaagagggtatactattatgagtga

SEQ ID NO: 62482 - protein, 348 aa, Unknown
  Obtained from environmental sample
  misc_feature (1)..(348): Xaa is any amino acid
MKTEQESLLTQAIMTLYLTVIILALTHILCLEKVNKAGGIMYFIKRGDKLSLTLEGKNAITGYIFLLPFLIGFFAFMFFPIVESLQMVFSNVKIDVEKQGFSMENIGLENIIRVVAVDPEFNRFLAEEIARMVLIVPAIIIFSLFVALILNQEFKARGFVRAVFFLPVILSSGVMIGLETNNSLLNSMADIIKEGNLMKSSVTKVLEDILVSEGAASDFMGYIFRIINQIYAIAMASGIQIIIFLSALQTIPPSMFEAAKIEGATAWECFWKITFPMVSSLILVNIVYSVVDYFIRTDNRVMEKINLTTIRMMNFGFGTAMAWVYFLAVISIIGIAMAIISKRVYYYE

SEQ ID NO: 62483 - DNA, 1158 bp, Unknown
  Obtained from environmental sample
  misc_feature (1)..(1158): n is a, c, g, or t
gtggaaaattataggcgctggttaataaaacacaacaccgctcttggacttccttttgatcttcctttaaaacttacttcatataaagaaacggaaaaaatgattaaagattttgccggtcttggctggaaaaatgtacatgtaaaattaaacggctggtttaatcgcagcgtagatcatacagtgccgacaaaaatcaaattaattaacgcgcttggcagtaaaaatgattttgagcatattatcagtacggcggaacaaaataattttattgtttatcctgaaattgattttatgtttatgagagatgtaaaagcgttcagcggattcaatctttacagcgacgccgcccgttatgtgaatcgcgagcgcgtacagcgttatccgtacagttttgtctggttcggcgaacgtaaattgtggggaaaacttaattatcttgcccgccccgccgcgactcaaagaatgatagataattatcagaagcatgcaaaaagctataagattaataacatcgcttttagaaatatgggttcaaaacttgcgggagattatcacgaaagacggcatgtaagccgcgaggcgtcaatattgatgcggcaaaaaaagtttgaagaaatgtataaggcggataataaaatacttgtaaacgcgggatttgcttacgcggctccctggactaatattattacggatatgattattacagagcatagcttcggcattacggatacttcagtgcctttcctgccgattgttcttcatggaattgtgccttatgcgggaaaagccataaatctggcggaagattacactaaaaatcttttaaagaccgttgaaagcggagcgggactttattttagctttatggaagaagaaaccgctgaattgcaggaaaccaagttcaggcaattctatgccaatgaatacaaaaaatgggtaggggacgcggataagctttacaaaaaatttaacgctgatttcgggcatctctataatcagcggattgtgaatcatacgatattggcgcccgatgtaacagttaccgaatatgaagacggaacaagagtcgttgttaacgcaagcgataatgactttatatttaacggtaataatcttagcgctgacacatatactgtgcttagaaaaggtcaataa

SEQ ID NO: 62484 - protein, 385 aa, Unknown
  Obtained from environmental sample
  misc_feature (1)..(385): Xaa is any amino acid
MENYRRWLIKHNTALGLPFDLPLKLTSYKETEKMIKDFAGLGWKNVHVKLNGWFNRSVDHTVPTKIKLINALGSKNDFEHIISTAEQNNFIVYPEIDFMFMRDVKAFSGFNLYSDAARYVNRERVQRYPYSFVWFGERKLWGKLNYLARPAATQRMIDNYQKHAKSYKINNIAFRNMGSKLAGDYHERRHVSREASILMRQKKFEEMYKADNKILVNAGFAYAAPWTNIITDMIITEHSFGITDTSVPFLPIVLHGIVPYAGKAINLAEDYTKNLLKTVESGAGLYFSFMEEETAELQETKFRQFYANEYKKWVGDADKLYKKFNADFGHLYNQRIVNHTILAPDVTVTEYEDGTRVVVNASDNDFIFNGNNLSADTYTVLRKGQ

SEQ ID NO: 62485 - DNA, 363 bp, Unknown
  Obtained from environmental sample
  misc_feature (1)..(363): n is a, c, g, or t
atggaaccgcagaacaaaccaatttgccgcttccagcgggaagcgcagacgcttcaggctatgagtaaagaccggggcctttctctgtattggctggaattctacaagaaattttccatgccattcggggctttttcattcatattccttgcggttgcgctgggactgatggcaaaaagaagcggccagaccgtaggttttatctttgggcttatcatttcggtaatctactgggcgctgcttcttggcgggcagaccatgggaataaggctgaacacatccccattctggtcaatgtggctgccaaatattctcgcgttgtcgatcgggcttgtccttaccgttatcaaggtaacaagatga

SEQ ID NO: 62486 - protein, 120 aa, Unknown
  Obtained from environmental sample
  misc_feature (1)..(120): Xaa is any amino acid
MEPQNKPICRFQREAQTLQAMSKDRGLSLYWLEFYKKFSMPFGAFSFIFLAVALGLMAKRSGQTVGFIFGLIISVIYWALLLGGQTMGIRLNTSPFWSMWLPNILALSIGLVLTVIKVTR

SEQ ID NO: 62487 - DNA, 846 bp, Unknown
  Obtained from environmental sample
  misc_feature (1)..(846): n is a, c, g, or t
atggcccaggagattttagccaaacaggttccctttggacaggttgctcttctggttcttttttccctgccgcaggttatcgccctgtccgcccctttcgcttcccttgtcggtactttgatgaccgtaggacggctttcaagcgacaatgaaattctggtgtttctgtcatccgggctttctttcaggaacgtgtttgtgccggcaataaccgtaggcattgttatttccattctttcttttatcgccaatgacatactgatgccgggcggttatgtgaaatttgcccagttgtacaggcgcatacttctttccaccccggcgctggaactggaggcgaattcggtaaaaaaattcaagaatacggtaatagtcacgggtaacgtgtcaggcaacgccattgacaacgtactgatattggacaagaccagcgacggcgagcgccgcgttataatggcagctaacgccgaattaaaagactcaggcaaggacggccttagccttgatcttggcagggcttttatgcagtcatcaaaggaaaatgcccgcgaggattatgactacgcgtccgccgggtattttcgctactgggttccgcaggaggatcttatacaggccatgtcctcggtaagcccccgtgagatgagttccattgacgtgtataaggagataaaaaaaagaactattgatcttaacaaacgcatgaatgagaaacggaacaaggtttcttccctggcctttatctttgagaacagtctgcgcgccggcccctcttcctctgaatggaaccgcagaacaaaccaatttgccgcttccagcgggaagcgcagacgcttcaggctatga

SEQ ID NO: 62488 - protein, 281 aa, Unknown
  Obtained from environmental sample
  DOMAIN (1)...(280): Predicted permease YjgP/YjgQ family
  misc_feature (1)..(281): Xaa is any amino acid
MAQEILAKQVPFGQVALLVLFSLPQVIALSAPFASLVGTLMTVGRLSSDNEILVFLSSGLSFRNVFVPAITVGIVISILSFIANDILMPGGYVKFAQLYRRILLSTPALELEANSVKKFKNTVIVTGNVSGNAIDNVLILDKTSDGERRVIMAANAELKDSGKDGLSLDLGRAFMQSSKENAREDYDYASAGYFRYWVPQEDLIQAMSSVSPREMSSIDVYKEIKKRTIDLNKRMNEKRNKVSSLAFIFENSLRAGPSSSEWNRRTNQFAASSGKRRRFRL

SEQ ID NO: 62489 - DNA, 918 bp, Unknown
  Obtained from environmental sample
  misc_feature (1)..(918): n is a, c, g, or t
ttgcgggggaacgctttcaatgctccacgccggagtgcctctgaaaaacccgtggcgggtatcgcgatggggcttatcacagaaaactcgccatcaggagataacggaaggcaggcaggggaccgttacccagtggtatctgacattttaggcgaggaagaccacctgggcgatatggactttaaggtcgccggcaccgaagacggcataaccggtttccagatggatattaaaatcgccggtgtcagcccggaaattatgcgtaaggccctggatcaggccaagcgcggcagaatgcacatcctttcgattatgaaccaaacgatcagccgtccggcggaagagatcagcgaatacgcgcccaagattgttaccctgcgtattgacatcgacaagataggcactcttataggtcccggcggtaagaacatcaaggccctgtgcgaacagtacagcgtaaagatcaacaccgaggatgacggcactgttacgattttcggcaaaaataccaaagacgcggaagaagccaaaatcgccgtcatgggcgttacctccgacccggaaatgggcagggtgtacaacggcacggtaaaacggattatggattttggcgcttttgtggagattctgcccggcagggaagggctggtgcatatcagcaaactttcacgccagcgcatagccaatgtcaccgacgtattaaaggaagggcaggagataccggtcaagcttaccgaaattgacaaaatgggcaggcttaacctttcgtatattgacgctatcgacccggatggcgccgattccggcgctacgggaggttccaatcgcggcagtggcgctcatagcggcggtcattccgaaaaccgccacgacagcaaagggtttaataaatccggcagggatcgcccccggcattaa

SEQ ID NO: 62490 - protein, 305 aa, Unknown
  Obtained from environmental sample
  DOMAIN (123)...(180): KH domain
  misc_feature (1)..(305): Xaa is any amino acid
MRGNAFNAPRRSASEKPVAGIAMGLITENSPSGDNGRQAGDRYPVVSDILGEEDHLGDMDFKVAGTEDGITGFQMDIKIAGVSPEIMRKALDQAKRGRMHILSIMNQTISRPAEEISEYAPKIVTLRIDIDKIGTLIGPGGKNIKALCEQYSVKINTEDDGTVTIFGKNTKDAEEAKIAVMGVTSDPEMGRVYNGTVKRIMDFGAFVEILPGREGLVHISKLSRQRIANVTDVLKEGQEIPVKLTEIDKMGRLNLSYIDAIDPDGADSGATGGSNRGSGAHSGGHSENRHDSKGFNKSGRDRPRH

SEQ ID NO: 62491 - DNA, 507 bp, Unknown
  Obtained from environmental sample
  misc_feature (1)..(507): n is a, c, g, or t
atgcaccagcccttccctgccgggcagaatctccacaaaagcgccaaaatccataatccgttttaccgtgccgttgtacaccctgcccatttccgggtcggaggtaacgcccatgacggcgattttggcttcttccgcgtctttggtatttttgccgaaaatcgtaacagtgccgtcatcctcggtgttgatctttacgctgtactgttcgcacagggccttgatgttcttaccgccgggacctataagagtgcctatcttgtcgatgtcaatacgcagggtaacaatcttgggcgcgtattcgctgatctcttccgccggacggctgatcgtttggttcataatcgaaaggatgtgcattctgccgcgcttggcctgatccagggccttacgcataatttccgggctgacaccggcgattttaatatccatctggaaaccggttatgccgtcttcggtgccggcgaccttaaagtccatatcgcccaggtggtcttcctcgcctaa

SEQ ID NO: 62492 - protein, 168 aa, Unknown
  Obtained from environmental sample
  misc_feature (1)..(168): Xaa is any amino acid
MHQPFPAGQNLHKSAKIHNPFYRAVVHPAHFRVGGNAHDGDFGFFRVFGIFAENRNSAVILGVDLYAVLFAQGLDVLTAGTYKSAYLVDVNTQGNNLGRVFADLFRRTADRLVHNRKDVHSAALGLIQGLTHNFRADTGDFNIHLETGYAVFGAGDLKVHIAQVVFLA

SEQ ID NO: 62493 - DNA, 945 bp, Unknown
  Obtained from environmental sample
  misc_feature (1)..(945): n is a, c, g, or t
atggcgagcggtcaaacacggcattacatggtcgagggcggggcaaaagaagtcagcgaagatctgatgatacaggccctggataaagcccataacatgatcatggagttatgcgcttttcaggaaaagctgcgcgaacttgcgggcaagcctaaactttcgctggctgtccccactcatgtccttgaaaacagcgacactatccgcgccaacgcttacccgagacttgagaaagcgtgtttccttgcgaccaagcaggaacgccatgatggcattaaggcgattcaaacggaatttgcggcgcagtacgcagcccagcttgaggacgaaaaacagaaaaaactcttcaacgcgttgtttgaggatatgcagtataacatcctccgttcatcaatacttaacaatggccgccgcgttgacgggcgtggaaccgaggacatacgcaatatcacctgcgaagtggacatactcgccagaactcacggatcggcgctctttacacgcggcgagactcaggctctggtggtaacaactctgggcacggtttttgacgagcaggtatatgatgacatcgaaggtgacaaacgggaaaattttatgctccattacaactttcctccatattcggtgggagaggtcggcagactgggaacaggccgccgcgagataggccacggcaacctggcccgccgttcgctggaagcagttgttccctcaaaagaagaattcccgtacacggtgcgggtggtctcggagataatggagtcaaacggctcctcgtcaatggcatctgtttgcgggggaacgctttcaatgctccacgccggagtgcctctgaaaaacccgtggcgggtatcgcgatggggcttatcacagaaaactcgccatcaggagataacggaaggcaggcaggggaccgttacccagtggtatctgacattttag

SEQ ID NO: 62494 - protein, 314 aa, Unknown
  Obtained from environmental sample
  DOMAIN (62)...(143): Polyribonucleotide nucleotidyltransferase, RNA binding domain
  misc_feature (1)..(314): Xaa is any amino acid
MASGQTRHYMVEGGAKEVSEDLMIQALDKAHNMIMELCAFQEKLRELAGKPKLSLAVPTHVLENSDTIRANAYPRLEKACFLATKQERHDGIKAIQTEFAAQYAAQLEDEKQKKLFNALFEDMQYNILRSSILNNGRRVDGRGTEDIRNITCEVDILARTHGSALFTRGETQALVVTTLGTVFDEQVYDDIEGDKRENFMLHYNFPPYSVGEVGRLGTGRREIGHGNLARRSLEAVVPSKEEFPYTVRVVSEIMESNGSSSMASVCGGTLSMLHAGVPLKNPWRVSRWGLSQKTRHQEITEGRQGTVTQWYLTF

SEQ ID NO: 62495 - DNA, 684 bp, Unknown
  Obtained from environmental sample
  misc_feature (1)..(684): n is a, c, g, or t
atggtacaaaaagtaacactccaaattgccggcaaggaccttgttcttgaaaccggcagaatcgccagacaggcaaacggcgcggttttcgcgcagtacgcgggatcagccgttatagcgactgtctgttcatcttcggaaccggtggagggacttgattacgttccccttacggttgattacaacgagaaatactatgccgcggggaagatccccggaggtttcatcaagcgggaaagccggcccaaggacaaggaaatcctcgtcagccgccttatcgaccggccgatgcgcccccttttcgagaaggctttcggcagggagatacagcttgtccccaccacgctctcgaccgatcaggtaaacccgcctgacatgctggcggtaatcgccgcgtccgcggcagtgcatatttcggacattccctttaacggccctattgccggagtgcgcgtctgccaggtggacggcgaattggtggtcaatcctacctacgaacagattgaaaaatccacaatggaaattgttgtcgccggtacaaaagacggcataacaatggttgagggcggggcaaaagaggtcagcgaggacctgatgatacaggctctggataangcccataatatgatcatggagttatgcgtttttcaagaaaaactgcgcgagcttgccggcaaaacctaa

SEQ ID NO: 62496 - protein, 227 aa, Unknown
  Obtained from environmental sample
  DOMAIN (145)...(209): 3' exoribonuclease family, domain 2
  misc_feature (1)..(227): Xaa is any amino acid
MVQKVTLQIAGKDLVLETGRIARQANGAVFAQYAGSAVIATVCSSSEPVEGLDYVPLTVDYNEKYYAAGKIPGGFIKRESRPKDKEILVSRLIDRPMRPLFEKAFGREIQLVPTTLSTDQVNPPDMLAVIAASAAVHISDIPFNGPIAGVRVCQVDGELVVNPTYEQIEKSTMEIVVAGTKDGITMVEGGAKEVSEDLMIQALDXAHNMIMELCVFQEKLRELAGKT

SEQ ID NO: 62497 - DNA, 492 bp, Unknown
  Obtained from environmental sample
  misc_feature (1)..(492): n is a, c, g, or t
atgggcnttatccagagcctgtatcatcaggtcctcgctgacctcttttgccccgccctcaaccattgttatgccgtcttttgtaccggcgacaacaatttccattgtggatttttcaatctgttcgtaggtaggattgaccaccaattcgccgtccacctggcagacgcgcactccggcaatagggccgttaaagggaatgtccgaaatatgcactgccgcggacgcggcgattaccgccagcatgtcaggcgggtttacctgatcggtcgagagcgtggtggggacaagctgtatctccctgccgaaagccttctcgaaaagggggcgcatcggccggtcgataaggcggctgacgaggatttccttgtccttgggccggctttcccgcttgatgaaacctccggggatcttccccgcggcatagtatttctcgttgtaatcaaccgtaaggggaacgtaatcaagtccctccaccggttccgaagatga

SEQ ID NO: 62498 - protein, 163 aa, Unknown
  Obtained from environmental sample
  misc_feature (1)..(163): Xaa is any amino acid
MGXIQSLYHQVLADLFCPALNHCYAVFCTGDNNFHCGFFNLFVGRIDHQFAVHLADAHSGNRAVKGNVRNMHCRGRGDYRQHVRRVYLIGRERGGDKLYLPAESLLEKGAHRPVDKAADEDFLVLGPAFPLDETSGDLPRGIVFLVVINRKGNVIKSLHRFRR

SEQ ID NO: 62499 - DNA, 1551 bp, Unknown
  Obtained from environmental sample
  misc_feature (1)..(1551): n is a, c, g, or t
ttgccggcaaaacctaaacttccgctgactgcccccacccatgttcttgaaaacagcgacgctatccgcagcgcggcgtacccgaaacttgaaaaagcctgtttcctcgcgaccaagcaggaacgccacgatggcattagggccattcaggcggaatttgctgcgcagtacgcggcccagcttgaggacgaaaaacagaaaaaacttttcaacgctttgtttgaggatatgcaatataacattctccgttcttcgatacttaacaatggccgccgcgttgacggacgcggcaccgaagatatacgcaatatcacctgcgaagttgaaatactggccagaacacacggatcggcgctctttacccgcggcgaaacacaggccctggttgtaacgaccctgggcactgtgtttgacgagcaggtgtttgacgacatcgaaggcgacaagcgggagcattttatgctccactacaacttccccccatattcagtgggcgaagtcggcagacttggaacaggccgccgcgagataggccacggcaacctggcccgccgctcgctggaagcagtggttccctccaaagaagattttccctacacggtgcgtgttgtctctgagataatggagtcaaacggctcctcgtcaatggcctcggtttgcggcggtacgctttcaatgctccacgcgggggtgcctttgaaaaagcccgtggcgggcatcgcgatggggcttatcacggaaggcgccggaaaagcgggcgaccgttacgccgtgttatctgacattttaggcgaggaagaccatctgggcgacatggactttaaggttgccggcaccgaggaaggcataaccggcttccagatggatattaaaatcgccggtgtcagcccggaaattatgcgcaaggccctggatcaggcgaagcggggcagaatgcatattctttcgattatgaacaagacgatcagccgtccggctgaagagatcagcgaatacgcgcccaaaatcgtcaccctgcgtattgacatcgacaagataggcacgcttataggtcctggcggaaagaacatcaaggccctgtgcgaacagtacagcgtaaagatcaacaccgaggacgacggcaccgttacgattttcggcaagaacaccaaagacgcggaggaagccaaaaccgccgttatgggcgttacctcagacccggaaattgacagagtgtacaacggcactgtaaaacggattatggatttcggcgcttttgtggaaattctgcccggcagggaaggtctggtgcatatcagcaaactttcacgccagcgtattgccaatgtcaccgacgtactgaaagaagggcaggaaattcccgtcaagctcaccgaaattgacaaaatgggcaggcttaacctttcgtatattgacgctatcgatccggatggcgccgatcccagtccgaagagccacagcggcaatggcggcagcggtcatacaggcggccattcgggccacgacaacaggggttttaacaagcccggcagggacagacccaggcattaa

SEQ ID NO: 62500 - protein, 516 aa, Unknown
  Obtained from environmental sample
  DOMAIN (336)...(393): KH domain
  misc_feature (1)..(516): Xaa is any amino acid
MPAKPKLPLTAPTHVLENSDAIRSAAYPKLEKACFLATKQERHDGIRAIQAEFAAQYAAQLEDEKQKKLFNALFEDMQYNILRSSILNNGRRVDGRGTEDIRNITCEVEILARTHGSALFTRGETQALVVTTLGTVFDEQVFDDIEGDKREHFMLHYNFPPYSVGEVGRLGTGRREIGHGNLARRSLEAVVPSKEDFPYTVRVVSEIMESNGSSSMASVCGGTLSMLHAGVPLKKPVAGIAMGLITEGAGKAGDRYAVLSDILGEEDHLGDMDFKVAGTEEGITGFQMDIKIAGVSPEIMRKALDQAKRGRMHILSIMNKTISRPAEEISEYAPKIVTLRIDIDKIGTLIGPGGKNIKALCEQYSVKINTEDDGTVTIFGKNTKDAEEAKTAVMGVTSDPEIDRVYNGTVKRIMDFGAFVEILPGREGLVHISKLSRQRIANVTDVLKEGQEIPVKLTEIDKMGRLNLSYIDAIDPDGADPSPKSHSGNGGSGHTGGHSGHDNRGFNKPGRDRPRH

SEQ ID NO: 62501 - DNA, 339 bp, Unknown
  Obtained from environmental sample
  misc_feature (1)..(339): n is a, c, g, or t
atgatagagactccggcttcagcggtgattagcgatatgcttgccagagaggcggattttttcagtattggtaccaatgacctgacccaatacactcttgcaatagaccggcagaacgattccattgccattttttgcgatactcaccatgaagcgattcttcgccttatccgtatgacatgtgaaaacgcgcacaaggccggtatatggtgcggcatctgcgggagcctgggagcggatcttacaatgaccaaaacatttcttgaaatggggcttgatgaattatcggtggaaccgtcaagcatacttaaactacgctcggttattgctaaatattaa

SEQ ID NO: 62502 - protein, 112 aa, Unknown
  Obtained from environmental sample
  DOMAIN (1)...(112): PEP-utilising enzyme, TIM barrel domain
  misc_feature (1)..(112): Xaa is any amino acid
MIETPASAVISDMLAREADFFSIGTNDLTQYTLAIDRQNDSIAIFCDTHHEAILRLIRMTCENAHKAGIWCGICGSLGADLTMTKTFLEMGLDELSVEPSSILKLRSVIAKY

SEQ ID NO: 62503 - DNA, 942 bp, Unknown
  Obtained from environmental sample
  misc_feature (1)..(942): n is a, c, g, or t
gtgttctgtagagtatgtggcagtgcgggagcccagataaaggcccctgtatgcgagataaggcgcgaaggctttagcctgagcggtgggcgtagggagcaaagagcaatgagcaatgagcaatataacgaattttttctcttaaaactggttcctgacgttttgcgggcgcgggattttcgcctgtataccaaggccgggcggctggttgatctgtggcagaataacggggcggcggtgctggggcatacgccacattccctgctgaaggaaattaaaaataccgcaagccggggactgtacgcccccttcccccattttctggaagcgcgttaccgtaaggcgctgtcccgcgtttttcctgacagggctttccgcctgtatgccgctccgccgccaggactggaaacgctcgttgccaacgggagcgccgctctctggcggccatttgccgaccccgcgtcgccccttggggttcctgaaaatcccccggttttgattcccgtagttcccggcatacagacatggcgcgacggtctgcccctgggcctctgcgtcctcgcggttaaagacgacgcggactctatgtccgcggacataaagtccggcgattttctggcgccggttctgctcgccgcagccgccaggggcatttacgaccttatttccgccgcgccagaacgggcaatccccaattatccccgcatcgcgaaagcgttgaaaaataataatccccaaggtgtcgaagagcgcaatttctggcagcgcagcggcatctaccttacgccgcggcaaaagcagtcacaaacggaatgggcagagttgttccgccgcttcctcgaaaaaggcttccttcttcccccgcatccgtcccagccgctaatcctccccggcgttctttcacccggcgaggaagcaaagctggcggaactgctggcatga

SEQ ID NO: 62504 - protein, 313 aa, Unknown
  Obtained from environmental sample
  misc_feature (1)..(313): Xaa is any amino acid
MFCRVCGSAGAQIKAPVCEIRREGFSLSGGRREQRAMSNEQYNEFFLLKLVPDVLRARDFRLYTKAGRLVDLWQNNGAAVLGHTPHSLLKEIKNTASRGLYAPFPHFLEARYRKALSRVFPDRAFRLYAAPPPGLETLVANGSAALWRPFADPASPLGVPENPPVLIPVVPGIQTWRDGLPLGLCVLAVKDDADSMSADIKSGDFLAPVLLAAAARGIYDLISAAPERAIPNYPRIAKALKNNNPQGVEERNFWQRSGIYLTPRQKQSQTEWAELFRRFLEKGFLLPPHPSQPLILPGVLSPGEEAKLAELLA

SEQ ID NO: 62505 - DNA, 1428 bp, Unknown
  Obtained from environmental sample
  misc_feature (1)..(1428): n is a, c, g, or t
atggcgattgtcaccgaccttggcggggccgattgtaccgtaagcgatattaaagaaattgacaaaacaataaaaccaaaacccccgttcattacgtcggaactgcaaaagaccgcggcgaacaggctgggttatacgtcacgaaaaaccatgcaggtcgcccagcagctttatgagggggtgaatatcggctctacccgcatcggtcttatcacctacatgaggacggattcggtgcgcgtgtccgaaacggcccttggcgagcttcgggagtggcttggcaagaactaccccaaagagcttcccgaaaaagcgcttgagtatacctccgggaaaaaagcccaggacgcgcacgaggcgatacgcccgacttacgtcagctatacgccggattcggtcgccgagtacctgaacagggatcagctcaggctgtacacgataatttgggaacgctttgtttcaagccagatgtgcagcgcaaaaacacgcaccgtcagcgtcgagatcaacgccgtctcgggtaagggagaagaaggcctgttcagggtttccgggacaaaacttgttgaaaaaggtttttacaaagttatcaaactgctctcgtcaaaagaggaaaaagggaatccctatcccccgcttaaaacaggggacaaggtcacgattgaaaaattccatcccgagcagcattttacgcagggtccgccccgttataccgaggcttccattatcgatattttacgcgagaaggaaataggcaggccgtcgacttacgcgccgattatttccgtgctgctggaccgctattatgttacgcgatcaaacaagcagcttgtcccaaccctgctgggaaagaaaatatgcgagatgttggttgattattttcccgattatgtcgacgttgattttacggcctctatggaaacgaagctggacaaggtcgaggaaagccagttgaaatggcccgatatgctcaaggaattctgggggcctttcaaagccaaggttgacgaggttggcaaatccctggagtcctttaaaggttccctggatgagccgaccgactatgtatgcgagaaatgcggcaagcccatcgtgaagaaactgggtcgcaacgggtttttcctcgcctgtaccggttttccggaatgcaggaatacgaggtcggttccgcttgccgtctgccccaaatgcggcggagacgttgtagcgcggaaaacaaagggcaggggaaaggaattttacggctgcgcgaattatcctgattgtgattttgtcagtcactacaagccgatcagccagaactgccccaagtgcggcaagttcatggtggaaaaatacgacaagaaaaacggcagccataaggcgtgcataaatcctgaatgcgattatttgcatagcgctggggacgccgagggtgcaccgcgctaa

SEQ ID NO: 62506 - protein, 475 aa, Unknown
  Obtained from environmental sample
  DOMAIN (432)...(470): Topoisomerase DNA binding C4 zinc finger
  misc_feature (1)..(475): Xaa is any amino acid
MAIVTDLGGADCTVSDIKEIDKTIKPKPPFITSELQKTAANRLGYTSRKTMQVAQQLYEGVNIGSTRIGLITYMRTDSVRVSETALGELREWLGKNYPKELPEKALEYTSGKKAQDAHEAIRPTYVSYTPDSVAEYLNRDQLRLYTIIWERFVSSQMCSAKTRTVSVEINAVSGKGEEGLFRVSGTKLVEKGFYKVIKLLSSKEEKGNPYPPLKTGDKVTIEKFHPEQHFTQGPPRYTEASIIDILREKEIGRPSTYAPIISVLLDRYYVTRSNKQLVPTLLGKKICEMLVDYFPDYVDVDFTASMETKLDKVEESQLKWPDMLKEFWGPFKAKVDEVGKSLESFKGSLDEPTDYVCEKCGKPIVKKLGRNGFFLACTGFPECRNTRSVPLAVCPKCGGDVVARKTKGRGKEFYGCANYPDCDFVSHYKPISQNCPKCGKFMVEKYDKKNGSHKACINPECDYLHSAGDAEGAPR

SEQ ID NO: 62507 - DNA, 1092 bp, Unknown
  Obtained from environmental sample
  misc_feature (1)..(1092): n is a, c, g, or t
atgccgacaatccgccgccttcgtcaaacagtccaactgtcaaccaacctccgcctccgcgtcaaggtccggctgtcaatccgccgccgccacatcatcatcatggcccgactgtcaaaccgccgtcgccgccaccccatggccccgtcgtcaatccgccgcagcgtccggaaactgaaattgatccgcctccgggaaccgatcctgaacaacagcctgaaacgaagaactttcagaggaggtagaagtatgttattaatgaaagaattttcgctctttttcgttttctgtttgattacgctcattgcggcggcaaccgttttcgctcaaggtttcacagagcccggcgctaatcctccgccgccaccctccgttcccggttataatccgccgccgtctccggagttcggtcattacccattaccgccgcctccgccccccggtcattacccgccttctcctccgctccacggcggtcccggtcattatccgcctccgccgcctccgccacacggcggctccggcccgggaatatacggacaacctgttatgaccggccggcctgtaacaataggcgaggcgaaaaattatccccatgattcatggataattgttaacggaaacattgtcagcgtactgccgggcggcagacatttcatgttccgtgattcctccggagaaatacccattgagataggccccaaagaatggagaggcttgtcagccgcagcatcggataatgttgaaatttgcggagaggtaaaaatagagagagggcaggtttttattaaagtgcacgccataacagcggcggcaaagccgaatgacagacgttatgccgttacggtaaatgatacgcaaaacttgcctcatgattcatgggtagtgttaaccggaaatatcgtttactcattgccaaaaccccatgattatactttccgtgattcttcgggagaaataaccattgacataggcccgaaagagtggcgcggcctgtcggtcggagtatccgacaaagttgaaatttcaggcgaagtgaaaagagagcgagggcaggttttcattaaagttcacgcaataagaaaaatataa

SEQ ID NO: 62508 - protein, 363 aa, Unknown
  Obtained from environmental sample
  DOMAIN (257)...(362): Domain unknown function (DUF388)
  misc_feature (1)..(363): Xaa is any amino acid
MPTIRRLRQTVQLSTNLRLRVKVRLSIRRRHIIIMARLSNRRRRHPMAPSSIRRSVRKLKLIRLREPILNNSLKRRTFRGGRSMLLMKEFSLFFVFCLITLIAAATVFAQGFTEPGANPPPPPSVPGYNPPPSPEFGHYPLPPPPPPGHYPPSPPLHGGPGHYPPPPPPPHGGSGPGIYGQPVMTGRPVTIGEAKNYPHDSWIIVNGNIVSVLPGGRHFMFRDSSGEIPIEIGPKEWRGLSAAASDNVEICGEVKIERGQVFIKVHAITAAAKPNDRRYAVTVNDTQNLPHDSWVVLTGNIVYSLPKPHDYTFRDSSGEITIDIGPKEWRGLSVGVSDKVEISGEVKRERGQVFIKVHAIRKI

SEQ ID NO: 62509 - DNA, 372 bp, Unknown
  Obtained from environmental sample
  misc_feature (1)..(372): n is a, c, g, or t
atgaaaaagtatacgcttttattcatctgcttgttgatcccgttcattatggcgataaccgcgtgttcccagatttcagattttttagacactctgggcatcaatcaaccgcagccccaaggcccggatgccgacaatccgccgccttcgtcaaacagtccaactgtcaaccaacctccgcctccgcgtcaaggtccggctgtcaatccgccgccgccacatcatcatcatggcccgactgtcaaaccgccgtcgccgccaccccatggccccgtcgtcaatccgccgcagcgtccggaaactgaaattgatccgcctccgggaaccgatcctgaacaacagcctgaaacgaagaactttcagaggaggtag

SEQ ID NO: 62510 - protein, 123 aa, Unknown
  Obtained from environmental sample
  SIGNAL (1)...(23)
  misc_feature (1)..(123): Xaa is any amino acid
MKKYTLLFICLLIPFIMAITACSQISDFLDTLGINQPQPQGPDADNPPPSSNSPTVNQPPPPRQGPAVNPPPPHHHHGPTVKPPSPPPHGPVVNPPQRPETEIDPPPGTDPEQQPETKNFQRR

SEQ ID NO: 62511 - DNA, 867 bp, Unknown
  Obtained from environmental sample
  misc_feature (1)..(867): n is a, c, g, or t
ttgaaaacatggtcaatgccggtaagcggcgcgaagagcggattaattccctgtaattgctgcggcggtctcattttcaaacccgcccttgagtgcgaaggttttaactttgtccgctgtactaaatgcggtcttgtgcagagaaacccccagcccgtaaaagaagaaattattgcccgttacagtaaaacttttggtaatgattacctgagttacgaacttgaaaatgaaaccgcctttcttaaactgcagcaactcgctttacatgacgcgaattttgacaatacggagaaggacgtttttttacgcgccaaaggagacgctccttccgttcttgacataggctgcgccacaggagcgcttcttgcctgcctgcgcgctcgcggctggcgcgtaacaggagtggaaatatccccgggcgccgaatatgcccaaaaagagcgcgggcttgacgtgcggaacattccgctggaagagatcaattttccggaggagagttttgacgcgatcctcgcgtcccatcttgttgagcatttgaacgatccgcgctcgttttttctggaattacgccgtattcttaaaaagggcggaaaaatatttattactacccctaacatcagcggtcttcaggcgcggctcttaggcggccgatggcgttcagccatattcgatcatctctatcttttttcaaaacgcactttgcttaaaatgctgaaaacttgcggttttaagccggaaggcgtatacacatggggcggacttgccgccgggcttgttcccgtatttataaaaaaacccgccgattttctggcaaaacgccttggatttggggacgtgatgatagtccgtgcgggaaaagcggtgtaa

SEQ ID NO: 62512 - protein, 288 aa, Unknown
  Obtained from environmental sample
  DOMAIN (99)...(237): Methionine biosynthesis protein MetW
  misc_feature (1)..(288): Xaa is any amino acid
MKTWSMPVSGAKSGLIPCNCCGGLIFKPALECEGFNFVRCTKCGLVQRNPQPVKEEIIARYSKTFGNDYLSYELENETAFLKLQQLALHDANFDNTEKDVFLRAKGDAPSVLDIGCATGALLACLRARGWRVTGVEISPGAEYAQKERGLDVRNIPLEEINFPEESFDAILASHLVEHLNDPRSFFLELRRILKKGGKIFITTPNISGLQARLLGGRWRSAIFDHLYLFSKRTLLKMLKTCGFKPEGVYTWGGLAAGLVPVFIKKPADFLAKRLGFGDVMIVRAGKAV

SEQ ID NO: 62513 - DNA, 642 bp, Unknown
  Obtained from environmental sample
  misc_feature (1)..(642): n is a, c, g, or t
atgtctagcgtctttggaaaactttttacgctttcatcttggggtgaatcgcacggaaaggctattggggcagtggtggatggctgccctgctggacttgaaattaacgaagaatatatacagcaatttttagaccgccgcaagcccgggcaaagtgcaattaccacgcagcgcaaagagagcgatttggttaaaattttgagcggggtttttgaaggcaaaacaacgggaacgcctatatccatgatagtggaaaatgcagaccaacatagtgcggattatgagcaaataaaagactggtggcgcccagggcacgcagacgaagcctatgattccaaatatggatttagggattatagaggcggcgggcgtagttcggcgagagaaaccatagcacgggttgctggcggttcaatagctcgtaaatttttgaaggaaaaatgcggaactgaattcacagctactataaacatagataacaactcaatagaaaatgcaaaaaaaaatggagatagcattggcggcattgttagtttaaccattaaaaatccgccaaaaaatttgggcgagccggtttttgaccgcacggaggcactgcttgcaatggcgatgttaagcattcctgcaacgcgaggggtttga

SEQ ID NO: 62514 - protein, 213 aa, Unknown
  Obtained from environmental sample
  DOMAIN (9)...(213): Chorismate synthase
  misc_feature (1)..(213): Xaa is any amino acid
MSSVFGKLFTLSSWGESHGKAIGAVVDGCPAGLEINEEYIQQFLDRRKPGQSAITTQRKESDLVKILSGVFEGKTTGTPISMIVENADQHSADYEQIKDWWRPGHADEAYDSKYGFRDYRGGGRSSARETIARVAGGSIARKFLKEKCGTEFTATINIDNNSIENAKKNGDSIGGIVSLTIKNPPKNLGEPVFDRTEALLAMAMLSIPATRGV

SEQ ID NO: 62515 - DNA, 1362 bp, Unknown
  Obtained from environmental sample
  misc_feature (1)..(1362): n is a, c, g, or t
atggctctgcccggtaaaaaagaaggcggattgttagatgtaatccgctgtgacgaggaaacatatcttatttggaaatggcggccagccggaacggacgttaacgaaacaaaaaaagaaaacgccatccgttggggttccagcctacgcgtaaaagaagctgagattgccgtattcgtttacaaacaaaatgacggcacaatacaggattttatcgaagggccgtttgacgacaccattaaaacggcaaactttcccatccttgcatcaattgtgggccttgcttttggagggggcacgccatttcaggcggaaatttattttatcaatctggcgggaatcgttcagaacaaattcgcaattccgtattttgacgtatttgacccccgctttttagactttgccgtgccagtggcggtgcggggaaccatcagttttaagattgccgattataaggcttttataaaacttcaccggcttattaattttgaccttgaaacattcaagtctcaaatactggacgcggtaaagaaatatatcaaaagcgtggtaacaaatattccctcggaaaacggaatacccgttattcaacttgaacggaaaatattgcaaattaacgagattattgaagcatatctaaaaccccgcttacagaatgattttggtgtttttgtttccgcactggacattggcgctatagaggctgataaagaaagtgaaggctaccaatctttaatgtctgtaacgaaagaaatagccgctcaaactacccaaacgcaagcggcggtgaatattaaaaacatgggggatattcaagaaattaatgcagataacatggaagcgactttagcaattcagcgggaagaaatgcaacacgcccaacgtatgcaaaccgatgccgctaattttgccgtccaccagttaaaccagcagacagatgtcgccaaagccggagccgaagcgctgggacaaatgggcgcgggcaatactatgaatatgggcgcaggcggcggcatgaaccccgccgcgatgatgaccggtatggcaatgggcggggttatgggccagcaaatggcgaacatgatgggcggcatgatgcagggaataaatcatccgcccgccggagtaatgccgccaccgccgcctattgtgcaatataatgtagcggtaaatggacaaagtaccgggccttttacatttgaccagttgcggcagatggcggcacagggacaatttacagcgcagtcacaggtgtggaagcaggggatgtccggctggaccgcagccggaaccgtggcagaacttgcgccggtattcgcgcagtcagcgcccccgcccccgccgcctcccgccgcgcaataa

SEQ ID NO: 62516 - protein, 453 aa, Unknown
  Obtained from environmental sample
  misc_feature (1)..(453): Xaa is any amino acid
MALPGKKEGGLLDVIRCDEETYLIWKWRPAGTDVNETKKENAIRWGSSLRVKEAEIAVFVYKQNDGTIQDFIEGPFDDTIKTANFPILASIVGLAFGGGTPFQAEIYFINLAGIVQNKFAIPYFDVFDPRFLDFAVPVAVRGTISFKIADYKAFIKLHRLINFDLETFKSQILDAVKKYIKSVVTNIPSENGIPVIQLERKILQINEIIEAYLKPRLQNDFGVFVSALDIGAIEADKESEGYQSLMSVTKEIAAQTTQTQAAVNIKNMGDIQEINADNMEATLAIQREEMQHAQRMQTDAANFAVHQLNQQTDVAKAGAEALGQMGAGNTMNMGAGGGMNPAAMMTGMAMGGVMGQQMANMMGGMMQGINHPPAGVMPPPPPIVQYNVAVNGQSTGPFTFDQLRQMAAQGQFTAQSQVWKQGMSGWTAAGTVAELAPVFAQSAPPPPPPPAAQ

SEQ ID NO: 62517 - DNA, 363 bp, Unknown
  Obtained from environmental sample
  misc_feature (1)..(363): n is a, c, g, or t
atgagtggatcgacataccgccgaaggtacagcaggcggcgggcggcttcaggcataaaagagggtatatgcgtagtattcgtgccgcataccaccgcggcagtaaccatcaatgaaaacgccgaccccgacgttccncacgacgtaggttttgccctcaaccagatttcccccgaccgccgcgaattccgccacagcgagggcaactcggcggcgcataccaaatcaagcctggtagggccttccattaccataattgtttccggcggccgtctgctgttgggaacctggcaaggcatctggttcaatgaatacgacggcccgcgcagcagaaaagtacatgtgagaatcatgggagaataa

SEQ ID NO: 62518 - protein, 120 aa, Unknown
  Obtained from environmental sample
  DOMAIN (9)...(118): Uncharacterised protein family UPF0047
  misc_feature (1)..(120): Xaa is any amino acid
MSGSTYRRRYSRRRAASGIKEGICVVFVPHTTAAVTINENADPDVPHDVGFALNQISPDRREFRHSEGNSAAHTKSSLVGPSITIIVSGGRLLLGTWQGIWFNEYDGPRSRKVHVRIMGE

SEQ ID NO: 62519 - DNA, 1053 bp, Unknown
  Obtained from environmental sample
  misc_feature (1)..(1053): n is a, c, g, or t
atgaaagcgttatttatcggcggaaccggcactataagcacggcgatctcaaagttggtattggagcagggctgggaactgtttctgctgaatcgcggcagccgcaatacagtgattgatgccaaaggcaagccgggaaaactggttgagattcaatgcgacatcagaacggaaagcgcggaatcaatccgcgcaaagatacagacggcgggcggaggacagcccttcgatgttgccgccgattttatcgctttttcaaccgatcatgtcgcgaaagattttgacattttaaaaaatctgtgccggcagtatttttttatcagctcggcgtcggcttaccagaaacccctgtcttcatacctgattaccgaaagcaccccgctggcgaatccttattgggaatattcccgcaataaaatcgcctgcgaggaatttcttatggcaaagtaccgcgaatgcggctttcccgttaccataatcaggccgagtcatacctacgatgaacgaagcgtcccgctgggagtccacggcagcaagggaagctggcaggtcgttaaacggatgatcgaaggcaagccggtaatcattcacggagacggcgcgagcctgtggacaatgacacataacagtgattttgcccgcgcctttgcgggtttgatgggaaacattcacgccatcggcgaagcggtgcagataacctccgatgaaagcctgagctggaaccagatataccaggccattgccgccgtccttaatgttccgctcaaggcggtgtatatgcccagcgattttcttgcccaatgcagtgactatgattttaccggcggcctcatcggcgacaaggcaaattcggtagtctttgacaataccaaactcaagcggctggttcccggtttttgcgcccatgtccgttttgatcaggggatacgggaaaccattgcctatgtattgggtcataaagactgccagacagaagaccccgaatttgattcatggtgtgacagggtcattgcggcgcgggaacgggcagttaaagaattagggaacggctga

SEQ ID NO: 62520 - protein, 350 aa, Unknown
  Obtained from environmental sample
  DOMAIN (3)...(233): NAD dependent epimerase/dehydratase family
  misc_feature (1)..(350): Xaa is any amino acid
MKALFIGGTGTISTAISKLVLEQGWELFLLNRGSRNTVIDAKGKPGKLVEIQCDIRTESAESIRAKIQTAGGGQPFDVAADFIAFSTDHVAKDFDILKNLCRQYFFISSASAYQKPLSSYLITESTPLANPYWEYSRNKIACEEFLMAKYRECGFPVTIIRPSHTYDERSVPLGVHGSKGSWQVVKRMIEGKPVIIHGDGASLWTMTHNSDFARAFAGLMGNIHAIGEAVQITSDESLSWNQIYQAIAAVLNVPLKAVYMPSDFLAQCSDYDFTGGLIGDKANSVVFDNTKLKRLVPGFCAHVRFDQGIRETIAYVLGHKDCQTEDPEFDSWCDRVIAARERAVKELGNG

SEQ ID NO: 62521 - DNA, 912 bp, Unknown
  Obtained from environmental sample
  misc_feature (1)..(912): n is a, c, g, or t
atgaaggttcttgttgtaggcggcggaggccgtgaacacgcaataattaaatcattaaaaaataatgagcgcataacaaaattatttgcggctccgggaaacggcggcattagccgtgaaacggaatgtgtgcagataaaagcaacggatattcaggcaatgacggaattctcagtaaaaaacaaaattgactatgttgttgtagcccctgacgatcctcttgctcttggtatggtagacgcaatggaagaaaagggtatacgctgtttcggcccgaacaaagcggctgcccgtattgaaagcagtaaagttttttccaaaggtttaatgaaaaaatacggaattcctacagccgcctttgaaacattttcagattctaaaaaagctttagattatattaaattatattcaagttcatttcctgttgttataaaagcggacgggcttgcgctcggaaagggtgtaataattgcggaaaacaaagacgaagcgttatccgcaattaataccgtgatgcttgaaaaaaaattcggcgcaagcggctcaaatatcgtaatagaagaatttttgacagggcctgaagttactgtccttgcttttacagacggaaaaactgttgtgccgatggtttcctctatggatcataaacgggcttttgacaacaataccggttccaatacaggcggcatgggcgttgtagctccaaaccctcattacacaaatgaaattgccgaggtttgcgaaaaaaccatctttcttccgactatttacgcaatggaaaaagaaggctgtcctttcaaaggctgtctgtacttcgggcttatgctcactccgtgcggccccatggttattgaatacaactgccgtttcggtgatccggaaactcaggcgatactcctctcctcgccataa

SEQ ID NO: 62522 - protein, 303 aa, Unknown
  Obtained from environmental sample
  DOMAIN (1)...(100): Phosphoribosylglycinamide synthetase, N domain
  misc_feature (1)..(303): Xaa is any amino acid
MKVLVVGGGGREHAIIKSLKNNERITKLFAAPGNGGISRETECVQIKATDIQAMTEFSVKNKIDYVVVAPDDPLALGMVDAMEEKGIRCFGPNKAAARIESSKVFSKGLMKKYGIPTAAFETFSDSKKALDYIKLYSSSFPVVIKADGLALGKGVIIAENKDEALSAINTVMLEKKFGASGSNIVIEEFLTGPEVTVLAFTDGKTVVPMVSSMDHKRAFDNNTGSNTGGMGVVAPNPHYTNEIAEVCEKTIFLPTIYAMEKEGCPFKGCLYFGLMLTPCGPMVIEYNCRFGDPETQAILLSSP

SEQ ID NO: 62523 - DNA, 597 bp, Unknown
  Obtained from environmental sample
  misc_feature (1)..(597): n is a, c, g, or t
atgacacgcattgcagtccttgtaagcggcggaggtacaaatcttcaggctttaattgacgctcgtgacaggggagagttgggcggcggagagcttttgcttgttatttcatcaagagcgggagttcaggcgctggaacgggcgcaaaaagcgggaataagaacaaaaacaatagaaagaaaaaagcatgaagacattgccgcttttgatcacgctattgccgccgcgttatctgaagaaaaaatcgaccttgtcgttcttgcgggatttttgtctgtactgggacaggaaacccttcagttatttaaagatcgtattatcaatgtgcatcccgctctgataccgtccttttgcggtaagggattttacggtcttaatgttcacaaggctgttcttgaatacggtgtgaaagttacgggagcgacagtgcattttgttaatgacgtggtggacggagggaaaattattctgcaaaaagcggtggatgtgctgtccgatgatacgcctgaaacattgcagcagcgtgtaatgcgtgaaggggagtgggtaattctgccgaaggctgtcgctatgttttgcagaggagaaattaaatga

SEQ ID NO: 62524 - protein, 198 aa, Unknown
  Obtained from environmental sample
  DOMAIN (2)...(189): Formyl transferase
  misc_feature (1)..(198): Xaa is any amino acid
MTRIAVLVSGGGTNLQALIDARDRGELGGGELLLVISSRAGVQALERAQKAGIRTKTIERKKHEDIAAFDHAIAAALSEEKIDLVVLAGFLSVLGQETLQLFKDRIINVHPALIPSFCGKGFYGLNVHKAVLEYGVKVTGATVHFVNDVVDGGKIILQKAVDVLSDDTPETLQQRVMREGEWVILPKAVAMFCRGEIK

SEQ ID NO: 62525 - DNA, 720 bp, Unknown
  Obtained from environmental sample
  misc_feature (1)..(720): n is a, c, g, or t
atgaacccggattatatggaatccatctggtgggttatgaagtcactctgggagaaaggtctagtctacgaaggtcattacattcttccgtactgtccccgctgttccaccgtcctgtccaaccacgaactcaaccttggcggttacaaagacgtacacgatccggcgattaccgtgcgattcaaggttacaggcggcaaagagtttgggataggaagcagtaacacttacctgctggcatggacaaccactccctggacactgccttcgaacctggctctaaccctcggcggagacatcgactatgtattagtcgaagacctgtctcctcccaacgatcactacattctggcggaagcacgcctgccggcatattacaaagacaactcccaatataaaattgtatggcgtaaaaagggagctgaactaaagggcattcaatacgaaccgttgtttccctatttcaaagacgcgtctaacgccttccgtactttcctcggcgactttgttaccaccgaagacggtaccggcatcgttcacacagcgcccggtttcggcgaagacgacgcgcgtgtactaaaaggaacgggcatacccgtgatttgtccggtagacgcggaatgtaaattcaccgcggaagtttccgattacgctggggtgttcgttaaagacgcggataaggcaatcatggagcggcttaagccgaaggcaaacttgtaa

SEQ ID NO: 62526 - protein, 239 aa, Unknown
  Obtained from environmental sample
  DOMAIN (1)...(239): tRNA synthetases class I (I, L, M and V)
  misc_feature (1)..(239): Xaa is any amino acid
MNPDYMESIWWVMKSLWEKGLVYEGHYILPYCPRCSTVLSNHELNLGGYKDVHDPAITVRFKVTGGKEFGIGSSNTYLLAWTTTPWTLPSNLALTLGGDIDYVLVEDLSPPNDHYILAEARLPAYYKDNSQYKIVWRKKGAELKGIQYEPLFPYFKDASNAFRTFLGDFVTTEDGTGIVHTAPGFGEDDARVLKGTGIPVICPVDAECKFTAEVSDYAGVFVKDADKAIMERLKPKANL

SEQ ID NO: 62527 - DNA, 714 bp, Unknown
  Obtained from environmental sample
  misc_feature (1)..(714): n is a, c, g, or t
atgttagacgcaaacagccaaatatattggatacccgaacacatcaaagaaggcagattcggcaaatggctggaaggcgcgcgtgattgggcaatcagccgaagccgctattggggaaacccattgccgatatggcgatgccccgactgcggaaaaacaatctgcgtcggaagccgagccgaattgaaagaattatcgggcgtataccccgacgaccttcataaacattttgtagatgaaataaaaatcccctgctcctgcggcgcaaaaatgtcgcgcgtccccgaagtattagactgctggttcgaatcaggagcaatgccctatgcgcaaaatcattatccgtttgaaaacaaagaattttttgacagccatttcccctcggattttatcagcgaaggattggatcaaacacgaggctggttttacaccctcacagtccttgcggcggcgctccttaaaaaacccgcattcaaaaactgcatagtaagcggactagtccttgccagcgacggcaaaaaaatgagcaaaagccttcgcaactacacagacccaaacgaagtaataaattccttcggcgcggacgcgttacgcctttttcttgtacactcggcggtagtaaaagccgacgaccttcgctacagcgacgacggcgtgcgtgaaataatgaaaagcataatcattccgttgggaacgcctacagtttttttgtaa

SEQ ID NO: 62528 - protein, 237 aa, Unknown
  Obtained from environmental sample
  DOMAIN (1)...(213): tRNA synthetases class I (I, L, M and V)
  misc_feature (1)..(237): Xaa is any amino acid
MLDANSQIYWIPEHIKEGRFGKWLEGARDWAISRSRYWGNPLPIWRCPDCGKTICVGSRAELKELSGVYPDDLHKHFVDEIKIPCSCGAKMSRVPEVLDCWFESGAMPYAQNHYPFENKEFFDSHFPSDFISEGLDQTRGWFYTLTVLAAALLKKPAFKNCIVSGLVLASDGKKMSKSLRNYTDPNEVINSFGADALRLFLVHSAVVKADDLRYSDDGVREIMKSIIIPLGTPTVFL

SEQ ID NO: 62529 - DNA, 987 bp, Unknown
  Obtained from environmental sample
  misc_feature (1)..(987): n is a, c, g, or t
ttgaacaactggtacatacgccgctcacgccgccgtttctggcgcagtgaaaacgacagcgacaaactcgaagcctacggcgcactctacgaagcccttaaaacattgatagcagtcgcatcacccttcatgccgtttaccacagacgctgtctggcagaatctgcgcctgaaagacgatcccgaatcggtgcatttaaccgattatccttcacctaacgcaaaacgccgtgacagcgaccttgaattccgcatggcggcggtaatgtcagccgtttcaatcggacgctcgcttcgttcccagtacaatatcaaaatgcgccagccgcttcgcaaggcagaacttgttacacgcaacgaggaagagaaaaaagccctgctcggcatggcggacataatccgagaggaactgaacgtaaaagaagtagtattttcagataacgaagaagatttggtagagtacgaagtaaaagccaacttccgcgtattgggaaaagaacttggaaaagacatgaaatccgccgccgccaaaatagaagccctaacccacgcggaaattcaaaaaatcgtgcaaggctcgccgctttccataaacgtcccctgcgaaagcggcgatagagcgcttgtaataacagccgacaaactcgacattcgccgaatagaaaaagcgaacctgcgtgttcttaacgaaggaacgctcacagtcggacttgatacggaaataacccgagaactttcaatggaaggcgacatccgagacctgattcgaggcatacaaaacgcccgcaaagaaatgggcttatctgttacagaccgcatagagttaagcgtacacggcgcggacaccttaaaagaagcatgggacaatttcggcaagagcgccgccgaagaaaccctagccgtaaaaacccaatgggcaaaagcagacggacaaatccccatagaagccggagaagaaacatggcaagtaaagatagtaaaagcgtaa

SEQ ID NO: 62530 - protein, 328 aa, Unknown
  Obtained from environmental sample
  DOMAIN (1)...(115): Anticodon-binding domain
  misc_feature (1)..(328): Xaa is any amino acid
MNNWYIRRSRRRFWRSENDSDKLEAYGALYEALKTLIAVASPFMPFTTDAVWQNLRLKDDPESVHLTDYPSPNAKRRDSDLEFRMAAVMSAVSIGRSLRSQYNIKMRQPLRKAELVTRNEEEKKALLGMADIIREELNVKEVVFSDNEEDLVEYEVKANFRVLGKELGKDMKSAAAKIEALTHAEIQKIVQGSPLSINVPCESGDRALVITADKLDIRRIEKANLRVLNEGTLTVGLDTEITRELSMEGDIRDLIRGIQNARKEMGLSVTDRIELSVHGADTLKEAWDNFGKSAAEETLAVKTQWAKADGQIPIEAGEETWQVKIVKA

SEQ ID NO: 62531 - DNA, 387 bp, Unknown
  Obtained from environmental sample
  misc_feature (1)..(387): n is a, c, g, or t
atgattgaaccaaaaatactaaaaggctttagggattttttaccccaggctgaaatggtacgccgcaatttgactgaaagaatcgaagcaacattgcggtctttcgggtttgcgccgatcgacaccccggcgcttgagtacgcggatatacttctgggcaagggcggcggtgaaaccgagaagcagatctaccgttcaccgacaacgggggacgcgatgtcgcgctccgttttgatcttaccgttccctttgcccgctttaccgcgcttcaccagcaggaactcaactttcccttcaagcgttaccacattggcaaggtttggcgcggggaaaacacccagcgggggcgctacagggaattcacccagtgcgattttgacattatag

SEQ ID NO: 62532 - protein, 128 aa, Unknown
  Obtained from environmental sample
  misc_feature (1)..(128): Xaa is any amino acid
MIEPKILKGFRDFLPQAEMVRRNLTERIEATLRSFGFAPIDTPALEYADILLGKGGGETEKQIYRSPTTGDAMSRSVLILPFPLPALPRFTSRNSTFPSSVTTLARFGAGKTPSGGATGNSPSAILTL

SEQ ID NO: 62533 - DNA, 795 bp, Unknown
  Obtained from environmental sample
  misc_feature (1)..(795): n is a, c, g, or t
gtgtcaggcaccaaattttactacctgaaaaacgaaggggtgtttctggaactcggccttgtgcggtacgcgctggatattcttcacaaaaaagggtttaccccctttatcacgccggacgtggcccgcgaggaaatcctggaaggcataggttttaaccccagaggcgaggaatccaacgtatacacgctggagggcgaggacgcatgcctggtcggaaccgccgaaataaccctcgggggctattattcggacactattctcgcgaaagacaaactgccgctgcgtatggcgggcctttcccactgtttccgccgcgaagccggagccgccgggcagttttcaaagggcctgtaccgcgtgcaccagtttaccaagctggaaatgttcgtgtactgtctgcccgaagaatcgggaaaattccatgaagaattacgcctaatagaagaagaaatctttaagggcctcgacattcccttccgggttgtggacacctgcacaggcgatctcggcgcccccgcctaccgcaaatgggatcttgaggcgtggatgccgggcaggaacggaggcgaatggggcgaagtgacatcgacctcaaattgcacggattaccagtccagaaggctgaatatacggtacaaggacgacgacggcaaaaacaaattcgtccaccttctgaacggcacggctatcgctatatcaagggcgatcatcgccgtactggaaaacttcccagcagcggacggctcggtgcggattccgcccgcgctgtcccctatgtcgggtttgatataa

SEQ ID NO: 62534 - protein, 264 aa, Unknown
  Obtained from environmental sample
  DOMAIN (16)...(187): tRNA synthetase class II core domain (G, H, P, S and T)
  misc_feature (1)..(264): Xaa is any amino acid
MSGTKFYYLKNEGVFLELGLVRYALDILHKKGFTPFITPDVAREEILEGIGFNPRGEESNVYTLEGEDACLVGTAEITLGGYYSDTILAKDKLPLRMAGLSHCFRREAGAAGQFSKGLYRVHQFTKLEMFVYCLPEESGKFHEELRLIEEEIFKGLDIPFRVVDTCTGDLGAPAYRKWDLEAWMPGRNGGEWGEVTSTSNCTDYQSRRLNIRYKDDDGKNKFVHLLNGTAIAISRAIIAVLENFPAADGSVRIPPALSPMSGLI

SEQ ID NO: 62535 - DNA, 528 bp, Unknown
  Obtained from environmental sample
  misc_feature (1)..(528): n is a, c, g, or t
ttgggaattgacaccatgtcgcacaggggcagtcttatcggtaacgcgccgggatacgcggtgctgggatcgggcatagatgaagtatacccctccgcgaacagaccgctggcaaagcggatattggattcaggcggcgctttgctttccgagtaccccccgggaattcatgcgactaaatggacatttccggcgcggaataggattattgccgccatgtcgcgcggcgtgctgattgtggaagcgcccgaaaaatcgggagcgttaattacggcggattttgcagttgagcagggaaaagacctttgggtcgcttccagcggtttgcttgaaaacgcgaatttcgacaaaaggggcacgattaaactggcgaatgacggagcggaagtaattaactccgcttgtgatatattgagaaaatggaatatggaaacaggaagttcttacgttaaaagagcggaagaaacaaacaaaggcatggatgattatatcatttcattggccgattttctaaaaattgagatttaa

SEQ ID NO: 62536 - protein, 175 aa, Unknown
  Obtained from environmental sample
  DOMAIN (1)...(132): SMF family
  misc_feature (1)..(175): Xaa is any amino acid
MGIDTMSHRGSLIGNAPGYAVLGSGIDEVYPSANRPLAKRILDSGGALLSEYPPGIHATKWTFPARNRIIAAMSRGVLIVEAPEKSGALITADFAVEQGKDLWVASSGLLENANFDKRGTIKLANDGAEVINSACDILRKWNMETGSSYVKRAEETNKGMDDYIISLADFLKIEI

SEQ ID NO: 62537 - DNA, 411 bp, Unknown
  Obtained from environmental sample
  misc_feature (1)..(411): n is a, c, g, or t
atgaccgcgggccttgatctgggagagtggaacgatctgcatccttcaaacaaaaaggaagtaggccgcagactgtttctggcggcggaacgggtggtatttaaaaacagaaacgccccctccagccccatgtgccgtgaggttaagttgctcgggagcagactgtttttgacttttgacaactgtgacagcggccttatcgcgcacgatatgccttacgttagcatagtcgcggacgggaagttattacggatgcctgtggaaatagagaagcacgatactttatcggtggatctttcttctgtcaaaaaaccagaaaagatattatacgcctgggcgaacaatcccaaggatcggcaattatacaattgcgaagggttgccgtttattccatttaagatggatttgtaa

SEQ ID NO: 62538 - protein, 136 aa, Unknown
  Obtained from environmental sample
  misc_feature (1)..(136): Xaa is any amino acid
MTAGLDLGEWNDLHPSNKKEVGRRLFLAAERVVFKNRNAPSSPMCREVKLLGSRLFLTFDNCDSGLIAHDMPYVSIVADGKLLRMPVEIEKHDTLSVDLSSVKKPEKILYAWANNPKDRQLYNCEGLPFIPFKMDL

SEQ ID NO: 62539 - DNA, 1416 bp, Unknown
  Obtained from environmental sample
  misc_feature (1)..(1416): n is a, c, g, or t
atgaaaaatttaattcttccgcccatgttcagcgacggaatgcttatacagcaaggaactgcttttcccatcagtggatacgcttcctccatggtgacagtcacctttttgggcaaaacttatcagtcgcaggatggggcggacggcaaatggcagatgcttctcgatcctgttcaggcaggcggcccctttacaatggaaatagaatctggggaaaccagggtttgcataaaggacatttattcaggcgacgtatgtctctgtgcaggccagtctaatatggatcatcccatgcaaccccatagggacaactatcaagaagaatggacggcgcaggctttccccccaatccggcaattcaaggcaccctatgagtgggatttttcaggcccacgcgaagaactaagcggtggcggctggtctgtcgcgactgcggagactctcaatgaatttttggtggtagcctggtttttcgccaggaacctctacgagaaataccatcttcctatcggccttatttgtaccgcgtggggtggaacaccaatcgaagcctggatgagccgtgaggctctggcaaattttcccgaaaaaataacccagggtgagcaatacgccagagcggctgtgtgcaaagaaatcagcgcaaaaagtgaagccgcgattcaggaatgggaggggcagctgatccgcgaagacgaaggcttaaaagaaaaatggcaaagccccgaaatcagtctctccggctgggacgatataaccttgccgggagatttttcggaagccggaccaggaaccgataggcccctttcgagtttctgcggcgttatctggctgtgccgggaattttatgtaaaggcgaattttgccgcgcatgatgccagggtatggctgggcacgattgtagactcggacacggtatacatcaacggcgttgaagtggggaacaccggttaccgttatccgccgcgaaagtacctgataccagcgggcctgcttcgcgaaggaaaaaaccgcatagttatcagggtcagttgcgttaatggcgaagggggaattaccagagacaagccgttccgcgttttttcagagcaaaactgcgtggaactggcaggaaaatggaaataccggatcggcgtaaaggcccagtcgcggcctgaggctttcttctttcaaaggcagccaacggggcccttcaatgcaatgattgcccccatactgaggtttccgctccggggcgttatctggtatcagggcgagtcanatgagaggaacccggacgattacgccgctctttttaaggctatgattcangattggcgaaatagtccggtcaggagaatcttccatttctgtttgtacaacttccccattttggcagtcccaccgaaaatgacgagaccgcatcctgggcgataa

SEQ ID NO: 62540 - protein, 471 aa, Unknown
  Obtained from environmental sample
  DOMAIN (226)...(357): Glycosyl hydrolases family 2, sugar binding domain
  misc_feature (1)..(471): Xaa is any amino acid
MKNLILPPMFSDGMLIQQGTAFPISGYASSMVTVTFLGKTYQSQDGADGKWQMLLDPVQAGGPFTMEIESGETRVCIKDIYSGDVCLCAGQSNMDHPMQPHRDNYQEEWTAQAFPPIRQFKAPYEWDFSGPREELSGGGWSVATAETLNEFLVVAWFFARNLYEKYHLPIGLICTAWGGTPIEAWMSREALANFPEKITQGEQYARAAVCKEISAKSEAAIQEWEGQLIREDEGLKEKWQSPEISLSGWDDITLPGDFSEAGPGTDRPLSSFCGVIWLCREFYVKANFAAHDARVWLGTIVDSDTVYINGVEVGNTGYRYPPRKYLIPAGLLREGKNRIVIRVSCVNGEGGITRDKPFRVFSEQNCVELAGKWKYRIGVKAQSRPEAFFFQRQPTGPFNAMIAPILRFPLRGVIWYQGESXERNPDDYAALFKAMIXDWRNSPVRRIFHFCLYNFPILAVPPKMTRPHPGR

SEQ ID NO: 62541 - DNA, 759 bp, Unknown
  Obtained from environmental sample
  misc_feature (1)..(759): n is a, c, g, or t
atgatcaaccattgggacaatatggaaggcacgattgagcggggctatgccgggccttcgctttttttccgtaacggacgcattgactatgaaaagcagcgtatagaagattatgctcgtctgctggcctcgattggcattaaccgcatttccattaacaacgtcaatgtcggcggcaacgcaaaactccttatcacccctgagtacctcgaggatgttgccgctctggcggccatcttccgccccttcggtattaggctgatacttagcattaatttcggagcgccctggtcgcttggaaaactccccaccgccgacccgcttgatccggctgtagccgcgtggtggaaagagcgtgctgaccttatctaccaatatattcccgatttggcgggctttcttgtcaaggcggattctgaaggcgcacatggccccttccagtacaaccgtacccacgcagatggcgcgaatatgttggcaaaagcggtaaagccacacggcggcgaaattgtctggcgctgttttgtgtacaactgccagcaggactggcgcgatcatagctttgaccgcgcccgcgccgcctacgatcattttatgcccctggacggagcgtttgacgataacgtgattctccagataaaattcggcccctacgattttcaggtacgcgagcctgttgcgccgctttttggtgcccttaaaaaacccgtcatgtcatggaacaccagattacccaggaatacaccggccatcagatag

SEQ ID NO: 62542 - protein, 252 aa, Unknown
  Obtained from environmental sample
  DOMAIN (1)...(250): Glycosyl hydrolase family 67 middle domain
  misc_feature (1)..(252): Xaa is any amino acid
MINHWDNMEGTIERGYAGPSLFFRNGRIDYEKQRIEDYARLLASIGINRISINNVNVGGNAKLLITPEYLEDVAALAAIFRPFGIRLILSINFGAPWSLGKLPTADPLDPAVAAWWKERADLIYQYIPDLAGFLVKADSEGAHGPFQYNRTHADGANMLAKAVKPHGGEIVWRCFVYNCQQDWRDHSFDRARAAYDHFMPLDGAFDDNVILQIKFGPYDFQVREPVAPLFGALKKPVMSWNTRLPRNTPAIR

SEQ ID NO: 62543 - DNA, 882 bp, Unknown
  Obtained from environmental sample
  misc_feature (1)..(882): n is a, c, g, or t
atggaacaccagattacccaggaatacaccggccatcagatagacctgtgctatctgccctggctatgggaagacgttatgcgctttgacactgccggtgaaccagaggggcgcattaaagaccttatcggcccttactccgcaggccattcacgcatagaaggctttgcggctgtggtaaatgtgggaagggatcgcaactggacaggccacacgctggcacaggcaaacctatacggttacggacgaattatctggaacccctcactttccgcgcaggaaattgcccgcgagtggagcgtcctttcttttggcgcaggccgcgtcgcgcaaaccgtaacggaactgctattaaagtcctatcccgcctatgaaaagtacaacgccccatttggcgtgtgtttcatggtaacgcccggcccgcactacggcccgaatatcgaaggctacgagttcagccgctggggaacgtatcaccgcgccaacgcgcacgcaatcggcatcgaccgcacaccagcgggaaccggctacaccacacagtatgcggcaaaaaacgcggccatgtttgccgacccggcagcctgcccggaaaaccttatcctgtttttccaccgccttgattacgattacaagatgaaaaacggcgagacccttttgcagaatatctatgacacccattttgaaggctatgaggaagcggcggccatgctcgaacagtggaagggcctgaaagattcgcttaaagaggaagtgtaccaatcggtactttcccgctttgaacgccagcttgccaacgcccgcgagtggcgggatcagatcaacacctacttttggcgcaagacaggcatagcggacaagcggggacgaaagatttacgactga

SEQ ID NO: 62544 - protein, 293 aa, Unknown
  Obtained from environmental sample
  DOMAIN (69)...(292): Glycosyl hydrolase family 67 C-terminus
  misc_feature (1)..(293): Xaa is any amino acid
MEHQITQEYTGHQIDLCYLPWLWEDVMRFDTAGEPEGRIKDLIGPYSAGHSRIEGFAAVVNVGRDRNWTGHTLAQANLYGYGRIIWNPSLSAQEIAREWSVLSFGAGRVAQTVTELLLKSYPAYEKYNAPFGVCFMVTPGPHYGPNIEGYEFSRWGTYHRANAHAIGIDRTPAGTGYTTQYAAKNAAMFADPAACPENLILFFHRLDYDYKMKNGETLLQNIYDTHFEGYEEAAAMLEQWKGLKDSLKEEVYQSVLSRFERQLANAREWRDQINTYFWRKTGIADKRGRKIYD

SEQ ID NO: 62545 - DNA, 1488 bp, Unknown
  Obtained from environmental sample
  misc_feature (1)..(1488): n is a, c, g, or t
ttgatgacgccccatttggacgggagaatttggtacccttcccttatatcgtgccacgcggctctggcagcgtggataaccggcagctctgtaaaaattatgcttaagcgcgaagaagactttttatactcctccaaacggaacagggctgagatcgaaatgtgcagcgctgtggaagagaaaggaacgattaggagttccatcgtacaggcacagctggatctgggagcgcacgctgtctttgaaaacgaaattatggaccatacctgcctgggttccctcggaaattgcaatcacggcgcttttgaaattgaatgctctggtattctaaccaatatccccccgcaggggcctttcgcaggctttgggcttgcccagggttttttcgcggcggaacgacacttttcacacatagccgacactcttggcctggatccggcggagtggagaaagaacaattgcattaggaaaaaccaaagccttatctttgacctaactattaaagatatgcctccccttgaaaaacttattgatggcgccgcatttatgagcgattactaccgtaaatgggcaagctatgagcttttaaggaaacgacgcaggggagaaaagtgggagtcagattcaataccgctgcgcggtataggaatttccacggcctatcaaggcagcggttttttgaacgcgagcgaaccgggaatcggcaattattcggtggaagtaaccctggaaaaagacggattccttgaaattaaaaccagtatgatctcgtcaggcgcaatgcttcagaatacatggcataatctggcccaggagatccttggggtggatccttcaatgatcaggctgacggggaataccgttattgccccggattccgggcccggaaccctctcaagaaacatcagctcgataacccgcctggtagaaaagtgctttacgacaatacgcaatcagcggtttcgcgatcccctgcccataaccataaagcgatcaagcaagccgggtaaaacgcaaagcagggttcctgaatcttttgctttcccaagctgggcagcggcggtagtagaaattgaaattgatcctgtatctctccatcctgttacaaaaggaatctggcttgccgtagaaggggggaatatcctcaacgaacgccgcgcaaggctcactctaaaaaccagcgccattcaggctcttggctgggcaagccgcgaacatcttttctacgaagaaggcaaaattcctgttgagtgtttcagggattacaatatccccgccccggaagatattcctcccataacagtggattttctacatagcaatgtcgtgattcacaaaggcataggcgaccttccattctgttgtatacctgcggcttatgttcaggccgtctcccaggcaatggatcaccattttgaaaaaatccctcttggcataaaagacatctgggacacctggaagaaaaaacatccggagccgccaaaatga

SEQ ID NO: 62546 - protein, 495 aa, Unknown
  Obtained from environmental sample
  DOMAIN (1)...(431): Aldehyde oxidase and xanthine dehydrogenase, molybdopterin binding domain
  misc_feature (1)..(495): Xaa is any amino acid
MMTPHLDGRIWYPSLISCHAALAAWITGSSVKIMLKREEDFLYSSKRNRAEIEMCSAVEEKGTIRSSIVQAQLDLGAHAVFENEIMDHTCLGSLGNCNHGAFEIECSGILTNIPPQGPFAGFGLAQGFFAAERHFSHIADTLGLDPAEWRKNNCIRKNQSLIFDLTIKDMPPLEKLIDGAAFMSDYYRKWASYELLRKRRRGEKWESDSIPLRGIGISTAYQGSGFLNASEPGIGNYSVEVTLEKDGFLEIKTSMISSGAMLQNTWHNLAQEILGVDPSMIRLTGNTVIAPDSGPGTLSRNISSITRLVEKCFTTIRNQRFRDPLPITIKRSSKPGKTQSRVPESFAFPSWAAAVVEIEIDPVSLHPVTKGIWLAVEGGNILNERRARLTLKTSAIQALGWASREHLFYEEGKIPVECFRDYNIPAPEDIPPITVDFLHSNVVIHKGIGDLPFCCIPAAYVQAVSQAMDHHFEKIPLGIKDIWDTWKKKHPEPPK

SEQ ID NO: 62547 - DNA, 621 bp, Unknown
  Obtained from environmental sample
  misc_feature (1)..(621): n is a, c, g, or t
atggccattcacacaagtaaggtattcttcccatccggcttccaggagcttttttccatctggaacagcaatcccgatgccgttttatgcgcgggagggacagaacatatcagaaaccaaagcggacttaaccaaacgcttccgcgaaacataatttccctggatgaaattgaagagctccgtaaaataagccgcagcgagcgatacctggaaataggctgtatggtaaaacttagccagataataaatttgggcaaaatagttccggaagtccttacccgctgcctggaaaaaatagcaagcccgcaattgcgaagccaggctaccatcggcggtaacatatgcaacccttcagtcaaattggacaccgccgctccaatgatcgctttggacgcgcaatacgagttgcgcagttcccagtcgacccggtgggtttccgcttccaggttttcttctcaaccgggaccgcccagcctggccagacaggaatgccttactcgcatccgtgtacctttggatccatggacttttaactggtaccgcaagttcaatttttcgctcgcaagtaaacctgggggctgtatcctgttaattttaagaaaccagaagagtatattctaa

SEQ ID NO: 62548 - protein, 206 aa, Unknown
  Obtained from environmental sample
  DOMAIN (4)...(173): FAD binding domain in molybdopterin dehydrogenase
  misc_feature (1)..(206): Xaa is any amino acid
MAIHTSKVFFPSGFQELFSIWNSNPDAVLCAGGTEHIRNQSGLNQTLPRNIISLDEIEELRKISRSERYLEIGCMVKLSQIINLGKIVPEVLTRCLEKIASPQLRSQATIGGNICNPSVKLDTAAPMIALDAQYELRSSQSTRWVSASRFSSQPGPPSLARQECLTRIRVPLDPWTFNWYRKFNFSLASKPGGCILLILRNQKSIF

SEQ ID NO: 62549 - DNA, 2511 bp, Unknown
  Obtained from environmental sample
  misc_feature (1)..(2511): n is a, c, g, or t
ttggccgagcggacgagtaaaacttggggagagttgcccatgcgctacgacaagttcaccttgaaaagtcaggaggccctggcccaggccggccacttggccgatcagcggggccagcaggaaataacgcccctgcacctgggcctgagcctggtgaaccagcccgaaggcctggtccggccggtcttggccaagaccggcgtgcccctgggccaggtggccgaaagcctggggcgggaggcggacaagctgccccgcgtctcgggcacgggcctttccagctatgtggggccggacctcaagacggccctggacctggccctggccgaggctgaaaaaatgcgggacgagttcgtctccaccgaacatctgctcctggctctcctggcccgcaaagagcagccggcggcccgggccttcttggacgccggcctgacccgggacctggtgttcaaggccctccaggacctgcgcggccagacccggatcacggaccagaaccccgaggaaaaattccaggccttgcagaaattcacccgggacctgaccgacgaggcccggcggcgcaagctggacccggtcatcggccgggacgaggaaatccgccgggtcatccaggtcctctcccgccgcaccaagaacaatccggtgcttataggcgaaccgggggtgggcaagacggccatagtcgaagggctggcccgccgcctggtttccggcgatgtgccggagtcgctgaaaaacaaaagaatcctgtccctggatttgggcgccctcctggccggggctcagttccgcggcgaatttgaggaacgcctgaaagcgctgatacacgaggtacagtccgccgaaggaaaaattatcctctttattgacgaactgcataccctggtcggagcgggcgccgcggaaggggcgacagacgcttccaacctgctaaaaccggctctggcgcgcggagaactgcgctgcataggggctactacgcttgacgagtaccgcaagcatatcgaaaaagacgcggcgctggaacgacgctttcagcaggtgtacacggcggaaccctcggttgaggacacaatagcgatcctgcgcggacttaaagaacgctacgaggtacaccacggcgtgcggataaaggatgaggcgttagtcgcggcggcaacgctttccagccgttatataacaagccgctttatgccggacaaggccatagacctcgtagacgaggcggcgagccgcctgaaaatggaactggacagccgccccaccgaactggacaaacttgaacgcaggctgcttcaattctcaattgaaaaacaggcgctttcccgagaagaagatcccgcgtcaaaagaacgcctaaccaaactggaaaaagaaatcgccgatattacggcggaacgcgacgccgtgaaagcccgctgggaagcggaaaaagtagacatccagggcatccgcgaattaaagcaaagaattgaagaattaaaaattgaagaaacccgttatgagcgcgaagganatcttttaaaagccgccgaaagtaagcacggaaaaattcccgaagcccagaaacagcttgccgcgctcgcgaaccttatggagaaaaagagggagagcgcaaaaggaggcggagcttccgcgcttttacgcgaggaagtaagcgaagaagacattgcgggcgtagtgtcaatgtggacgggtattcccgtttctaagatgctctccggcgaattgcaaaaatatttagaactggaaaaagctcttgaaaagcgcgttgtcggtcaggatgaagcccttgccgcagtcgccgacgcgatacggcggaacaagtccgggctttccgactcggcgcgcccgttagggtctttcctctttttgggaccgaccggcgttggaaaaactgaactcgccaaaacactggcggactttttgttcaatgacgaaaaagccctcaccagaattgacatgagcgagtacggagaaaaacattcggtaagccgccttattggcgcaccacccggttacgttggttatgagcagggcggccaactgacggaagcagtcaggcggcggccttacagcgtaatcctttttgatgaaatagaaaaagcccaccctgaagtgttcaatgtctttttacaaatactcgacgacggcagactgacggacggacagggacgcgttgtcgattttagaaatgtgattatcataatgacaagcaatttgggatcggacttgatactggaagcgaaaaaccctgaaacattgcgtgactctctgatggaacttttaaaacacagtttcaggccggagtttatcaaccgcattgacgagacggtaattttcaacaggcttggcaggggcgaaatcggcaaaatagttgacattcaattaacgcggctttcaaaacggcttgcggagcgcaagatcacacttacgcttacaaaccctgcaaagacgctgctgccgagcgcggatacgacccgatgttcggcgcacgcccgctga

SEQ ID NO: 62550 - protein, 836 aa, Unknown
  Obtained from environmental sample
  DOMAIN (576)...(815): Torsin
  misc_feature (1)..(836): Xaa is any amino acid
MAERTSKTWGELPMRYDKFTLKSQEALAQAGHLADQRGQQEITPLHLGLSLVNQPEGLVRPVLAKTGVPLGQVAESLGREADKLPRVSGTGLSSYVGPDLKTALDLALAEAEKMRDEFVSTEHLLLALLARKEQPAARAFLDAGLTRDLVFKALQDLRGQTRITDQNPEEKFQALQKFTRDLTDEARRRKLDPVIGRDEEIRRVIQVLSRRTKNNPVLIGEPGVGKTAIVEGLARRLVSGDVPESLKNKRILSLDLGALLAGAQFRGEFEERLKALIHEVQSAEGKIILFIDELHTLVGAGAAEGATDASNLLKPALARGELRCIGATTLDEYRKHIEKDAALERRFQQVYTAEPSVEDTIAILRGLKERYEVHHGVRIKDEALVAAATLSSRYITSRFMPDKAIDLVDEAASRLKMELDSRPTELDKLERRLLQFSIEKQALSREEDPASKERLTKLEKEIADITAERDAVKARWEAEKVDIQGIRELKQRIEELKIEETRYEREGXLLKAAESKHGKIPEAQKQLAALANLMEKKRESAKGGGASALLREEVSEEDIAGVVSMWTGIPVSKMLSGELQKYLELEKALEKRVVGQDEALAAVADAIRRNKSGLSDSARPLGSFLFLGPTGVGKTELAKTLADFLFNDEKALTRIDMSEYGEKHSVSRLIGAPPGYVGYEQGGQLTEAVRRRPYSVILFDEIEKAHPEVFNVFLQILDDGRLTDGQGRVVDFRNVIIIMTSNLGSDLILEAKNPETLRDSLMELLKHSFRPEFINRIDETVIFNRLGRGEIGKIVDIQLTRLSKRLAERKITLTLTNPAKTLLPSADTTRCSAHAR

SEQ ID NO: 62551 - DNA, 465 bp, Unknown
  Obtained from environmental sample
  misc_feature (1)..(465): n is a, c, g, or t
ttgtttttcagcgactccggcacatcgccggaaaccaggcggcgggccagcccttcgactatggccgtcttgcccacccccggttcgcctataagcaccggattgttcttggtgcggcgggagaggacctggatgacccggcggatttcctcgtcccggccgatgaccgggtccagcttgcgccgccgggcctcgtcggtcaggtcccgggtgaatttctgcaaggcctggaatttttcctcggggttctggtccgtgatccgggtctggccgcgcaggtcctggagggccttgaacaccaggtcccgggtcaggccggcgtccaagaaggcccgggccgccggctgctctttgcgggccaggagagccaggagcagatgttcggtggagacgaactcgtcccgcattttttcagcctcggccagggccaggtccagggccgtcttgaggtccggccccacatag

SEQ ID NO: 62552 - protein, 154 aa, Unknown
  Obtained from environmental sample
  misc_feature (1)..(154): Xaa is any amino acid
MFFSDSGTSPETRRRASPSTMAVLPTPGSPISTGLFLVRRERTWMTRRISSSRPMTGSSLRRRASSVRSRVNFCKAWNFSSGFWSVIRVWPRRSWRALNTRSRVRPASKKARAAGCSLRARRARSRCSVETNSSRIFSASARARSRAVLRSGPT

SEQ ID NO: 62553 - DNA, 312 bp, Unknown
  Obtained from environmental sample
  misc_feature (1)..(312): n is a, c, g, or t
ttggggagagttgcccatgcgctacgacaagttcaccttgaaaagtcaggaggccctggcccaggccggccacttggccgatcagcggggccagcaggaaataacgcccctgcacctgggcctgagcctggtgaaccagcccgaaggcctggtccggccggtcttggccaagaccggcgtgcccctgggccaggtggccgaaagcctggggcgggaggcggacaagctgccccgcgtctcgggcacgggcctttccagctatgtggggccggacctcaagacggccctggacctggccctggccgaggctga

SEQ ID NO: 62554 - protein, 103 aa, Unknown
  Obtained from environmental sample
  misc_feature (1)..(103): Xaa is any amino acid
MGRVAHALRQVHLEKSGGPGPGRPLGRSAGPAGNNAPAPGPEPGEPARRPGPAGLGQDRRAPGPGGRKPGAGGGQAAPRLGHGPFQLCGAGPQDGPGPGPGRG

SEQ ID NO: 62555 - DNA, 780 bp, Unknown
  Obtained from environmental sample
  misc_feature (1)..(780): n is a, c, g, or t
atgagaataaatatcgataaactgtttntaggcatcagcaaccccacgtttatcattgacgaagaaatattactcgatcttgcggcggaagaaaaagatcaacagattgaaaaagcggatattgattttgccgtctcttatttttccggaaaattcaacgtttcttcgcttgcggaaaccgcaaaaaacctttttgaaatatcaactaacgcttttgacaatatcatgcttgcgtggctcagcgagcttccgatagaaagggaaataatcgcttacggcagggggattttagccgccgctcaggattttaacagttttgatgataaacggcgggcggcggaaaaagcggcgaataaccgcacaaacgccgacgcgttaacggtattaacaacggcatataaagtgcagattgaagttcacaggatgatggggcttttgcggtttaccaagaatgaagacggcgagtttaccgcaaagtgcgaacccgatcatcttatccttccctgtcttggagatttttttaccgcccgttttggggacactccttgggcgattatcgacgaaaaaagagggttagttttaagcaaaaaacacggggaacgggcaaaaatcactattttagaggatgccgccgagggcatttccgccgccaagagcgacgaatgggaagacctttggaaacactaccacaaaacaattaacaacgaagaccgcaataatcccgatttacagcgtcagcttatgcccaaacgttactggaaacacctgccggaagtgtaa

SEQ ID NO: 62556 - protein, 259 aa, Unknown
  Obtained from environmental sample
  misc_feature (1)..(259): Xaa is any amino acid
MRINIDKLFXGISNPTFIIDEEILLDLAAEEKDQQIEKADIDFAVSYFSGKFNVSSLAETAKNLFEISTNAFDNIMLAWLSELPIEREIIAYGRGILAAAQDFNSFDDKRRAAEKAANNRTNADALTVLTTAYKVQIEVHRMMGLLRFTKNEDGEFTAKCEPDHLILPCLGDFFTARFGDTPWAIIDEKRGLVLSKKHGERAKITILEDAAEGISAAKSDEWEDLWKHYHKTINNEDRNNPDLQRQLMPKRYWKHLPEV

SEQ ID NO: 62557 - DNA, 834 bp, Unknown
  Obtained from environmental sample
  misc_feature (1)..(834): n is a, c, g, or t
atgatccgtgaagctggaaaatgggcagacaggttaagcgtcaatatagagcttccctccgaaaaaagtcttcaatgtctcgctcccgaaaaatccaaaaaggcgattatcagcgcaatgaatgatttttcatgtttaagccgcgaaatggaagagacaaaaaacaaaagcaaatttcttccgcggggaaaaacggcggaggttcaatttgcgcccgctggtcaaagtacccagcttatcgtgggggctacaaacgaggacgacagacagatcattaatttgacaagctctctatacagtaaattttcattaaagcgggtatactattcggcttttattcatccgggcagttatgcgcataagaaaaatatcctagatccgcgtctgcctgaaacctcaggtccgccgctggtcagggaacaccgtttatatcaggcggactggcttttacggttctaccattttgaagcgggggaaattttaacggaaaacgagccgttccttgacgcgcatatcgatcctaaaacggcgtgggcgttaaaaaatctggattttttcccgatagaaataaacagcgccgattacgaaaccttgcttcgtattcccggtataggagcgaaaaccgcgcggcggataatagagagcagacggtcgcgcgctttaacaatagaaaaccttcatagaatgggagcgaccttaaaacgcgcccgttattttttatcagccggcggagcgtatatcgatcggcccgacgatcccgtccgtatccgccgactgctctccgacgcggacggggcgggggcttcaactgccgcttttcgagttttaatatga

SEQ ID NO: 62558 - protein, 277 aa, Unknown
  Obtained from environmental sample
  DOMAIN (186)...(215): Helix-hairpin-helix motif
  misc_feature (1)..(277): Xaa is any amino acid
MIREAGKWADRLSVNIELPSEKSLQCLAPEKSKKAIISAMNDFSCLSREMEETKNKSKFLPRGKTAEVQFAPAGQSTQLIVGATNEDDRQIINLTSSLYSKFSLKRVYYSAFIHPGSYAHKKNILDPRLPETSGPPLVREHRLYQADWLLRFYHFEAGEILTENEPFLDAHIDPKTAWALKNLDFFPIEINSADYETLLRIPGIGAKTARRIIESRRSRALTIENLHRMGATLKRARYFLSAGGAYIDRPDDPVRIRRLLSDADGAGASTAAFRVLI

SEQ ID NO: 62559 - DNA, 480 bp, Unknown
  Obtained from environmental sample
  misc_feature (1)..(480): n is a, c, g, or t
gtggattttttatgccgtattacggatccgtatattaactggtggcgaaaaaaattaaatttacggcttggttttcttgatctttcttctattgttggaatagtggcgctttccgtattaagaagcatattatcttcaatatcgcgttatgaaaggataggcatagggattattcttggaatacttcttatggcgttatggtctataatttcatttataatcggtttctgtataattgttcttgttctgcgtttattcgcgtatttaacaaaccgtgacatatatacgcctttctggaaaattgttgaatccatttcccagccgcttttatacaaaaccaacagaataatattcggtaataaaatcggaagttatctgaaaggcataataattaccattcttataatgacggcaatatggctcggcggaggttatttaataccccgtatagcaaacctgcttttaagtttttcgttgtaa

SEQ ID NO: 62560 - protein, 159 aa, Unknown
  Obtained from environmental sample
  misc_feature (1)..(159): Xaa is any amino acid
MDFLCRITDPYINWWRKKLNLRLGFLDLSSIVGIVALSVLRSILSSISRYERIGIGIILGILLMALWSIISFIIGFCIIVLVLRLFAYLTNRDIYTPFWKIVESISQPLLYKTNRIIFGNKIGSYLKGIIITILIMTAIWLGGGYLIPRIANLLLSFSL

SEQ ID NO: 62561 - DNA, 870 bp, Unknown
  Obtained from environmental sample
  misc_feature (1)..(870): n is a, c, g, or t
atgcagctcatctgcgaaacctacgatttaatgaaaaatgtcctgggcctctcgcccgacgagatgggcaatgtgtttgatgagtggaacaagggatcgcttggcagttatctcatcgaaataaccagggacatacttcgatataaagacgcggacggcaaaccgctggtcgagaaaatcctggatacagccggccaaaagggaaccggcaaatggacgggcattgcggccctggaattcggcgtgcccctcaccctgattggcgaggcggtttttggccgctgcctttcagccgccaaggacgagcgcgtgcgtgcggcgaaggttttttcaagtccgaaggcggcggctcaggcggacaaagcggccttcatcaaagatttggaaaaggccctgtacgcgtccaagttagtgtcctacgcccagggttatcttctgatgcgtgaagccgcaggccagtacaaatggaaccttaactacggcggcattgccctgttgtggcggggcggctgtattatccgttcagtctttttaggcaagataaaggaagctttcgataaaaagccagacctggaaaaccttctgctcgatcctttctttgcaggcgtgattgaggaagctcaagccccgtggcgcagggttgttaccgcggcggtgcagagcggcgtcccagtcccggctttttccagcgcgctggcctactttgacggttaccgcagcgagtgtcttccggcgaatctgctccaggcccagcgggactacttcggcgcgcacacctacgagcgagttgacaaaaagcgcggagagttttttcacacgaactggaccggacatggtgggacaacaagcgcttctacttacaccgtataa

SEQ ID NO: 62562 - protein, 289 aa, Unknown
  Obtained from environmental sample
  DOMAIN (1)...(276): 6-phosphogluconate dehydrogenase, C-terminal domain
  misc_feature (1)..(289): Xaa is any amino acid
MQLICETYDLMKNVLGLSPDEMGNVFDEWNKGSLGSYLIEITRDILRYKDADGKPLVEKILDTAGQKGTGKWTGIAALEFGVPLTLIGEAVFGRCLSAAKDERVRAAKVFSSPKAAAQADKAAFIKDLEKALYASKLVSYAQGYLLMREAAGQYKWNLNYGGIALLWRGGCIIRSVFLGKIKEAFDKKPDLENLLLDPFFAGVIEEAQAPWRRVVTAAVQSGVPVPAFSSALAYFDGYRSECLPANLLQAQRDYFGAHTYERVDKKRGEFFHTNWTGHGGTTSASTYTV

SEQ ID NO: 62563 - DNA, 621 bp, Unknown
  Obtained from environmental sample
  misc_feature (1)..(621): n is a, c, g, or t
atggaagatgtacttgatgtatactcccgaaaatatgacaaaaaacgccctttggtgtgcatggatgaaatcccccggcagcttattggtgaatcccgtcctgctattccagccgagccggggaaacctgaacgatacgatacagaatatgtccgtaatgggacatgcgttatattcatgtttgcagccccgcttgagaaatggaggagggctgaggtaaccgaacggcggacaagaattgattgggcgcatcagataaaaaagcttgtaacagtagattttcctgattcggagaaaattgttcttgtaatggataatcttgacatacatactatgggttccctgtataaggcgtttccccctgaagaagcaaaacggctaagggacaaacttgaagtacattacacgccgaaacatgggagttggcttaatatggcggaaatagaaaacaatgtacttataaaccatggcctttcaaaacggattccaacaattgagcagatgaaaaatgaagtggctgcatggaccgaggcccggaaccggagtgctggtaaaatcaattggaagtttaccacagacgatgcacggattaaacttaaatgtctttatccacaattataa

SEQ ID NO: 62564 - protein, 206 aa, Unknown
  Obtained from environmental sample
  misc_feature (1)..(206): Xaa is any amino acid
MEDVLDVYSRKYDKKRPLVCMDEIPRQLIGESRPAIPAEPGKPERYDTEYVRNGTCVIFMFAAPLEKWRRAEVTERRTRIDWAHQIKKLVTVDFPDSEKIVLVMDNLDIHTMGSLYKAFPPEEAKRLRDKLEVHYTPKHGSWLNMAEIENNVLINHGLSKRIPTIEQMKNEVAAWTEARNRSAGKINWKFTTDDARIKLKCLYPQL

SEQ ID NO: 62565 - DNA, 495 bp, Unknown
  Obtained from environmental sample
  misc_feature (1)..(495): n is a, c, g, or t
gtgccggcaaaaaaatatattgtgacgctaacagaagacgaaaagaaaacattgaaagaaataatcaacaaaggaaagcatagcgcggaaaaacgcaaacgctctcaagcgcttttgcttgcggatgaaaattacacggatgaaattatagccgataaagcggggatgagtaggagagggctggaacaattacggcagcggtttgtcgaggacgggtttgaagcaacgcttgaagggaagccccgcggccataggccaaaagcattaggggcaaaggacgaagcgcgtttaatagcgttagcctgcagccccaaaccggatggacgctcccgttggagcttgcggcttttacaagggacatggaaaaccttggcatatactgatacaaaggcagtatcataccagacaatcagaaggactttaaaaaaaacgaaattaagccttggcaaagccaggaatggtgcataccgacaaggggggaaagcgattttgtag

SEQ ID NO: 62566 - protein, 164 aa, Unknown
  Obtained from environmental sample
  misc_feature (1)..(164): Xaa is any amino acid
MPAKKYIVTLTEDEKKTLKEIINKGKHSAEKRKRSQALLLADENYTDEIIADKAGMSRRGLEQLRQRFVEDGFEATLEGKPRGHRPKALGAKDEARLIALACSPKPDGRSRWSLRLLQGTWKTLAYTDTKAVSYQTIRRTLKKTKLSLGKARNGAYRQGGKAIL

SEQ ID NO: 62567 - DNA, 936 bp, Unknown
  Obtained from environmental sample
  misc_feature (1)..(936): n is a, c, g, or t
gtgaagatttttaacataaatttcaatattgaaactctatctctcaagtatttaattcaatttgcagaaacagaatctgttactgaagatattttaaaagaatatttagtagtatcctttttggaagatgaaaatattttatctaaagtatgcgaagaaaacggcgctgccggaaacagtctgagatccgccgcactggaagatttaaatgctttatgggatgtattttcaaaaaacatacttggaaattatattccttccatgaaacataaaatattttttgaagaatatcagagttcgctcaaaacggcagtgtcatcaggcagccccgcggaaatgctggaaaatttaattaaccattattccgcgttcggttcgggaaaaaacgccaaatataccgcgttcaaatggcagaatgttatgacaggcatcggtcagcctgacgatatttctttagatcgtcttttttgcctggattcacaaaaagaaatactgactgaaaatacttccctgtttttacgcgggttaccagccaataacgccctgttatatggcacaagcggcagcggtaaatccgccatggttaaagcgcttctgaataaatactataatcagggattacgtttagtggaaatacccaaagaaaaactggaagaactgcctcaacttgtagattgcattaaaaacaaacgtcttaaatatatagtttttatggatgatttatcgtttgaaacggacgatattgggtataaaaaattaaaggttattttagacggaagaattgaacggcagccgcaaaacattttattttacgctacttcaaacagatttcatattatcaatgaaacatggaaggaccgggaaggcgatgaagtccatttcagggataccatgagcgaaaaactgtcattatctgaacgattggaattcgcgtaa

SEQ ID NO: 62568 - protein, 311 aa, Unknown
  Obtained from environmental sample
  misc_feature (1)..(311): Xaa is any amino acid
MKIFNINFNIETLSLKYLIQFAETESVTEDILKEYLVVSFLEDENILSKVCEENGAAGNSLRSAALEDLNALWDVFSKNILGNYIPSMKHKIFFEEYQSSLKTAVSSGSPAEMLENLINHYSAFGSGKNAKYTAFKWQNVMTGIGQPDDISLDRLFCLDSQKEILTENTSLFLRGLPANNALLYGTSGSGKSAMVKALLNKYYNQGLRLVEIPKEKLEELPQLVDCIKNKRLKYIVFMDDLSFETDDIGYKKLKVILDGRIERQPQNILFYATSNRFHIINETWKDREGDEVHFRDTMSEKLSLSERLEFA

SEQ ID NO: 62569 - DNA, 459 bp, Unknown
  Obtained from environmental sample
  misc_feature (1)..(459): n is a, c, g, or t
atgcagatcctttcgggcgagcagtaccgctcccaggcgcaggacatttcccgccgtaccgaaataattccttcccaaaggggcgagatttacgaccgcagttatacgcagcctattgccctgaacaccgattccttcgcggtcagcattgtccccgccgaagtcccccgcagccagatacgggaactgtttgccgaagtcgcgaatattttgaaaatcccggtaagcgacattgaggcaaaaatccccgagcagtattaccgcctgtaccagcctgttgaaatcgccgtaaacgtcccttataccttaatagcctcgcttgccgaacgtaaggatgccctctccggcgtatcgtggaacagcaagcctttgcggaactacgcggatttgcgaagcctgtcccatgtcgtagggtatgtcggggatattacaagggatgagctgacccagcctttataa

SEQ ID NO: 62570 - protein, 152 aa, Unknown
  Obtained from environmental sample
  DOMAIN (22)...(152): Penicillin-binding Protein dimerisation domain
  misc_feature (1)..(152): Xaa is any amino acid
MQILSGEQYRSQAQDISRRTEIIPSQRGEIYDRSYTQPIALNTDSFAVSIVPAEVPRSQIRELFAEVANILKIPVSDIEAKIPEQYYRLYQPVEIAVNVPYTLIASLAERKDALSGVSWNSKPLRNYADLRSLSHVVGYVGDITRDELTQPL

SEQ ID NO: 62571 - DNA, 1194 bp, Unknown
  Obtained from environmental sample
  misc_feature (1)..(1194): n is a, c, g, or t
gtgcggggaagaagaatcgccggccaggggacccgcgtccctcctgaaacggggaaaaacctggtgctgacaatcgacaggcaaatccagacgctcgctgagcaggcgttaggcgaaaggatgggagccgtcgttgtaatgcgccccaacggggaaatattggcccttgtttcatacccctggtttgatcctaatatgtttaccggcggcgggcggggccagtataatatccttgtcaacgatccgaacaggccttttctgaaccgcgccatacagtcaagctatcccccggcttcaacttttaaggttattatgaccacggggataattgccgaaaactccttcccgccggaaaagaccgtggaatgcccgggcgagattgattacgggaacaggcagtggcgctgccatgtccgcaagccggggcatggacgcctgagtctgtcccgcgccatggcccagtcgtgcgacatttactactggaccgtgggccgtgattatctgggtgcggagaatatcgcctcgtacgcgaagatgtacggtttcggcacctctacgggcattgacctgcccggcgagactgacggctttcttccgacgccgcagtggaagtcaaggcgcttccacgagaaatggcttggcggcgataccatgaatatggcaatcggccagggctggactctggttacgccgatccagatggcaaacatggtcgcgtttgtggtaaacaacggcaaggtatacaggccccatttgcttaaagagatcagggatcccgcgacaggcgcgatagagcagataattgctccggaattgatgcgtcaaagcgatattaatcaaaaaacatttgaaaacgtccgtcgggatatgcgcggggttataagcgaggggacagccgtgtatccccttaatatcccaaaagtgcagattgcaggcaagacgggaaccggggaagtgggcttgcaggatcactggcattcatggtttgccgcctatgcgccgtataattcgaataaaccggaagagcagatcattgtttcggtaattgtggaggcggtaaatcagtgggagtggtgggctccttatgcttcggcgattatttttcaggggatttttgcgaaccagacctacgatcaagctgtgcggagccttggtttgcagcacctgatgccggttcaggggcgcagggaataa

SEQ ID NO: 62572 - protein, 397 aa, Unknown
  Obtained from environmental sample
  DOMAIN (42)...(373): Penicillin binding protein transpeptidase domain
  misc_feature (1)..(397): Xaa is any amino acid
MRGRRIAGQGTRVPPETGKNLVLTIDRQIQTLAEQALGERMGAVVVMRPNGEILALVSYPWFDPNMFTGGGRGQYNILVNDPNRPFLNRAIQSSYPPASTFKVIMTTGIIAENSFPPEKTVECPGEIDYGNRQWRCHVRKPGHGRLSLSRAMAQSCDIYYWTVGRDYLGAENIASYAKMYGFGTSTGIDLPGETDGFLPTPQWKSRRFHEKWLGGDTMNMAIGQGWTLVTPIQMANMVAFVVNNGKVYRPHLLKEIRDPATGAIEQIIAPELMRQSDINQKTFENVRRDMRGVISEGTAVYPLNIPKVQIAGKTGTGEVGLQDHWHSWFAAYAPYNSNKPEEQIIVSVIVEAVNQWEWWAPYASAIIFQGIFANQTYDQAVRSLGLQHLMPVQGRRE

SEQ ID NO: 62573 - DNA, 357 bp, Unknown
  Obtained from environmental sample
  misc_feature (1)..(357): n is a, c, g, or t
atgcgtatcccaggtgatcctcatgtaaaagatgaggcttttgattcggtatccgccgcttgcgaagaggacggagttctgatcatcgcaaaaccggcggacaaatctcttctatggtctgcgctgtcgctggccaaatcagttcaaagcagggtaaagcggatacaggcggaaaacacgcagcttaaacagaacattgaggacattcgcattattgaccgcgcaaaatgtatattaatttcatttatgaaaatgagcgagcaggaagcgcaccggtacatagaaaagcaggcgatggatatgcgttcgtcacgaaggtttgtcgcggaaggtatactgaagagatacgagaattaa

SEQ ID NO: 62574 - protein, 118 aa, Unknown
  Obtained from environmental sample
  DOMAIN (58)...(113): ANTAR domain
  misc_feature (1)..(118): Xaa is any amino acid
MRIPGDPHVKDEAFDSVSAACEEDGVLIIAKPADKSLLWSALSLAKSVQSRVKRIQAENTQLKQNIEDIRIIDRAKCILISFMKMSEQEAHRYIEKQAMDMRSSRRFVAEGILKRYEN

SEQ ID NO: 62575 - DNA, 687 bp, Unknown
  Obtained from environmental sample
  misc_feature (1)..(687): n is a, c, g, or t
ttgtgcggcaagagtcggactctgcctgtttcggcggcgggtccggagattgccgtggcgacgacaaaggctttttcggcgcagcttgtgctgctgtatattctcgcgatacggttcgccgccaagtcgggaaaattatcgcgggaagcggaacagaaactgctggatgagatagaagccctgcccgataaaacggcgggtttgcttaagcaggtcgacgccattcaaatgtacgcttcaacctgcgtcggatacaagagcatcttctttatcggcaggaatatcgattacgccatcgcgctggaaggttcgctgaaactcaaggagatctcctatattcactccgaagcctacgcgggcggcgaattgaagcacggcaccatttcgctggttgagcaggacacgctggttgtcgccatctccaactgcgccccgctatacggcaaaattatgagcaacgcggagcaggtgataagccgcggcgcgaaagttctgcttatcggcaattgcccggacgcaaagcctgacgacaaactcttccatatcgctttgccggaaagtcttgatttattttccccttccctgtcggttattgttttacagcttttcagttattatgtcgccgcgaacaagggtttggatatagataagccgagaaatttagccaaaagcgttaccgttgaatag

SEQ ID NO: 62576 - protein, 228 aa, Unknown
  Obtained from environmental sample
  DOMAIN (79)...(214): SIS domain
  misc_feature (1)..(228): Xaa is any amino acid
MCGKSRTLPVSAAGPEIAVATTKAFSAQLVLLYILAIRFAAKSGKLSREAEQKLLDEIEALPDKTAGLLKQVDAIQMYASTCVGYKSIFFIGRNIDYAIALEGSLKLKEISYIHSEAYAGGELKHGTISLVEQDTLVVAISNCAPLYGKIMSNAEQVISRGAKVLLIGNCPDAKPDDKLFHIALPESLDLFSPSLSVIVLQLFSYYVAANKGLDIDKPRNLAKSVTVE

SEQ ID NO: 62577 - DNA, 306 bp, Unknown
  Obtained from environmental sample
  misc_feature (1)..(306): n is a, c, g, or t
atgaatttaccccttcttacaaacaaaataagccgtcaacgccagcttctttacatgagtcttcccataatactctatataattcttttcacttatgtccctctttggggctggacaatggcgttccagaatttcaaaccaatgaaaaaattttccgaacaggaatgggcgggtttatactggttcaagtttctttttgcagacaaggtattcctaagaactatacggaataccgttgcgatgagttttataaatacttcatttggggtttataacagccataggctttgcccttttattgaatga

SEQ ID NO: 62578 - protein, 101 aa, Unknown
  Obtained from environmental sample
  misc_feature (1)..(101): Xaa is any amino acid
MNLPLLTNKISRQRQLLYMSLPIILYIILFTYVPLWGWTMAFQNFKPMKKFSEQEWAGLYWFKFLFADKVFLRTIRNTVAMSFINTSFGVYNSHRLCPFIE

SEQ ID NO: 62579 - DNA, 657 bp, Unknown
  Obtained from environmental sample
  misc_feature (1)..(657): n is a, c, g, or t
ttggggtttataacagccataggctttgcccttttattgaatgaagtaagaaaagttctttttaaacgtgttattcaaaccatttcctaccttccccacttcctttcatgggttatagttacagggcttgtgtccagtatgcttaccacggacggcggagcggtgaacagcgcgtttgtggcgttaggcataataaaggagccgattttgtggctcgccgaaccaaaatatttttggggtgtagtcggcataacttatgtatggaaagaagtaggatggaataccattatatacctcgcggcaatctcgggtatcgatccgaatttatatgaagccgcggaaattgacggatgcaacaggtatcaaaaaatgtggcgcattacccttccttgcataaagcctacaataattattttgttaataatgagtataggtcaggttcttgaagcgggttttgaattgcaatatttgctcaggaaaccgcttgtaatggacgtatcggataccatcgatatttatgtgtatgtattcggcctgagtcatttaaacttttcacttgccacagcggccggtatgttcaagaatttcgtaaacatatctcttatttttgtcgctaactggatcgccaaaagagccggagaggagcgtcttatataa

SEQ ID NO: 62580 - protein, 218 aa, Unknown
  Obtained from environmental sample
  DOMAIN (1)...(214): Binding-protein-dependent transport system inner membrane component
  misc_feature (1)..(218): Xaa is any amino acid
MGFITAIGFALLLNEVRKVLFKRVIQTISYLPHFLSWVIVTGLVSSMLTTDGGAVNSAFVALGIIKEPILWLAEPKYFWGVVGITYVWKEVGWNTIIYLAAISGIDPNLYEAAEIDGCNRYQKMWRITLPCIKPTIIILLIMSIGQVLEAGFELQYLLRKPLVMDVSDTIDIYVYVFGLSHLNFSLATAAGMFKNFVNISLIFVANWIAKRAGEERLI

SEQ ID NO: 62581 - DNA, 360 bp, Unknown
  Obtained from environmental sample
  misc_feature (1)..(360): n is a, c, g, or t
atgaaacttgaaagggtaaagcgggtcatatcggcgaaccttggcgagctgccgcttcaggaaaaaagcgcgacgttcacgcctgccgggacaaagcgcgaaaccaaggcaggggaagtgccggagaataccggctacaccgaaagccagacctttgccaagctgaagctgaagctcaatgcaacaggcaagctcggcgtcgaagagctgagcaacatgggcgaggacaccctcactatctttaccacaggcggcaagcagtacatgatgcccaacgcctgggtgatagagcccggcgagctgggcgatgccgaaatggacatcgagtacaactcggcgaccagcccgaggctggcgtag

SEQ ID NO: 62582 - protein, 119 aa, Unknown
  Obtained from environmental sample
  misc_feature (1)..(119): Xaa is any amino acid
MKLERVKRVISANLGELPLQEKSATFTPAGTKRETKAGEVPENTGYTESQTFAKLKLKLNATGKLGVEELSNMGEDTLTIFTTGGKQYMMPNAWVIEPGELGDAEMDIEYNSATSPRLA

SEQ ID NO: 62583 - DNA, 402 bp, Unknown
  Obtained from environmental sample
  misc_feature (1)..(402): n is a, c, g, or t
gtgcttatcgagcggcttgttaccagctataccgaaaacaccgacggcgggagggacaccagctacctcgacgtgcaggtgcccgaaaccgtcgacgcggtccggacctacatcaacgccgaggcgaaaaagaggttcaaaacctggaagctggcaaaaaccgaagagaacttcggctccggctcgaaggtgatgacctgcggcgtgtggcgctcctacctttgcgagctttacagcgaagtgttcatcaagggcaaacagtggtgccaggattttgagaactacaaaaaatccatcctggtcgaaatcaaaaaagacagcaaaaccaggcttgaatacctgcaccagccggaccttataggccagttctatatcggcgcggggctgctgcaattcaaatag

SEQ ID NO: 62584 - protein, 133 aa, Unknown
  Obtained from environmental sample
  misc_feature (1)..(133): Xaa is any amino acid
MLIERLVTSYTENTDGGRDTSYLDVQVPETVDAVRTYINAEAKKRFKTWKLAKTEENFGSGSKVMTCGVWRSYLCELYSEVFIKGKQWCQDFENYKKSILVEIKKDSKTRLEYLHQPDLIGQFYIGAGLLQFK

SEQ ID NO: 62585 - DNA, 582 bp, Unknown
  Obtained from environmental sample
  misc_feature (1)..(582): n is a, c, g, or t
ttgagacttgaaaaatatttttctttggaggattttatggaggaaaagaaggaactacccatttcggacacggtctctagtcagactcaaggaggcttaccgaaacaagaaaaaaacgccgcgctaagaacagcggcagtatttatattgagtctgattgttttgttgacgggaagctgtgacaaaaagcaaaagctttatatttacaactggacgtattacacgccggattccgtaattgaaaagtttgagaaagagtacaatgtcagggtaatttacgatgaatttgcgtctaacgaggacatgtacgcaaaacttaaatcaggaggaagcggctacgatattgttttcccgtcggcggattacacgtcaataatgatcaagcagggtatgcttgaaaaaatagataaatcgtcaattccgaacttggcaaatatagacccggtcgttcttaaattcgcggtgtacgattcaaatatggattattccgttccttactacttcggcgcggcgggcgtatgcgtaaataccgaaaaagttccaaactatgaaaaaaggctggtctatcttcgcaagggatga

SEQ ID NO: 62586 - protein, 193 aa, Unknown
  Obtained from environmental sample
  misc_feature (1)..(193): Xaa is any amino acid
MRLEKYFSLEDFMEEKKELPISDTVSSQTQGGLPKQEKNAALRTAAVFILSLIVLLTGSCDKKQKLYIYNWTYYTPDSVIEKFEKEYNVRVIYDEFASNEDMYAKLKSGGSGYDIVFPSADYTSIMIKQGMLEKIDKSSIPNLANIDPVVLKFAVYDSNMDYSVPYYFGAAGVCVNTEKVPNYEKRLVYLRKG

SEQ ID NO: 62587 - DNA, 552 bp, Unknown
  Obtained from environmental sample
  misc_feature (1)..(552): n is a, c, g, or t
ttggaactatcggcgctatcggaattaattggtacaggttcaaaatgcgcggctatgtgcagacaattcattctgcccatgattctgcctgaaattataatcggcgtctcgctctcaattttctttgccggcatcggcatccctcttggtctttttacaatttttgtcgcgcatactacatttaacctgccatttgtatttttaatggtcatggcgcggcttgatgaatttgatttttcaataatagaagccgccgccgatctcggcgcaagcgaaagagaaacgctctttaaggtaactcttcctatctgtatgccgggaataatatccggtcttcttaccgcgataacgctgtcgctggaagactttgttatcacattctttgtagccggtcccggctcttccactctgcctatttttatatattcggctatcacaagaaagggcggcattactccgctgataagcgctctttccgtcgctatgattttaggcactgtatttctctgcatcatgcttagaaaattcttaaagtacattgccgctaagtag

SEQ ID NO: 62588 - protein, 183 aa, Unknown
  Obtained from environmental sample
  misc_feature (1)..(183): Xaa is any amino acid
MELSALSELIGTGSKCAAMCRQFILPMILPEIIIGVSLSIFFAGIGIPLGLFTIFVAHTTFNLPFVFLMVMARLDEFDFSIIEAAADLGASERETLFKVTLPICMPGIISGLLTAITLSLEDFVITFFVAGPGSSTLPIFIYSAITRKGGITPLISALSVAMILGTVFLCIMLRKFLKYIAAK

SEQ ID NO: 62589 - DNA, 408 bp, Unknown
  Obtained from environmental sample
  misc_feature (1)..(408): n is a, c, g, or t
atgggtcaaagtatagcggcgaaaattatcacctctttaagaccgcagaaaaataccggagaagcgtcaagacacgcaaaaagagcgtacagacagcgcgtttcaatgtcgcaggctgtttttatagctaccattatttttctatttcttcctcttgtagtccttgtaatttattcatttaacaattctaccggcatgaattggacgggattttccctgcgctggtacgataggcttttaaaatcgcgcgaactgtggagggctttaagtaacagccttattatagccgtatcgtcggcagctaccgctacggtgcttggaactatcggcgctatcggaattaattggtacaggttcaaaatgcgcggctatgtgcagacaattcattctgcccatgattctgcctga

SEQ ID NO: 62590 - protein, 135 aa, Unknown
  Obtained from environmental sample
  misc_feature (1)..(135): Xaa is any amino acid
MGQSIAAKIITSLRPQKNTGEASRHAKRAYRQRVSMSQAVFIATIIFLFLPLVVLVIYSFNNSTGMNWTGFSLRWYDRLLKSRELWRALSNSLIIAVSSAATATVLGTIGAIGINWYRFKMRGYVQTIHSAHDSA

SEQ ID NO: 62591 - DNA, 888 bp, Unknown
  Obtained from environmental sample
  misc_feature (1)..(888): n is a, c, g, or t
ttgaacctgaagaccaagaaaaactacggtccgctctactccgccccaatggctgtttggtttactctctttttccttgcgccaatcgttatcatcgtcatttacagtttcttaaaaaaaggtctttacggcggcgtagaaaaagtattttcccttgacgcatatcattatctcggcgaccatatatttttaagcatttccctgcggacgataatcacatcgttaatcgctacaataattacaatttttatcgctctcccctgcggttatttcatggcaaaaagcaaaaatcaaactttattgctactgcttataattatccctttttggacaaactttcttatcagagtattcgcatggatgactattctcggaaacaacggctttcttaacgaaacgttaacgcgtatcggattaattaaagattatattccattcctttataaccaaaaagccgttatccttgttttggtttatatgtatctgccatacgccattctgcccttgttttcaaccatcgataaatttgatttttcgcttcttgaagcggcgagagacctcggcgctaataaacttttatcaatgataaaagtactgcttccgaatatccgcggcggcatttttaccgctgttctttttacttttataccgattttcggcgcttacgccgttccgcttcttgtaggcggcatggattcgtatatgcttgggaacataatcgccgaccagcttttaaaatcgcgtaactggccgcgcgccgccgctatttccatggtattaactgtggtaaccaccgtcggcgttgtatggatgatgtacgttcagaaaaaagacgcggcaaaaagaaaagaaattaaaaaactgaaaactgcagcagagggggtataa

SEQ ID NO: 62592 - protein, 295 aa, Unknown
  Obtained from environmental sample
  DOMAIN (67)...(281): Binding-protein-dependent transport system inner membrane component
  misc_feature (1)..(295): Xaa is any amino acid
MNLKTKKNYGPLYSAPMAVWFTLFFLAPIVIIVIYSFLKKGLYGGVEKVFSLDAYHYLGDHIFLSISLRTIITSLIATIITIFIALPCGYFMAKSKNQTLLLLLIIIPFWTNFLIRVFAWMTILGNNGFLNETLTRIGLIKDYIPFLYNQKAVILVLVYMYLPYAILPLFSTIDKFDFSLLEAARDLGANKLLSMIKVLLPNIRGGIFTAVLFTFIPIFGAYAVPLLVGGMDSYMLGNIIADQLLKSRNWPRAAAISMVLTVVTTVGVVWMMYVQKKDAAKRKEIKKLKTAAEGV

SEQ ID NO: 62593 - DNA, 732 bp, Unknown
  Obtained from environmental sample
  misc_feature (1)..(732): n is a, c, g, or t
gtggcttnttcgccgagactaaaaaatatttccaataccgaaataaaaaataaagttaacgattaccttaatcttgtgcgtcttgagggacatgccgaaaagaaacctaaccagctttccggcggacaaaaacagcgcgtcgccattgcccgcgctcttattaacgaaccaagggtactactgctcgacgagccgctttcggcgcttgacgctaaactgcgccagcacatgcttattgaactggatcgcattcatgatgaaataggcattactttcatttatgttacccatgatcaacaggaagctctttccgtatcagacaggctggctgtaatgaaccagggagatattctgcaaataggcactccgcaggagatttacgaaagcccggcgactgattttgtagcgcgctttatcggagaaacaaatctttttgacggaaaggttgtaagagccgaaaaaattgatgtacaggacgctcaggaagagtacatggtggaactggaaattccggaattgggtaatataaaagtaactactgttgacaatgtacatacgggacagcttgtaagctttaccattaggcctgaaaaaatagtaataagcaaggaaaaacccgctacaaaacgggaagacataaatttaatcaccggaattgtagacgagccgatttattcaggcttccagacaaagttttatgtaaagtgcaggataaaactcttatccgcgtaa

SEQ ID NO: 62594 - protein, 243 aa, Unknown
  Obtained from environmental sample
  DOMAIN (2)...(115): ABC transporter
  misc_feature (1)..(243): Xaa is any amino acid
MAXSPRLKNISNTEIKNKVNDYLNLVRLEGHAEKKPNQLSGGQKQRVAIARALINEPRVLLLDEPLSALDAKLRQHMLIELDRIHDEIGITFIYVTHDQQEALSVSDRLAVMNQGDILQIGTPQEIYESPATDFVARFIGETNLFDGKVVRAEKIDVQDAQEEYMVELEIPELGNIKVTTVDNVHTGQLVSFTIRPEKIVISKEKPATKREDINLITGIVDEPIYSGFQTKFYVKCRIKLLSA

SEQ ID NO: 62595 - DNA, 630 bp, Unknown
  Obtained from environmental sample
  misc_feature (1)..(630): n is a, c, g, or t
atggtgcttatgcctggtactaagcgtagaaagacagagtcgatgaaggcggcgtcggaggcgtctaaggtctctgaacctgtacggcatgaaccgtatgggtcgggtgtcaaggctgtcgataccgataaatacgagccggcatctgataatgttgatgccgatggctccgacgaggttgcggcgttgcgacaagaggttgcggcgggtaaggacaggtacttgcgcctaatggccgagttcgacaattacaagcgccgttccggcaaggagtacgagcgccttgtctacgcggccaacgaaaagttgattttggagatggttgaggttcgggaaaatttcgagcgagcgctgaaatcgggcggcgccggcggggagttcgcgccgttttacgaggggatgaagctcatcttcgcaaagtacgacgaggtgcttacccgtaacggtttgatcccgttcgcggagatcggggagtctttcgacccgatgattcacgacgcgctaatgaaagcgccaaacgctcagataccggccgactgcgttgcggaagtctttgagcgcgggtatcgtttgaatgaaaaagtgataaaacacgctcgtgttgtagtttctagcggcagtgagggatga

SEQ ID NO: 62596 - protein, 209 aa, Unknown
  Obtained from environmental sample
  DOMAIN (44)...(205): GrpE
  misc_feature (1)..(209): Xaa is any amino acid
MVLMPGTKRRKTESMKAASEASKVSEPVRHEPYGSGVKAVDTDKYEPASDNVDADGSDEVAALRQEVAAGKDRYLRLMAEFDNYKRRSGKEYERLVYAANEKLILEMVEVRENFERALKSGGAGGEFAPFYEGMKLIFAKYDEVLTRNGLIPFAEIGESFDPMIHDALMKAPNAQIPADCVAEVFERGYRLNEKVIKHARVVVSSGSEG

SEQ ID NO: 62597 - DNA, 1122 bp, Unknown
  Obtained from environmental sample
  misc_feature (1)..(1122): n is a, c, g, or t
atgaatatggcgaaagcggactattacgacatattaggcgttccgaaaggcgcctccgacgacgatgtaaagaaggcgtaccgcaagctcgccgttaagtaccatcccgacaaaaatcccggagacaagaccgctgtggagaagttccgcgaggccaccgaagcctacgaggtgcttaaggacccgcagaagcgcgctcagtacgataagttcggtcacgcggcgtttgatatgccgcagggcggcggcgccggatacggcggcgggtatggcggcggcagtttcgacctctccgacgcgcttcgggcgttcatgaacgatttcggcggggactctatctttggcgacctcttcggcttcggttcgcgcacgcggcgcggcggcgggcacggggggacgcggggcaacgatctgcaggtcaagctcggtctcacgcttgaggagatatccgcgggtgttaagaagaccataaaggtcaggcgtttggacaggtgttccgagtgcggcggcagcggttccaagaccggtaagcgtattacttgtacgaaatgcggcggcagcggccgagttcgccacgttaccaactctttcttcggtcagatggttcaagagacggattgccccatctgccgcggcgacgggcagactgtctccgacccttgcgcggcgtgcggcggcagcggtctgcggcagtccgagtcgaccgtgtcggttgacattccggcgggcgtcgaagagggcaactacattcgggtacccggaaggggcgacgccggcaggggaggcggggagtccggcgacctcatcgtcatattgcacgagaaacctcacgatatattcacccgccacggcatagacctgagttgcaaactcgacatcaccttctccgaggcggcgctgggatgctcaaagaccatcaaaacgcttgaggacaaggtcagcctgaaaatcccgggcggcacgcagtcggaaaaagtcttcaagctcaagtcgaaggggcttacggagtatcacggcaggaacaggggggatttgctcgtaaaggtgcacgtcaacacgccggagaaactggggcgggaggagaaggatctgtttgagaagctggcgaagtatggtatgtag

SEQ ID NO: 62598 - protein, 373 aa, Unknown
  Obtained from environmental sample
  DOMAIN (152)...(235): DnaJ central domain (4 repeats)
  misc_feature (1)..(373): Xaa is any amino acid
MNMAKADYYDILGVPKGASDDDVKKAYRKLAVKYHPDKNPGDKTAVEKFREATEAYEVLKDPQKRAQYDKFGHAAFDMPQGGGAGYGGGYGGGSFDLSDALRAFMNDFGGDSIFGDLFGFGSRTRRGGGHGGTRGNDLQVKLGLTLEEISAGVKKTIKVRRLDRCSECGGSGSKTGKRITCTKCGGSGRVRHVTNSFFGQMVQETDCPICRGDGQTVSDPCAACGGSGLRQSESTVSVDIPAGVEEGNYIRVPGRGDAGRGGGESGDLIVILHEKPHDIFTRHGIDLSCKLDITFSEAALGCSKTIKTLEDKVSLKIPGGTQSEKVFKLKSKGLTEYHGRNRGDLLVKVHVNTPEKLGREEKDLFEKLAKYGM

SEQ ID NO: 62599 - DNA, 816 bp, Unknown
  Obtained from environmental sample
  misc_feature (1)..(816): n is a, c, g, or t
gtggcgggtgaatatatcgtgaggtttctcgtgcaatatgacgatgaggtcgccggactccccgcctcccctgccggcgtcgccccttccgggtacccgaatgtagttgccctcttcgacgcccgccggaatgtcaaccgacacggtcgactcggactgccgcagaccgctgccgccgcacgccgcgcaagggtcggagacagtctgcccgtcgccgcggcagatggggcaatccgtctcttgaaccatctgaccgaagaaagagttggtaacgtggcgaactcggccgctgccgccgcatttcgtacaagtaatacgcttaccggtcttggaaccgctgccgccgcactcggaacacctgtccaaacgcctgacctttatggtcttcttaacacccgcggatatctcctcaagcgtgagaccgagcttgacctgcagatcgttgccccgcgtccccccgtgcccgccgccgcgccgcgtgcgcgaaccgaagccgaagaggtcgccaaagatagagtccccgccgaaatcgttcatgaacgcccgaagcgcgtcggagaggtcgaaactgccgccgccatacccgccgccgtatccggcgccgccgccctgcggcatatcaaacgccgcgtgaccgaacttatcgtactgagcgcgcttctgcgggtccttaagcacctcgtaggcttcggtggcctcgcggaacttctccacagcggtcttgtctccgggatttttgtcgggatggtacttaacggcgagcttgcggtacgccttctttacatcgtcgtcggaggcgcctttcggaacgcctaa

SEQ ID NO: 62600 - protein, 271 aa, Unknown
  Obtained from environmental sample
  misc_feature (1)..(271): Xaa is any amino acid
MAGEYIVRFLVQYDDEVAGLPASPAGVAPSGYPNVVALFDARRNVNRHGRLGLPQTAAAARRARVGDSLPVAAADGAIRLLNHLTEERVGNVANSAAAAAFRTSNTLTGLGTAAAALGTPVQTPDLYGLLNTRGYLLKRETELDLQIVAPRPPVPAAAPRARTEAEEVAKDRVPAEIVHERPKRVGEVETAAAIPAAVSGAAALRHIKRRVTELIVLSALLRVLKHLVGFGGLAELLHSGLVSGIFVGMVLNGELAVRLLYIVVGGAFRNA

SEQ ID NO: 62601 - DNA, 603 bp, Unknown
  Obtained from environmental sample
  misc_feature (1)..(603): n is a, c, g, or t
ttgatggccgagaacaagaccggcatgacattcgcaacggcgctacggtcaatcctgcggcaagaccccgacatcgtcctgataggcgagatccgcgacagcgaaacggcggacatcgcgataaaaatggcgctgacagggcacttggtattcactacgatgcacacaaacgacgcggcaagcaccatagcccgtttcaccgacataggcatccctcccctactcctaggatcgtctcttaacctgatcgtggcgcagcggctggtacggaaaatatgccctaagtgcaaaatagaatacaaagccgcaccggaactgatacagagcctcggactagacccggaaaaagtcacgcaactctacaaaggcaacggctgcgttacctgcaacggcacgggcttcgcggggcgtacggcaatattcgaaatgctgcagatcacaaagaatatccgcaaactgataattaagaacgcgtccgcgcttgagattcaagaggcggcgattgcagaaaacatgaaaacgctgcggcaagccggcgcggaactggcggtgagcggcgagaccacgatagagcaggcgctggcggccacgattgagatttag

SEQ ID NO: 62602 - protein, 200 aa, Unknown
  Obtained from environmental sample
  misc_feature (1)..(200): Xaa is any amino acid
MMAENKTGMTFATALRSILRQDPDIVLIGEIRDSETADIAIKMALTGHLVFTTMHTNDAASTIARFTDIGIPPLLLGSSLNLIVAQRLVRKICPKCKIEYKAAPELIQSLGLDPEKVTQLYKGNGCVTCNGTGFAGRTAIFEMLQITKNIRKLIIKNASALEIQEAAIAENMKTLRQAGAELAVSGETTIEQALAATIEI

SEQ ID NO: 62603 - DNA, 1191 bp, Unknown
  Obtained from environmental sample
  misc_feature (1)..(1191): n is a, c, g, or t
atgcaggacaccgaaggctgggccttcgcgatcaaccttatcgcgcgctcctgccaaaaagctcccggctacagcggctatgtgcgtaacgcgatgaagcagaatatcttccggcttctggaaacggaaatatgggacggacttccggaacaaatgaagatttttttggtccgcctttcgctcatcgatcatctgtccgttgacttgatctcccggttggcgggaggtgaagaagaattgatcgccgggctggagaagcaaaacgcctatgtgcgccgggacaactttatcaacgcgtacttcattcaccctttgtttctggagttcttaagcacaaaacaggaaatcctttcggaagaacaaaaaagggaaacctacgccatttcaggcgattggtgcgcctgtaacggttttaacatagacgcccttttctaccatgaaaagacgggaaattatcaatcaatactgttagttttaaccgggttaaccactcaaataccgcaggatattgcgaaatatgcggccgctattcttgaccgcgcgcctgagaacgcgtttgacaaagtggaattccttgcggatatgcacttgcgtacctatatatgccagggatttctgcaaaaatcacttgagttggtgaaatactacgaagcanaattccttaaactgccggaaccccaaccgagcagcgtaagctgcgtcgaaccagaagttcgcggttcccctcttgatgaatacggactggagctttttctgcggagcgttggcactgagacaggaatgccggggcgctgcgctgtatgctaccgcttgcggctggaaagaacggctgccttcgcggcggaacacggctttaacgctttcagtacgagcctcctcatcagcccttaccagcggcatgaaacaatacaacatattggcgaagaattggcagcgcaatacggcgttgcttttttatacagggatttccggcctctattcaggaaaggccaggccgctgcccgcgcccagggcctgtatatgcaaaaatactgcggctgcattttttccgaaaaagagcgatatgaaaacaccctttctgacgggattgatgacaaaaaacaaaacgagttgtcaatacgctatgctggcgaacaacgacccccactccccactccccaaaggcgacgctgtcgcccccctactccctga

SEQ ID NO: 62604 - protein, 396 aa, Unknown
  Obtained from environmental sample
  DOMAIN (195)...(376): Uncharacterized BCR, COG1636
  misc_feature (1)..(396): Xaa is any amino acid
MQDTEGWAFAINLIARSCQKAPGYSGYVRNAMKQNIFRLLETEIWDGLPEQMKIFLVRLSLIDHLSVDLISRLAGGEEELIAGLEKQNAYVRRDNFINAYFIHPLFLEFLSTKQEILSEEQKRETYAISGDWCACNGFNIDALFYHEKTGNYQSILLVLTGLTTQIPQDIAKYAAAILDRAPENAFDKVEFLADMHLRTYICQGFLQKSLELVKYYEAXFLKLPEPQPSSVSCVEPEVRGSPLDEYGLELFLRSVGTETGMPGRCAVCYRLRLERTAAFAAEHGFNAFSTSLLISPYQRHETIQHIGEELAAQYGVAFLYRDFRPLFRKGQAAARAQGLYMQKYCGCIFSEKERYENTLSDGIDDKKQNELSIRYAGEQRPPLPTPQRRRCRPPTP

SEQ ID NO: 62605 - DNA, 960 bp, Unknown
  Obtained from environmental sample
  misc_feature (1)..(960): n is a, c, g, or t
atgcacggcgtatttgtaaacgcggacggaaaaaagacagcgattagaatcggcgaagagcctggagacccactgtttacaattaccgatcttctgcctcaccttgcaagggagcagatggagaaaaaagcgtcggaatttatggaagcggaaaaccttgacgttcttgctggctccaagccctacaatgacaaggacacgaaagaaaaagttaaacttggcgttttgtccctgcttaacgcgaaatacggcataacggaaaaagattttgccagcgcggaaattgaatttgttcccgccttcaaagcctccgacatcggttttgacagaagcatgataggcgcttacggccacgacgaccgctgctgttcattccccgctttaaaagcccttacggctctcgcgcacgagaaatcggcgccggaaaaaaccgttatctgctatttgtccgataaggaggaaataggttctgccggaaacacgggcgcgcgatcttacaattttgaaaattttatcgctttattatgcgaaagcgaagcggatttacggctttgttaccaacgctgcagcatgctgtccgccgatgtcaacgcggcctttgaccccacttatgccggagttttcgacaaaaagaattcttcatttatggggaagggtcttgtacttacaaagtacaccggaagcggcggcaagtacggagcaagtgacgccaacgcagaattttgcgccaaagtgcaggctattatgaacaagaacaaagtccagtggcagttcggggcgttaggaaaagtagacaaaggcggcggcggaacaatcgccctttatgccgccaatttgggaatggatgttcttgactgcggagttcctgtcttgtccatgcattcgccgtttgaggttataagcaagatcgatctttatacgacatacaggggatatatcgcttttttgaataacgcttaa

SEQ ID NO: 62606 - protein, 319 aa, Unknown
  Obtained from environmental sample
  DOMAIN (1)...(316): Aminopeptidase I zinc metalloprotease (M18)
  misc_feature (1)..(319): Xaa is any amino acid
MHGVFVNADGKKTAIRIGEEPGDPLFTITDLLPHLAREQMEKKASEFMEAENLDVLAGSKPYNDKDTKEKVKLGVLSLLNAKYGITEKDFASAEIEFVPAFKASDIGFDRSMIGAYGHDDRCCSFPALKALTALAHEKSAPEKTVICYLSDKEEIGSAGNTGARSYNFENFIALLCESEADLRLCYQRCSMLSADVNAAFDPTYAGVFDKKNSSFMGKGLVLTKYTGSGGKYGASDANAEFCAKVQAIMNKNKVQWQFGALGKVDKGGGGTIALYAANLGMDVLDCGVPVLSMHSPFEVISKIDLYTTYRGYIAFLNNA

SEQ ID NO: 62607 - DNA, 2016 bp, Unknown
  Obtained from environmental sample
  misc_feature (1)..(2016): n is a, c, g, or t
ttgaaaactctggaaggttatccgcttaacctgcgggttgcctgcgaagaattaatcgcggaacaggtaattttaccgcagcagttgtcaaaacttttacggttactgattaggggcgccaatgtaaaagaaatggcggaatttgccgggcagattttaggcaaggccatcgtaattccaaaaagttacgaaaagagtaccggcgccgaatgggaagcggaaagatccagttttgcgtatatttttgcaaataattttcttccggtattaagaatagtcgcatttgtgctcgcattactgttttcaactggctatcttgtctataaatttatatatacaccgataaaagccgaatcactttacaaacgcggccatgagcgtatcagcgccggtgaatatcaacgggctgaagagcttttccataaagcttttttaaagcaccgcaagaaaaaatggttctatgcatacgccgagggtttcagggatcaacggcgttatatgcttgcggaaaataaatacgacgaacttttaaggtactatccacgcgataaaaaaggcgttttggattacgctaatctggaaacaaattatctgctaaattacgaaaaagcaaacagactactgcagcacgaacttcttgattacgcgcctaatgattatgacgggcttctcgcagcgggggacaatttccttgcctgggcggattccgatccttcaaaattctatgataaatatgaagacgcgcgtttttgctacgcgagaataatgcaggactacggttggacagggccggttgtggaaagaatgctgctttactttatccatacggacaacctgaaagaaacccttaatttaagagcatggtttgaaaacaacagcagaaaatacaagcttactactccttctcttgcggaacttggcggctatcttttggacaaacaacttgaaaaagttaaaggcgtaccaaatgcgtatgtcgaaagcatagaaagcgtgcgtgatatgctgctgcaagctgtcaaagaagacccgtatctgccggaacctcactatcaccttgcccgttattataaaaatcttggaaatatccgcgaagaacggctgacgctggaaaacgccatacgcgcctatgaccttgcaaaaaaagaatccgtgcgccgccgccttaaccgcgtggacacacactaccgttacgcgaatttgcttatcaataacaaggaattcttccccgccgaagaacaattggtaagaggcatagaactttacgaagactttatttcaagaaatttaatagccccttccccgcagcttgggcagctttacgccgggttaggcgatttggaatattttgtaaagtcgggcaacatacaggccgccttgaataactaccacaccgccgaaaaatacggctggtcgccgcctgaaatccagtaccgtatgggagccgcgtattatcagcaggaaaagtgggggaacgcgcttgactatcttttcaaagcagcgtcagcgctgcccctgaacagacgcatacttttcgcgcttggaaataccgcttataagcgcggcgactattttgcggctcagggctactacaaccgcctgctcgacatattggaaaatcagcgcgtaaggctgcctgtgctttttcccaacgacagtccccaatttctggaacttggcgaacgcctgatgatggcgcgtaacaacgccggggttacctatgaagcgcttgcaaaacaatccggccgccgcgaataccgttcccgcgcattgtcgctttacgccgactccgcccgtgcgtgggattcaataacccgcaatcccgaatccatgacaaggatgagtataggcaacgcgcccggagcgccgggaattaatctgggctacctgaacgccaacaatgctctgcatccttcgtcaggttttacccctgaaattttcatccgcatagacagggatgtctctgaaccctcgcactgggaagagcttgcccccttcggcggattgattgattaa

SEQ ID NO: 62608 - protein, 671 aa, Unknown
  Obtained from environmental sample
  DOMAIN (508)...(541): Tetratricopeptide repeat
  misc_feature (1)..(671): Xaa is any amino acid
MKTLEGYPLNLRVACEELIAEQVILPQQLSKLLRLLIRGANVKEMAEFAGQILGKAIVIPKSYEKSTGAEWEAERSSFAYIFANNFLPVLRIVAFVLALLFSTGYLVYKFIYTPIKAESLYKRGHERISAGEYQRAEELFHKAFLKHRKKKWFYAYAEGFRDQRRYMLAENKYDELLRYYPRDKKGVLDYANLETNYLLNYEKANRLLQHELLDYAPNDYDGLLAAGDNFLAWADSDPSKFYDKYEDARFCYARIMQDYGWTGPVVERMLLYFIHTDNLKETLNLRAWFENNSRKYKLTTPSLAELGGYLLDKQLEKVKGVPNAYVESIESVRDMLLQAVKEDPYLPEPHYHLARYYKNLGNIREERLTLENAIRAYDLAKKESVRRRLNRVDTHYRYANLLINNKEFFPAEEQLVRGIELYEDFISRNLIAPSPQLGQLYAGLGDLEYFVKSGNIQAALNNYHTAEKYGWSPPEIQYRMGAAYYQQEKWGNALDYLFKAASALPLNRRILFALGNTAYKRGDYFAAQGYYNRLLDILENQRVRLPVLFPNDSPQFLELGERLMMARNNAGVTYEALAKQSGRREYRSRALSLYADSARAWDSITRNPESMTRMSIGNAPGAPGINLGYLNANNALHPSSGFTPEIFIRIDRDVSEPSHWEELAPFGGLID

SEQ ID NO: 62609 - DNA, 1197 bp, Unknown
  Obtained from environmental sample
  misc_feature (1)..(1197): n is a, c, g, or t
atgcgcggcgctgaattttccctatcagctttaatcgataaaacttttcccatgccggggcgttttcattccgccctgccctcgcaggttgccgaactttcccgcctgctcacgggcgcaaggggagaccgctctctttcatacctgagccgcccgaattacctttccgcctacctgcgttattttttgccgtggaacattctgcgcctctgccgcctcctgccctctctggaccttcctcttcgcgcaggggacataatcacggacctcggaagcggcccgctgacctttgtatcggcgctctggatctcccgcccggacttgcgcgctattccgcttgaatttatctgcatagacaactgcgcccccgcccttgcctcggggaaaaaattttttgccgcattatgctcgcaggcaaactgcgcgcatgaagactgcgcgtggaaagtgacgagtgtgcgtgagaagataaaccttaaaacaaagacgattcttgcgcacaggaaagccgccctcgtctgcgccgtgaatttttttaacgaaatatacgaagaccttccccatactgacagcgaggctcttaagcgcgcggcttttgatgcagctttattaatgcacaatcaagcgatgcctgaagcccgcattttgacactggaaccgggagtgccccaatcagggcaatttatcagttttttacgctccgcatttttggaacttggccgccctcccctgtcgccctgccctcattcggaaacttgcccaatgcccggcggcaaagcagccttcggtaaaaccgccttcgggaaagctaacagtaaaactgttaacacaaaaaatcgctggtgccactttgcctataccgcggcggacgttccgaaagaactaagcaggctatccgccgccgccggtattcccaaagaacggcttgtattaagctatttgctggcaggcgctcaaaaagaggggcataaacaaacaaaaacggcggaaaaagtgcgggttatatcagacgcgttttcgcttcccgacaataaatccggcagatacggatgttgttcagacggccttgttcttattgcaggaaataaaagccgcatagaaaaaatcgcttcgggagaccttgtgccaaaaagcggcgcgtttcccgacagtatgcgcgaccaaaaaagcggcgcgttgataatggagataaaatga

SEQ ID NO: 62610 - protein, 398 aa, Unknown
  Obtained from environmental sample
  misc_feature (1)..(398): Xaa is any amino acid
MRGAEFSLSALIDKTFPMPGRFHSALPSQVAELSRLLTGARGDRSLSYLSRPNYLSAYLRYFLPWNILRLCRLLPSLDLPLRAGDIITDLGSGPLTFVSALWISRPDLRAIPLEFICIDNCAPALASGKKFFAALCSQANCAHEDCAWKVTSVREKINLKTKTILAHRKAALVCAVNFFNEIYEDLPHTDSEALKRAAFDAALLMHNQAMPEARILTLEPGVPQSGQFISFLRSAFLELGRPPLSPCPHSETCPMPGGKAAFGKTAFGKANSKTVNTKNRWCHFAYTAADVPKELSRLSAAAGIPKERLVLSYLLAGAQKEGHKQTKTAEKVRVISDAFSLPDNKSGRYGCCSDGLVLIAGNKSRIEKIASGDLVPKSGAFPDSMRDQKSGALIMEIK

SEQ ID NO: 62611 - DNA, 930 bp, Unknown
  Obtained from environmental sample
  misc_feature (1)..(930): n is a, c, g, or t
atgaaaaaaaacctgagattttccggcctgcacaaccacacaattttctgcgacggcaaagacgatatagaaaccatgtgccgcgccgcgtttgaaaaaaaactttgcgcgttgggattcagcgcccacgcgccgattacaaaaaagacaggcattgaaagcgactggaatttaaaagacgataaatttgatgaatatgtagaacaggttcttgcggcaaaaaaacgctggcgtggggaactggaagttttacttggttttgaaattgattatataaaaggattgcgctcggctttggataaggacatcacggaggtaaaccccgattatttaataggcagcgttcattatctaattccggcaaacggcgcgaaaccgtttacggtggacggcccgcaagaggaacttgatcagggaattaacgaaggttttaacggggacgcgcaggcgtttatgaacagttattacgacgcgcagcttgagatgatagcgcttggaggttttgatattttaggacacgcggatcttatcaaaaaaaattgttttgggaaaaatttatggccgcaggaaactgagctttgccgccaaaaagaaatcgcgcacgccataggcgacgccataggcgacgccgcaggcgacgccgcaggcagggcaggcgttatagtagaagcaaatacgggaggaattaacagaaaaaagattaacgaggtttttccttctgaaacttttttaagattttttcgcgaaaataatgtgcctgtaattattacggcggacgctcattgcgcgtctgatattaaaggaaattatgataccgcggtaaaaactcttttatcagcgggtttttcggaacatgtaattattttccgaaaaagcggaaaaaaaataaaatatataaaagaaaaactgttaaatttccttgccgattaa

SEQ ID NO: 62612 - protein, 309 aa, Unknown
  Obtained from environmental sample
  DOMAIN (8)...(264): PHP domain
  misc_feature (1)..(309): Xaa is any amino acid
MKKNLRFSGLHNHTIFCDGKDDIETMCRAAFEKKLCALGFSAHAPITKKTGIESDWNLKDDKFDEYVEQVLAAKKRWRGELEVLLGFEIDYIKGLRSALDKDITEVNPDYLIGSVHYLIPANGAKPFTVDGPQEELDQGINEGFNGDAQAFMNSYYDAQLEMIALGGFDILGHADLIKKNCFGKNLWPQETELCRQKEIAHAIGDAIGDAAGDAAGRAGVIVEANTGGINRKKINEVFPSETFLRFFRENNVPVIITADAHCASDIKGNYDTAVKTLLSAGFSEHVIIFRKSGKKIKYIKEKLLNFLAD

SEQ ID NO: 62613 - DNA, 339 bp, Unknown
  Obtained from environmental sample
  misc_feature (1)..(339): n is a, c, g, or t
ttgccgattaataattatttacttattatttattcggaggcaattattatgaaaacaaatggaaaaacacccggaacgcttctgctggaattcatcagcaaaaacggcttaaattgcaacagagttgcaaaagaaatcaggtgcagtcaaacggctttaaggctgatcagtctggacaaaagccgcattacggcttcagtcgcagtccgccttgctaaatattttaatactaagcccgaattttggctgttaacgcagatgaagcatgatcttgtaaaagccgcaggcaataaaacattgtgtaaaaaactcagcagtatcagtatagtatctacctaa

SEQ ID NO: 62614 - protein, 112 aa, Unknown
  Obtained from environmental sample
  misc_feature (1)..(112): Xaa is any amino acid
MPINNYLLIIYSEAIIMKTNGKTPGTLLLEFISKNGLNCNRVAKEIRCSQTALRLISLDKSRITASVAVRLAKYFNTKPEFWLLTQMKHDLVKAAGNKTLCKKLSSISIVST

SEQ ID NO: 62615 - DNA, 672 bp, Unknown
  Obtained from environmental sample
  misc_feature (1)..(672): n is a, c, g, or t
atgccttctggaaaaataaaatgggaagcgatttttgccgcgcttgaaaaatggcgcaaagagttgggagaacaggatccttcggtaaataccgtcgctgaacaatacagccgatccccgtgggcggtgcttgtctctacaattatcagcctgcgtacaaaagacgatgtaactcttgcggcttccgaaaaacttcttgaaaaggcggcaagtcccgctgaactttctgcgttaagacaggataaaattgaaaaattgatatatccagccggtttttacaggaataaagccgcgtccttaaaaaaaatagccgccatactgattgaacagtacaacggcaaagttcccgcctcaatggaagttctgctctctcttccgggcgtcggcagaaaaacggcgaacctcgtgcttaacgaagcgtttgatcttgacgctgtctgcgtagacatacatgttcaccgtatttcaaatcggtgcggctggcttacaagcaaaaacccggaagaaaccgaaatgatcctaagggagattcttccgaaaaaattctggaaaaggatcaatcggcttcttgttctttacgggcagaaattatgccgacctgtaagccccttctgttcgcggtgcgtaatcgcgaaattctgttcccggcgtgatgtaaatcactttaggtag

SEQ ID NO: 62616 - protein, 223 aa, Unknown
  Obtained from environmental sample
  DOMAIN (110)...(139): Helix-hairpin-helix motif
  misc_feature (1)..(223): Xaa is any amino acid
MPSGKIKWEAIFAALEKWRKELGEQDPSVNTVAEQYSRSPWAVLVSTIISLRTKDDVTLAASEKLLEKAASPAELSALRQDKIEKLIYPAGFYRNKAASLKKIAAILIEQYNGKVPASMEVLLSLPGVGRKTANLVLNEAFDLDAVCVDIHVHRISNRCGWLTSKNPEETEMILREILPKKFWKRINRLLVLYGQKLCRPVSPFCSRCVIAKFCSRRDVNHFR

SEQ ID NO: 62617 - DNA, 1527 bp, Unknown
  Obtained from environmental sample
  misc_feature (1)..(1527): n is a, c, g, or t
gtgacgttagataaagtgtacacagggaacgccaccatctacgcccattggacgctaataacgtacacgatagcgttcgatctcaacggcgacacgggcaccatagcgccggccgtaacgggaaccggcggcaagttagcgtcactgccgacgcctgcggcgagaaccggttacacgttcggcggttggtacacggaaccggcgggcggcgtgaaggtggcgacaagcacggcgttctctgagaacgcgacgatctacgcccgctggacgcttgtgaattacgctataacgtacaatctcggcggcggaacggtgacgcccgctaatccgacgacttacaatatcgagacggacgtcacgctgaacaatccgacccggaccgcttacgagtttgccggctggacgggggcgaacggcacggtaaaggagttgtacgtgaccattccgcagggtagcagcggcgctaagagctatacggcgaactggacggctattatatacgacatatccttcgacgtcaacggcggcaatgatctggcgtctgcgaccgcgaagactgtggcgggcggaaggctctcgtccctgcccgcgcctacgaaggagaattacgccttcgacggctggttcacgcaagcgacgggcggcacgaaagtgacgactagcacggtgttcgacggcaacgcgacactctatgcccagtggtcgcttatccacaaggtgacgttcaacgccaacggcggcacggtaacgccgacgaccgcgaatacgggcgcgggcgggaagctcgcctcgctgcctacgcctacgctgagggaatacactttcatcggctggttcacggataaggataacggcgtcaaggtgtctacgagcactgtgtttgaagaagacgcggtactctacgcccattggacgaagctcgtaagcgttgtcgtgacgttcagcgccggcgccaacggaacgctttcggctacggtagacggcctcccgatcgcctcgggcgcgtcggttgatataggcaaggacattgtattcacggcctcgcccgccgccggttacaaagtattgagctggacgatgaacgggattcaggtcagagacgtggactcattgcctttgtacatattgtccggtctgtcgggcgcggccacggtaacggtgtcgtttgagcagggtatttccgtggcctcgcctaaccgcgagatccccggcggcgcgggcggcgaagtggccgccatatccccggtcaaggcgctctccggcgtcgtgacggtaggcccgaaccccgtgagggcgggcggcgaagcggcgatctactggaacggcggcaaagcggtcagcggcaaactgacggtgttcgacgcggttggcggaaaaacagcggtagtcaacgtcagaggcacgaataagataggcgcgtggaaaacaaacggcgtagccgagggcacgtacctgatcaaaggcgtactgaaagacaaaaacggaaccaaggtcatggtatcggtattggttgcggttgtaaggtag

SEQ ID NO: 62618 - protein, 508 aa, Unknown
  Obtained from environmental sample
  misc_feature (1)..(508): Xaa is any amino acid
MTLDKVYTGNATIYAHWTLITYTIAFDLNGDTGTIAPAVTGTGGKLASLPTPAARTGYTFGGWYTEPAGGVKVATSTAFSENATIYARWTLVNYAITYNLGGGTVTPANPTTYNIETDVTLNNPTRTAYEFAGWTGANGTVKELYVTIPQGSSGAKSYTANWTAIIYDISFDVNGGNDLASATAKTVAGGRLSSLPAPTKENYAFDGWFTQATGGTKVTTSTVFDGNATLYAQWSLIHKVTFNANGGTVTPTTANTGAGGKLASLPTPTLREYTFIGWFTDKDNGVKVSTSTVFEEDAVLYAHWTKLVSVVVTFSAGANGTLSATVDGLPIASGASVDIGKDIVFTASPAAGYKVLSWTMNGIQVRDVDSLPLYILSGLSGAATVTVSFEQGISVASPNREIPGGAGGEVAAISPVKALSGVVTVGPNPVRAGGEAAIYWNGGKAVSGKLTVFDAVGGKTAVVNVRGTNKIGAWKTNGVAEGTYLIKGVLKDKNGTKVMVSVLVAVVR

SEQ ID NO: 62619 - DNA, 768 bp, Unknown
  Obtained from environmental sample
  misc_feature (1)..(768): n is a, c, g, or t
atgggcgtagagtaccgcgtcttcttcaaacacagtgctcgtagacaccttgacgccgttatccttatccgtgaaccagccgatgaaagtgtattccctcagcgtaggcgtaggcagcgaggcgagcttcccgcccgcgcccgtattcgcggtcgtcggcgttaccgtgccgccgttggcgttgaacgtcaccttgtggataagcgaccactgggcatagagtgtcgcgttgccgtcgaacaccgtgctagtcgtcactttcgtgccgcccgtcgcttgcgtgaaccagccgtcgaaggcgtaattctccttcgtaggcgcgggcagggacgagagccttccgcccgccacagtcttcgcggtcgcagacgccagatcattgccgccgttgacgtcgaaggatatgtcgtatataatagccgtccagttcgccgtatagctcttagcgccgctgctaccctgcggaatggtcacgtacaactcctttaccgtgccgttcgcccccgtccagccggcaaactcgtaagcggtccgggtcggattgttcagcgtgacgtccgtctcgatattgtaagtcgtcggattagcgggcgtcaccgttccgccgccgagattgtacgttatagcgtaattcacaagcgtccagcgggcgtagatcgtcgcgttctcagagaacgccgtgcttgtcgccaccttcacgccgcccgccggttccgtgtaccaaccgccgaacgtgtaaccggttctcgccgcaggcgtcggcagtga

SEQ ID NO: 62620 - protein, 255 aa, Unknown
  Obtained from environmental sample
  misc_feature (1)..(255): Xaa is any amino acid
MGVEYRVFFKHSARRHLDAVILIREPADESVFPQRRRRQRGELPARARIRGRRRYRAAVGVERHLVDKRPLGIECRVAVEHRASRHFRAARRLREPAVEGVILLRRRGQGREPSARHSLRGRRRQIIAAVDVEGYVVYNSRPVRRIALSAAATLRNGHVQLLYRAVRPRPAGKLVSGPGRIVQRDVRLDIVSRRISGRHRSAAEIVRYSVIHKRPAGVDRRVLRERRACRHLHAARRFRVPTAERVTGSRRRRRQ

SEQ ID NO: 62621 - DNA, 1002 bp, Unknown
  Obtained from environmental sample
  misc_feature (1)..(1002): n is a, c, g, or t
gtgacgagagagcattacactttagagggctggtacacggcgagcacgaaggtggaggctaacgtcacggagttcaccggtgacgccacggtcaccgcccgctggacgcctgtgaaatacacgatatcgtacactctcggcgctgccgacgcggtgccgcccgttagcgccaatccggcggattataccatagagacaccgacctttacgctgaataatcccactcgagagggatatacattcgcgggttggacgaccgcgggcgtaacgaccccgcagccaaccgtaaccattgagaaggggagtttcggcgacaagagctatacggcgaattggacggttatcgtcacctacactataacgttcgattccaaaggcggcacgtcgattgccgcccgtccgaccggcgccgacggaaaagtgacgtcgtcgtggtggcccgcggttgaaaagagcgattccgcgtttgccggatggtacctatcgtcaacgtatagcgggacgaaactgccgacggaatacacgttcaccgagaacacgaccgtctacgctcgttgggcggcccccccgtttgtttacactatcacgttcaacgcctacggcggcaagttcgcgtctgaaaaagatacgacgtccggcaggaccggcagtgacagtacgctggcgttactgcctgagaatcctacgagggacggttacaagtttgaaggttggtacaccgcgacgtcgggcggtacgaaggtgacgacgtcttacaagttctccgggacagtggcggcaatcacaatctacgcccgttggacggttcttcccactataacgttcaacgccaacggcggcacggtctccacgccgaccggcggcacggcctccacgacgaccgtcaagactaacgtcaacggtataatcgagtcttatcctcccgatcccgacaagggccggttacgctttcgacggctggttcacggcggcgacgggcggcacggaggtgacgttagataa

SEQ ID NO: 62622 - protein, 333 aa, Unknown
  Obtained from environmental sample
  misc_feature (1)..(333): Xaa is any amino acid
MTREHYTLEGWYTASTKVEANVTEFTGDATVTARWTPVKYTISYTLGAADAVPPVSANPADYTIETPTFTLNNPTREGYTFAGWTTAGVTTPQPTVTIEKGSFGDKSYTANWTVIVTYTITFDSKGGTSIAARPTGADGKVTSSWWPAVEKSDSAFAGWYLSSTYSGTKLPTEYTFTENTTVYARWAAPPFVYTITFNAYGGKFASEKDTTSGRTGSDSTLALLPENPTRDGYKFEGWYTATSGGTKVTTSYKFSGTVAAITIYARWTVLPTITFNANGGTVSTPTGGTASTTTVKTNVNGIIESYPPDPDKGRLRFRRLVHGGDGRHGGDVR

SEQ ID NO: 62623 - DNA, 1053 bp, Unknown
  Obtained from environmental sample
  misc_feature (1)..(1053): n is a, c, g, or t
atgattcacctttcttccccaagcagcttcaggaagttttatttgttgaacgcaagcttactccgactaaaaaaacaaagacctggcttttctacggacgcggcggcaatggaagaccttgcgcggcaggaccccgtccccgcccttatactgcgccaccgcaccctttccaaattaaaatcaacttatgtcgataccttaggtgatatggcggacagcgaagggcgtgttcataccaactttgtgcagacaggaaccgctaccggccgcctttccagcagggaacctaacttacagaacattccggtacgcgcggaagaaggccggcgcatacgcgaggcgtttatcgcaaaacccggaagcctccttatttccgcagactacagccagatagagctcgttgtgctggctcatctttctgaagataaaaatttaatttccgcttttctggaaaacaaggacgttcacgcgcgcaccgcgtcgttgatcttcggcattgatgagagcgaaataaacggtgatcaacgaagaatggcaaaagtaataaacttcggcgtgatttacggaatgagcgccttccgtcttgccaacgagttgaacatcagccgtacggacgcggcgaattttatcaacgcatattttaacacatattcgggcgtcaggaattttatcgaaaatataatcaaaaaaacagaaaaatgcggttatgttacgacaatttcaggacaccgccgttatatccctacaattaattcgcggaacaaaaccgaaaaagcggcggccgaacgcatcacggtaaatacgccgattcaaggctccgccgcggatatcgtaaaaaccgccatgctttctttggataagcggcttacttcaacaaaaagcaaagcgcgtattttgttgcaggttcacgacgagcttatccttgaatgtcccgagaaagaagccgaaaaaaacacaaaaatcgtaaaggaagagatggaacaggctgtaaaattgcgaattccgttacgggttaatattgaaacaggacacaattggggtgtttttcactga

SEQ ID NO: 62624 - protein, 350 aa, Unknown
  Obtained from environmental sample
  DOMAIN (4)...(349): DNA polymerase family A
  misc_feature (1)..(350): Xaa is any amino acid
MIHLSSPSSFRKFYLLNASLLRLKKQRPGFSTDAAAMEDLARQDPVPALILRHRTLSKLKSTYVDTLGDMADSEGRVHTNFVQTGTATGRLSSREPNLQNIPVRAEEGRRIREAFIAKPGSLLISADYSQIELVVLAHLSEDKNLISAFLENKDVHARTASLIFGIDESEINGDQRRMAKVINFGVIYGMSAFRLANELNISRTDAANFINAYFNTYSGVRNFIENIIKKTEKCGYVTTISGHRRYIPTINSRNKTEKAAAERITVNTPIQGSAADIVKTAMLSLDKRLTSTKSKARILLQVHDELILECPEKEAEKNTKIVKEEMEQAVKLRIPLRVNIETGHNWGVFH

SEQ ID NO: 62625 - DNA, 1254 bp, Unknown
  Obtained from environmental sample
  misc_feature (1)..(1254): n is a, c, g, or t
atgtcgtctatagaagaaatgatctctaatagtattaatgcggaaataaaaattgtaggtataatcgtagcgggcattttattgggttcaatactgttaatttcgttaatcagcaaacttatcgttgtaaacccaatcgttaaggtagcgaatactttgcaggatatttccgaaggggaaggcgaccttacgcgcagtataactgtcagttccaatgacgaagtaggcgaccttgccaagttcttcaataaaactcttgaaaaaatcaaaaacctggtgcttctgataaaaaaacaagctggtctgttgtcgaccatcggcaatgacttgtccagtaatatgaccgaaacagcggcggcggtaaacgaaattaccgccaacatacaaagtgtaaaaaccagagtaataaatcagagcgaaagcgtaaccgagaccaacgcgacaatggatcaagttgtagccaacattaacaaactcaacggtcttattgcaaaaatggcggaaaatgtccatgcggtaacaaacacgctgatcaacaacgccgccaatgtaaaaacattactggaagcctccgaggtgggaaaggccggattggcggaagtagtaacggacattcaggaaatcgcccgggaatccgaaggcttgctggaaatcaacgccgtgatggaaaacatagccagccagaccaatttattaagtatgaacgccgcgattgaagccgcccacgctggggaagccggaaaaggtttcgcggtagtcgccgatgaaatccgcaaacttgcggaaagttccagcgaacagtcaaaaacgattggcagtgttttgaagaagataaaagaatcaatcgacaagataaccaaatccaccgaaaccgtaacaacgagatttgagtcgatagattcaggagtcaaaacggtggctgagcaggaagaaaacatcctcaacgcaatggaaagacaacagaaagatggccagctggacgatgtatcaaagatgaacgatatcagtttggctgaaatttcaagggtggtaaagtccggttccgaggaaatgcttgagggcagtcaggaagtactaaaagaaagccagaaccttgaaaaggtaacgcagganataacaggcggaatgaacgaaatggctaccggctctgaccagataaacctggcggtaaacaatgtcaatgatatgactgccaagaaccgcgaggccataaacagtttgataggagaagtttcacgcttcanagttgagtag

SEQ ID NO: 62626 - protein, 417 aa, Unknown
  Obtained from environmental sample
  DOMAIN (115)...(417): Methyl-accepting chemotaxis protein (MCP) signaling domain
  misc_feature (1)..(417): Xaa is any amino acid
MSSIEEMISNSINAEIKIVGIIVAGILLGSILLISLISKLIVVNPIVKVANTLQDISEGEGDLTRSITVSSNDEVGDLAKFFNKTLEKIKNLVLLIKKQAGLLSTIGNDLSSNMTETAAAVNEITANIQSVKTRVINQSESVTETNATMDQVVANINKLNGLIAKMAENVHAVTNTLINNAANVKTLLEASEVGKAGLAEVVTDIQEIARESEGLLEINAVMENIASQTNLLSMNAAIEAAHAGEAGKGFAVVADEIRKLAESSSEQSKTIGSVLKKIKESIDKITKSTETVTTRFESIDSGVKTVAEQEENILNAMERQQKDGQLDDVSKMNDISLAEISRVVKSGSEEMLEGSQEVLKESQNLEKVTQXITGGMNEMATGSDQINLAVNNVNDMTAKNREAINSLIGEVSRFXVE

SEQ ID NO: 62627 - DNA, 2199 bp, Unknown
  Obtained from environmental sample
  misc_feature (1)..(2199): n is a, c, g, or t
atgaaaattaaaataaaactaagtatcatgatgatcgctatagtactgatcgtgtcaggcggtcttaccgtacttcaaatgcgggaagctaccgacattagcatggatttaagtatccgtggtataaaatatttagctcaggagcaagccaaattctggcaaggtcgggaaaatggctatataagtcagttaaatggaattgcggacataatgggcgaatatgaaaagatacgaccggaagaacggcgggacttgtatgacaatatgttgctggctgttttgaataataatccccgctttgcccgcatattttccatctggaaaccaaacgccatggacggcatggatgcccgttatataggacgtccgggatcaacaccaacggggcaatacgcgatgacctggggcagggataccggtacaattgaagtaaagcctaacctcgtccttaatgaagttaatgaatggatgaacggtcccaacgcgctcaagactcgagttgaaaatcccacgccttttaagaatcacggagatgacacctttattatcagaataggagttcccataaccagaggtaccagcaacgaagtagtcgggcacttatgtgttcttgtggatatcattccgatacaagagggagtagataaagcccttanagattacgaagaaatagcccagatgtccatttactcaggcaacggatgtatcatgggaaacctgaacgccgaccgggtaggaaaaatgctgaccgaagtggaaagattatacggcgattatcagaaagacgccaaccaggctgttcttgacggcaagccgtttagctgttcaagctattcaaattcgttaaaatcaaacgtgagaattgaattggcgcccttccggataggcgattcagacaatacctggagcgtaatgattgcgtcgacggaagcctacatcatgaaagatgtcaattcaatgagaaattttattattattctggcggcagtatccctgataggctcggtagcaatcatatacttttccctgaataccattaccaagccaatagtcagggtagccgacaccctcagggacatatctgaaggcgaaggcgatctgacacgaaccattgccgtcagttccaaagacgagataggcgaccttgcgctgtacttcaacaaaacgcttaataaaattaaagaccttgtaatcagtattaaaaagcaggcaggcatattgttagaaataggcaatgacctgtccagcaacatgacagaaacggcggcaacggttaatgaaattaccgccaatattcagaacattaaaacccgcgttataaaccagagcgccagcgttactgaaaccaacgcgactatggagcaggttgttgaaaacatcaagaaagtaaataaacatgtcgaaaaccagagtcataacgtttctcaggcttcgtcggcaattgaacaaatggtagccaatatcaattcagttaccgacacgctggtcaaaaacgcaggcaatgtaaagacattgaaagaagcctccgaagcaggcaggacaggattacaggaagtgtcaacggacattcaggaaatcgcccgggagtccgaagggcttatggaaattaacgcggtaatagaaaatatcgcaagccagaccaatctgctttcaatgaacgcggcgattgaagcggcccacgccggagaagccggcaaaggtttcgccgtagtcgccggtgagatccgcaaactggcggagagttccagcgagcagtcaaaaacaattggcgctgttttgaaaaagataaaaggttccatagacaagatcacccgctccaccgaaaacgtgcttaacaggtttgaggcgattggctcaagcgtcaaggttgtttcacagcaggaggaaaatgtacgcagcgcgatggaggagcagggtcagggaagcaagcaaattctcgaaggcgtcggcaatgtgaacgaaatcactaggcaggtaaagagcggttccaatgagatgcttgaaggggcaaaggaagtaatacaggaaagtaacaatcttgaaaaagcaacccaggaaataaccggcggcatgaacgagatagcttccggcgcggatgagataaacgtcgcggtacaccatgtcaatgaaataagcgccaagaaccgcgaaggcattgacacgttaatacgcgaagtttcgcggttcaaggtggaatga

SEQ ID NO: 62628 - protein, 732 aa, Unknown
  Obtained from environmental sample
  SIGNAL (1)...(27)
  DOMAIN (468)...(688): Methyl-accepting chemotaxis protein (MCP) signaling domain
  misc_feature (1)..(732): Xaa is any amino acid
MKIKIKLSIMMIAIVLIVSGGLTVLQMREATDISMDLSIRGIKYLAQEQAKFWQGRENGYISQLNGIADIMGEYEKIRPEERRDLYDNMLLAVLNNNPRFARIFSIWKPNAMDGMDARYIGRPGSTPTGQYAMTWGRDTGTIEVKPNLVLNEVNEWMNGPNALKTRVENPTPFKNHGDDTFIIRIGVPITRGTSNEVVGHLCVLVDIIPIQEGVDKALXDYEEIAQMSIYSGNGCIMGNLNADRVGKMLTEVERLYGDYQKDANQAVLDGKPFSCSSYSNSLKSNVRIELAPFRIGDSDNTWSVMIASTEAYIMKDVNSMRNFIIILAAVSLIGSVAIIYFSLNTITKPIVRVADTLRDISEGEGDLTRTIAVSSKDEIGDLALYFNKTLNKIKDLVISIKKQAGILLEIGNDLSSNMTETAATVNEITANIQNIKTRVINQSASVTETNATMEQVVENIKKVNKHVENQSHNVSQASSAIEQMVANINSVTDTLVKNAGNVKTLKEASEAGRTGLQEVSTDIQEIARESEGLMEINAVIENIASQTNLLSMNAAIEAAHAGEAGKGFAVVAGEIRKLAESSSEQSKTIGAVLKKIKGSIDKITRSTENVLNRFEAIGSSVKVVSQQEENVRSAMEEQGQGSKQILEGVGNVNEITRQVKSGSNEMLEGAKEVIQESNNLEKATQEITGGMNEIASGADEINVAVHHVNEISAKNREGIDTLIREVSRFKVE

SEQ ID NO: 62629 - DNA, 714 bp, Unknown
  Obtained from environmental sample
  misc_feature (1)..(714): n is a, c, g, or t
atgcctattaaagatttcagggatatgattcagcaaagtatctttgcggtgtccgatgatgaaacccgctatttcttaaacggcgcgtattttgaaaaatccgacgataaaataaacatggttgcgacggacggcaggcggcttgcgtttataggaaaaaccgcggataagagtataaaagattttccgcccgttattattccgcctaaaattttaaacactgttcttaaaagatccggagatgaagggcttgtaagtatttcagttaacgacaaatccatatttattaactttgcgtcttatcagttttcttccgttttgatagagggaagtttccccaactataaaaaagtaattccggaaagccaggaattttcactttcggtaaaacgcgaggaaatgttaagcgccctgcgccgcgtttcgcttatggtcgagaaaaagtcccacaggattttcctcggcgtcgctcccggcaggatagcggtttcttcggaagaaagcgaaatagggaccgtcgaagatgaaatcccgtgcaaatacaacggcggagaaatgacaatagcccttaatttccgttatttggaagaaccttttaaaacaatgacggaagatgaaattcaaatactttttacccaggttcagaaggcgataacaattaaacctgttcctgaaaaagattttcttcacgttgtaatgccgatgcagtcttga

SEQ ID NO: 62630 - protein, 237 aa, Unknown
  Obtained from environmental sample
  DOMAIN (1)...(114): DNA polymerase III beta subunit, central domain
  misc_feature (1)..(237): Xaa is any amino acid
MPIKDFRDMIQQSIFAVSDDETRYFLNGAYFEKSDDKINMVATDGRRLAFIGKTADKSIKDFPPVIIPPKILNTVLKRSGDEGLVSISVNDKSIFINFASYQFSSVLIEGSFPNYKKVIPESQEFSLSVKREEMLSALRRVSLMVEKKSHRIFLGVAPGRIAVSSEESEIGTVEDEIPCKYNGGEMTIALNFRYLEEPFKTMTEDEIQILFTQVQKAITIKPVPEKDFLHVVMPMQS

SEQ ID NO: 62631 - DNA, 1101 bp, Unknown
  Obtained from environmental sample
  misc_feature (1)..(1101): n is a, c, g, or t
atgttattctcttctctgcggacaacgtcattcagaaaccttgcggacgcggaagttttcacaggcgcaaaggatgtttttcttgtcggcgaaaacggacaaggcaagacaaattttctggaagcgctgtatttttgcgcttacgcatcgtcttttcgcgcggtgcgggacggcgaattagcgcgtgacgtttttttaaaggaaggggaaaaagatttttccgcgcaggtaaaaattgagcagtcggcaaacgacgaaatacttgtaaaatttgagaaaggcaaaaaatcggttttcattaacggcaaacgctctgcggaccgcaaagaaatgctttcgatagcgccaagcatcgttttttgccacgaggatatggactttgtttcaggcagccccgaaaggcggcgctggttttttgatcaaactttgagcctttacgaccccgtttaccttgaggatttgcgccgcttccgccgtgtgttaaaaacgcggaataccgtccttagggatttttcacggaacagcggcggacaaacggaacagcttttagacgcgcttgatccgcagtttgccgagtacgggcaaaaattgatggaaaaacgggaaaccgcggcaaaacaattttccggcgttttcggcccgctgtacgaagaggtgtccggcattacggacataaacgtgcagtacgtcaagtcatggaaaaaagatgatgtattgtccattctgcgggagaaacgcggtgcggacacggcaagcggtctttcgctttcgggtccgcaccgcgatcgctatgtatttgcacataatggaatggaatttacggggacagcctccacaggccaacggcggcttctggcgcttttactgagagcagcacaggcacgccgtttttcggaagtgacaggccaaaacccgattcttttgcttgacgacgttcttctggaaatggacggcgaaaaacgccgccgcttcctgtccgtcctgcccgcctatgatcaggccttttacaccttcctccccgaagagccgtatcagcgttacaaaaaagaagacacattgatttacaatgttaaagccggcaaactggaaattagaacatga

SEQ ID NO: 62632 - protein, 366 aa, Unknown
  Obtained from environmental sample
  DOMAIN (2)...(363): RecF/RecN/SMC N terminal domain
  misc_feature (1)..(366): Xaa is any amino acid
MLFSSLRTTSFRNLADAEVFTGAKDVFLVGENGQGKTNFLEALYFCAYASSFRAVRDGELARDVFLKEGEKDFSAQVKIEQSANDEILVKFEKGKKSVFINGKRSADRKEMLSIAPSIVFCHEDMDFVSGSPERRRWFFDQTLSLYDPVYLEDLRRFRRVLKTRNTVLRDFSRNSGGQTEQLLDALDPQFAEYGQKLMEKRETAAKQFSGVFGPLYEEVSGITDINVQYVKSWKKDDVLSILREKRGADTASGLSLSGPHRDRYVFAHNGMEFTGTASTGQRRLLALLLRAAQARRFSEVTGQNPILLLDDVLLEMDGEKRRRFLSVLPAYDQAFYTFLPEEPYQRYKKEDTLIYNVKAGKLEIRT

SEQ ID NO: 62633 - DNA, 960 bp, Unknown
  Obtained from environmental sample
  misc_feature (1)..(960): n is a, c, g, or t
atgactgagcttaatagtgtaacccctgtgataaaagggcgcaggaagtatgcgatcctttccataatagcttgcgttttattatggggtttttcatttatttcaattaaagaatctctaccggtttttcctcccatgacactgggagttgttcgttttacaatcgccattgcagcgctttttttaatgtatcgcttttcttcggaatggcagagcgcaaacaagacgctaaaacaggatttgcccctgttaataggctcaggtatgtcgggggttactttttattttttctttgaaaataacggcgtggcgcgggttaccgcgtcggaagcttccattataacggcgtccattccggtaataacaatgatcgccgattggttcatggcaaaagcatcattccatgtttcgcataacaatgcgccgcatgaacatgcgccgcagcttggatggaaatcatggttgggggcgtttatttccatcgccggagtcgcgttggtcgccggagtttctttttctctctcggggagcatatccggttatgtttacatgggaggagccgcattgtgctgggttggctacagcctgcttacccgccctctctttgacaggaaaagatcccgcctctatatcgtattttggcaaaacttttttgggtttcttggattacttccctttgctatgctggaatacaaaagctggggcgatcccacgttgccggttatgcttcatgtgatttttcttgctttgggttgttccgctcttgggtactggctctacgctcacgcaatggaaacactgggagtatcaataacgtcggtgtttatcaatttgattccggtagtaacggtaattgccggatacatcgttctgcatgaaaggcttacccttctgcaaggcgcaggagccgcgctggttcttgccggtgtatatttaacaatactgccgcggcgcaaataa

SEQ ID NO: 62634 - protein, 319 aa, Unknown
  Obtained from environmental sample
  DOMAIN (27)...(169): Integral membrane protein DUF6
  misc_feature (1)..(319): Xaa is any amino acid
MTELNSVTPVIKGRRKYAILSIIACVLLWGFSFISIKESLPVFPPMTLGVVRFTIAIAALFLMYRFSSEWQSANKTLKQDLPLLIGSGMSGVTFYFFFENNGVARVTASEASIITASIPVITMIADWFMAKASFHVSHNNAPHEHAPQLGWKSWLGAFISIAGVALVAGVSFSLSGSISGYVYMGGAALCWVGYSLLTRPLFDRKRSRLYIVFWQNFFGFLGLLPFAMLEYKSWGDPTLPVMLHVIFLALGCSALGYWLYAHAMETLGVSITSVFINLIPVVTVIAGYIVLHERLTLLQGAGAALVLAGVYLTILPRRK

SEQ ID NO: 62635 - DNA, 570 bp, Unknown
  Obtained from environmental sample
  misc_feature (1)..(570): n is a, c, g, or t
ttgagagaagaaatcggtatgcagagactttttatatcagtaaactgtgatgaaaaagtaaaaaaacagattttctctgtgcaggaaaaaattaaagcgttgtctataaaaggtaatttttcattacctgaaaatctgcacctaacgcttgtctttattggtgaaactcccgatgatacaatacagccaataatttctgtaattgacaaagctcttatacctcctgttgcaccttttgcgcttactttcacgacagcaggttattttaaacacggtaataaagaactatggtggataggaacggatcgaaatgatatgaatcttgatattctaaaaacaatcagacagcgaattacagatgatttaccttcaaaaagcataaattttgacaagagaccttttaatccgcatattactctcggcagagaaataaagcatgaattacctattattatttcaaaacaggaaattatatttccggtaacccgtatcagcctgatgaaatcagagcgtatcagcgggaaattaacatatacggaaatatttggaaaggatttagatggaaagtaa

SEQ ID NO: 62636 - protein, 189 aa, Unknown
  Obtained from environmental sample
  DOMAIN (14)...(95): 2',5' RNA ligase family
  misc_feature (1)..(189): Xaa is any amino acid
MREEIGMQRLFISVNCDEKVKKQIFSVQEKIKALSIKGNFSLPENLHLTLVFIGETPDDTIQPIISVIDKALIPPVAPFALTFTTAGYFKHGNKELWWIGTDRNDMNLDILKTIRQRITDDLPSKSINFDKRPFNPHITLGREIKHELPIIISKQEIIFPVTRISLMKSERISGKLTYTEIFGKDLDGK

SEQ ID NO: 62637 - DNA, 369 bp, Unknown
  Obtained from environmental sample
  misc_feature (1)..(369): n is a, c, g, or t
atgtttactgatggtaaatctatatttgcagaaatagctcaaaaagagaaagacacgtctcttttggatttaataaaaaaacagtatcaatttcaaaaaataattgaaccattgttatataaacgtatagattttgataaaaacgattatgccgaaaaatggtggcctttgggaaagaaagaaaatattgtattagatccatcaaggaatatgggtcaaccaattctaaatacatacaatgtcagaactgaattaatctatgagctttataaatcaaaacatagtattaatgaaatcagtgaatggtatgaactggacaaagattcaataaatgcagctattaactttgaaaaggacttagttgcatga

SEQ ID NO: 62638 - protein, 122 aa, Unknown
  Obtained from environmental sample
  DOMAIN (63)...(119): Protein of unknown function (DUF433)
  misc_feature (1)..(122): Xaa is any amino acid
MFTDGKSIFAEIAQKEKDTSLLDLIKKQYQFQKIIEPLLYKRIDFDKNDYAEKWWPLGKKENIVLDPSRNMGQPILNTYNVRTELIYELYKSKHSINEISEWYELDKDSINAAINFEKDLVA

SEQ ID NO: 62639 - DNA, 396 bp, Unknown
  Obtained from environmental sample
  misc_feature (1)..(396): n is a, c, g, or t
atgaaatgtctttttgataataatatgccacctaaactcgcaagaacccttaaatttcttgaaggagatgatggtattgttgtagatcatctaaatgaaaaatttcttccaaatactcctgatattgaatggataaaaaagttagcaaaagaaggtgattggttcgtaataactagggataatcaaataagaaaaagatccaatgaaagaaaagtgtggcaagaatcccatataccagtcgttttccttccaaaaacatggatgaattatgatttttgggagatagcatggagacttataagacattggccaaaattgaaagaaaatattagccacaataaaaaaattgaatcttttgaattaactgttaatgggaaaataacacgcattgcttaa

SEQ ID NO: 62640 - protein, 131 aa, Unknown
  Obtained from environmental sample
  misc_feature (1)..(131): Xaa is any amino acid
MKCLFDNNMPPKLARTLKFLEGDDGIVVDHLNEKFLPNTPDIEWIKKLAKEGDWFVITRDNQIRKRSNERKVWQESHIPVVFLPKTWMNYDFWEIAWRLIRHWPKLKENISHNKKIESFELTVNGKITRIA

SEQ ID NO: 62641 - DNA, 822 bp, Unknown
  Obtained from environmental sample
  misc_feature (1)..(822): n is a, c, g, or t
ttgacagattggccgagatccgaccggtttttcaattgcggtattgcggaagccaacatgattggcgttgccgcaggtctttccaccctgggtaaaattccgtttgcgtcgggcttcggctgtttttcatccaggcgcgtatacgatcaatttttcctttccgccaactacgcaaagttaaacgtaaaattgatcggcacagatccgggcgtaaccgcggcgttcaacggcggaacccacatgccctttgaagaacttgccctgatgagggttgttccgaaacttacaatgcttgaaccttcggaccccgcctcttgcgccgccttcgtccgcttgatggctgaagaatacggctgtcattacctgcgtattccccgcaaacccgtaccttatctgtatccggaaaatgaaaccttcaagtttgggcaggcaaaagttttaaaagaaggaaaagatgtttgctttgtagcgcttggcagcctcatggtgaatcaatcactgaaagcgtgcgagaaacttgccgcagagggaatcagcgccggcgtagttgacgtactcaccttaaaaccgattgaccgtgacgcgatattgaaccaggccggcaaagtacgcgccgttatcagcgcggagaacgcccaaataatgagcggtcttggcagcgcggtagcggaaatactcgccgaagagggctgccgctgcaagttcgcgcgcatcggcattaacgacgaattcggcgaagtgggaacgcaggactaccttgtaaaccgctacgggcttgatgttgacagccttgtgaagaaagcgaaagagttgttgaagtag

SEQ ID NO: 62642 - protein, 273 aa, Unknown
  Obtained from environmental sample
  DOMAIN (1)...(132): Transketolase, pyridine binding domain
  misc_feature (1)..(273): Xaa is any amino acid
MTDWPRSDRFFNCGIAEANMIGVAAGLSTLGKIPFASGFGCFSSRRVYDQFFLSANYAKLNVKLIGTDPGVTAAFNGGTHMPFEELALMRVVPKLTMLEPSDPASCAAFVRLMAEEYGCHYLRIPRKPVPYLYPENETFKFGQAKVLKEGKDVCFVALGSLMVNQSLKACEKLAAEGISAGVVDVLTLKPIDRDAILNQAGKVRAVISAENAQIMSGLGSAVAEILAEEGCRCKFARIGINDEFGEVGTQDYLVNRYGLDVDSLVKKAKELLK

SEQ ID NO: 62643 - DNA, 717 bp, Unknown
  Obtained from environmental sample
  misc_feature (1)..(717): n is a, c, g, or t
ttggaagcgttggtaaacgccgcacgtccgggcgaagaagccatttggcgcgaatacgccggggcgcggcacattgcttggaagacggggacaagttacggtttccgcgacgcgtgggcaattggcgtaacgcctgaatggacggtaggagtctggatagggaatgcctcaggggagggtaggccggaactgcgaagcgccgttacctccgcgccggtactttttgaaattttttccgttcttaattcacttggcggaaaccgaaatatgtggtttaacaaacctacaactgaactgttgcaagtggaagtatgcgccttctcaggttttccggcttccataaattgcgctaacataaaatatgttgacatacccaaaaacgcccctgccgccaaaccatgccgtttttgtcagactgtaattctagacgatactcttagctatcgcatcgttcttaaacccggcgttttcactacggcggtggaacgaaagtggttcgttcttcctccagcggaagaatggtatttccgcagatggaatcttgattataaacccctgcctccatattttaattcaagggatttgtcaaatcgcggagagggaatgtttgcgctttttaatcctgaacccgatagtcaggtatatgttcctcgtgaactggacaacagggagggcaaaatagtttttccgccgcccatcgcaatgaaacggaaataa

SEQ ID NO: 62644 - protein, 238 aa, Unknown
  Obtained from environmental sample
  misc_feature (1)..(238): Xaa is any amino acid
MEALVNAARPGEEAIWREYAGARHIAWKTGTSYGFRDAWAIGVTPEWTVGVWIGNASGEGRPELRSAVTSAPVLFEIFSVLNSLGGNRNMWFNKPTTELLQVEVCAFSGFPASINCANIKYVDIPKNAPAAKPCRFCQTVILDDTLSYRIVLKPGVFTTAVERKWFVLPPAEEWYFRRWNLDYKPLPPYFNSRDLSNRGEGMFALFNPEPDSQVYVPRELDNREGKIVFPPPIAMKRK

SEQ ID NO: 62645 - DNA, 906 bp, Unknown
  Obtained from environmental sample
  misc_feature (1)..(906): n is a, c, g, or t
atggaagccgccgcatggcgctggtttggcagaagttcaaatgatctttcatgggcggaagcggcagtgctcgcgacgcttccaaacagtcccgcgcttattcatcccgggcgcaaccgcgaaaccctaaaagcaaaaagagattcacttttaaataaactttttaaaaagggttactttgacgaggagacccttgccctcagcgttgccgaaccgcttcccggtgagccgctccccctgccgcgccttgccccccatttgcttgacaggcttgttttggaagccgaaaaaaaatcttcgttaaaaaaatccgccgcctttgtaactacaataaaccgtgacttgcaaatgcgcgtaacggatatcctaaaccgcgcgtcagaccgttttgcgttgaacggaatttttaacggcgcctgtgtcgtgctaaatacgcaaacaggcgagattgcggcttatgttggcaacacaaatacgcttcatgcccccgatgtggatattgcgtcttcgcgcagaagttcgggaagtttattaaaaccttttctatatgccgccatgcttgattcgggggacatactcccatcatctttggtaagcgacatccccactcggattggaagcttcagtcccgaaaacatgagcagaaattatttgggcgtggttcccgccgatgaagcattggcgcgttccctaaatgttcccgcggcgcgttccctgcgtatttacggcgttgaaagattcgcgcaattccttcgttcattggggcttaccagtctatttcgccccggcaatgaatacggtcttccgttaattcttggcggcgcggaagtcactctttctgaaataacaaaactttacgccaatctggaaagacggccgcctctgactccacaactacgtcattaa

SEQ ID NO: 62646 - protein, 301 aa, Unknown
  Obtained from environmental sample
  misc_feature (1)..(301): Xaa is any amino acid
MEAAAWRWFGRSSNDLSWAEAAVLATLPNSPALIHPGRNRETLKAKRDSLLNKLFKKGYFDEETLALSVAEPLPGEPLPLPRLAPHLLDRLVLEAEKKSSLKKSAAFVTTINRDLQMRVTDILNRASDRFALNGIFNGACVVLNTQTGEIAAYVGNTNTLHAPDVDIASSRRSSGSLLKPFLYAAMLDSGDILPSSLVSDIPTRIGSFSPENMSRNYLGVVPADEALARSLNVPAARSLRIYGVERFAQFLRSLGLTSLFRPGNEYGLPLILGGAEVTLSEITKLYANLERRPPLTPQLRH

SEQ ID NO: 62647 - DNA, 636 bp, Unknown
  Obtained from environmental sample
  misc_feature (1)..(636): n is a, c, g, or t
gtgagaatattgaagtatgtaacaaagaagcgcctgattatagtcggggcgcttcttgttctcctgcttgcgtttatattttccttgccgaggcctctttttaatgttccctattcgcctgttctttttgaccgcgaaggaaatttactgggcgcgcaagtcgccttggacgatcaatggcgttttcccggtaccgataaagtaaacgaaaaattcgcgctcgcgctaatcgagacggaagaccacagattccgcagacactttggcgttgatcctttggcgatagcgcgggcggcgtatcagaacatccgcgggaaaagaattatttcaggcggctccacaattaccatgcagaccatacgccttgcgagaggagcgcggaaaaggtcgttttttgaaaagtttattgaagcgtatctggcgatcaggcttgaagccggaaattcaaaaaataaaattcttgctctctatgccgctaacgctccctttggggcgaatgtggtgggatggaagccgccgcatggcgctggtttggcagaagttcaaatgatctttcatgggcggaagcggcagtgctcgcgacgcttccaaacagtcccgcgcttattcatcccgggcgcaaccgcgaaaccctaa

SEQ ID NO: 62648 - protein, 211 aa, Unknown
  Obtained from environmental sample
  SIGNAL (1)...(24)
  DOMAIN (40)...(172): Transglycosylase
  misc_feature (1)..(211): Xaa is any amino acid
MRILKYVTKKRLIIVGALLVLLLAFIFSLPRPLFNVPYSPVLFDREGNLLGAQVALDDQWRFPGTDKVNEKFALALIETEDHRFRRHFGVDPLAIARAAYQNIRGKRIISGGSTITMQTIRLARGARKRSFFEKFIEAYLAIRLEAGNSKNKILALYAANAPFGANVVGWKPPHGAGLAEVQMIFHGRKRQCSRRFQTVPRLFIPGATAKP

SEQ ID NO: 62649 - DNA, 972 bp, Unknown
  Obtained from environmental sample
  misc_feature (1)..(972): n is a, c, g, or t
ttggctctcgccggagaaaccgatcttggatcgatgaaccgcctgcgaagccataaactgcctgttcaggcaagctggcgtcttgccgcggcatattggcttgcaggacagcgcgacacagcccgaaacatgataaagggattgactctgcctgaaggaaactaccgcgaactttccgcgacattcggctctaacctaagagacaaggcgatgattcttgaaacattaattttgttaaattctccggaagaagtgggaagaaccaaacagctctttgaagaaataacaaacacgctttctcaggacaaatggctttccactcaggagacggcgtacgcccttatcgccttagttccgtacatgacaggtaacgccggaagcggcgcgttgacattggattataccgcggccggaaaaacgggaaacatctctttcagctctcccgccgcggaacgccagcttggaaatgtaagcggagcaagttcagctttatcggtgaccaaccgctcatcttctcctgtttatgtaaggttcactgctaaagggcttcctgttgaaggaaaagaaccggcgctttccgaaggtctttcgcttaacgttgaataccgcgactcccgcagcaatgtaatcgctcctgaaaatttaaaactgggcgaagacatggtaatctccgtcagtgtgcgcaatacatttactcagcctgtggaagaagccgccctcattgttccgcttcccgcgtcatgggaaatcgttaacacccgtgtcggcggaagttcgtcttcgtcaaatttccgttatcaggacataagggacgacagggtgatgacttactttaaccttaaaagaggcgaagaaagaacgataaatttcagagtaaacaaagcatacgaaggctctttcttcagaccggcaatacatgtttacgctatgtatgacgagtcgataagggcgttaattcccggcacacgttaa

SEQ ID NO: 62650 - protein, 323 aa, Unknown
  Obtained from environmental sample
  misc_feature (1)..(323): Xaa is any amino acid
MALAGETDLGSMNRLRSHKLPVQASWRLAAAYWLAGQRDTARNMIKGLTLPEGNYRELSATFGSNLRDKAMILETLILLNSPEEVGRTKQLFEEITNTLSQDKWLSTQETAYALIALVPYMTGNAGSGALTLDYTAAGKTGNISFSSPAAERQLGNVSGASSALSVTNRSSSPVYVRFTAKGLPVEGKEPALSEGLSLNVEYRDSRSNVIAPENLKLGEDMVISVSVRNTFTQPVEEAALIVPLPASWEIVNTRVGGSSSSSNFRYQDIRDDRVMTYFNLKRGEERTINFRVNKAYEGSFFRPAIHVYAMYDESIRALIPGTR

SEQ ID NO: 62651 - DNA, 804 bp, Unknown
  Obtained from environmental sample
  misc_feature (1)..(804): n is a, c, g, or t
gtgcctgtttatgtgaacgcgcagaaagacgggaaaaggagcgttaaagtaaatctctccgcgccgggcgcggcaattcaaggcgcctcatcgcaggacgtgtcatttgacaagagcgaagaaaaattaatccgctttaaggtaaaagctcccgacaagccgggaagcataaagtttacggtaacggcggaatcggccggcttaaaaacggcccaacaggttgtagatattgaagttcgttccacagcaattcccgtaacaaagtctttgcaaactttgatttccgcgggcgggacatggaagggaaatcttgaatatcccggcagggacggaacgaatacccttgtcgcaagtttctcaaaactgccgccactcaaccttgaatcgcggctggagtatttaattaaatatcctcacggctgcgccgaacaaactacaagcggttccttccctcagctttatcttgacaaggttctttcactggacgacaaacaaaaagccgatatcaggacaaacgtaaacggcggaatagaacgcgttttgggaatgcagttaatgtcgggaggtttttcttactggcccggcgaatccagcgtaaacgattggtgttcttcttatatagggcacttccttttggaggcccgccgcctgggatatgaagtgcgggcaccgctcttaaaagctgggttaactatcaaaagaacgccgcggcgcagtggcagtcaagcgacagtaaattcatcgaacaggcgtaccgtctttacactttggctctcgccggagaaaccgatcttggatcgatga

SEQ ID NO: 62652 - protein, 267 aa, Unknown
  Obtained from environmental sample
  misc_feature (1)..(267): Xaa is any amino acid
MPVYVNAQKDGKRSVKVNLSAPGAAIQGASSQDVSFDKSEEKLIRFKVKAPDKPGSIKFTVTAESAGLKTAQQVVDIEVRSTAIPVTKSLQTLISAGGTWKGNLEYPGRDGTNTLVASFSKLPPLNLESRLEYLIKYPHGCAEQTTSGSFPQLYLDKVLSLDDKQKADIRTNVNGGIERVLGMQLMSGGFSYWPGESSVNDWCSSYIGHFLLEARRLGYEVRAPLLKAGLTIKRTPRRSGSQATVNSSNRRTVFTLWLSPEKPILDR

SEQ ID NO: 62653 - DNA, 492 bp, Unknown
  Obtained from environmental sample
  misc_feature (1)..(492): n is a, c, g, or t
atggatggatgccgtgaaatgcagacctgcttatgctcgccggaagagatttcccggtactggcgcaaattcggcggcgccctccttgaccgtatcgagatccgtgtcgctgtttttcccccaggcgttaatgaaatcggcataacaaacagcagtgaggaacgcagcgcggacattgccatgcgggtaaaggccgccgttgagatccagcagcagcggtataaaggaatggggatacgccgtaacgcgcttattcccgcgggaaaaatcgaaaaattttgcggcatggatcatcaggcccgggacgcgtttcacaaggcccttacccggctggatctttcgggccgcgcctaccacggcatcctgcgggtagcgcggactatagctgaccttgacggcaaggaaaccattggcacggtacatattctggaagcggtacagcaccggcgttatggtgaggatccttacgaaattgtcactatggggaattag

SEQ ID NO: 62654 - protein, 163 aa, Unknown
  Obtained from environmental sample
  misc_feature (1)..(163): Xaa is any amino acid
MDGCREMQTCLCSPEEISRYWRKFGGALLDRIEIRVAVFPPGVNEIGITNSSEERSADIAMRVKAAVEIQQQRYKGMGIRRNALIPAGKIEKFCGMDHQARDAFHKALTRLDLSGRAYHGILRVARTIADLDGKETIGTVHILEAVQHRRYGEDPYEIVTMGN

SEQ ID NO: 62655 - DNA, 897 bp, Unknown
  Obtained from environmental sample
  misc_feature (1)..(897): n is a, c, g, or t
atgacacttgcccgccaaaaagcccaaggagtgaatatgataatcaatcacaacttaagcgcgatgtttgccgaccggaccctcagagttacccaggtctcgctggataaaaatatggaaaaactgtcgagcggaatacgtatcaaccgcgccggtgatgatgcttcgggactcgctgtttctgagaaactgcgctcgcaaatccgcggcctgaatatggcgtcattcaatgccatgaatggtatttcattcattcaggtaacggaaggttatctccaggaatcccaggatattattcagcgtctccgcgaattggcagtacaggccgccaacggcgtctataccgaagaggatcgtctttatatccagatcgaagtctcggctctggtcgccgaaatagacaggattgcgtcgcacgcccagtttaacgggatgaacctgttaaccgtccgcttcggcaggcctctgggtgaaaacctggttaccgcctccatgtggctccatatcggcgccaacatggaccatcggacacaggtgtatatcggcactatgaccgcgaagggccttggaatccgaaacgtcgccgacgattcatttatttccttgtccgcgccagacaacgccaaccgcgccattggaactcttgatgtagcgctcaaaagagtaaacaaacaacgagccgatctgggagcctaccagaaccgccttgaacacgcaatccgcggtattaacattggcgccgaaaacctgcaagccgccgaatcccggattagggacgccgacatggcttttgaaacagtaaattacaccaagaatatgatactcacgcagtccgggacagccatgctggctcaggcaaatcaaaaaggacagacggtgctgcagctcttgcagtaa

SEQ ID NO: 62656 - protein, 298 aa, Unknown
  Obtained from environmental sample
  DOMAIN (205)...(276): Bacterial flagellin C-terminus
  misc_feature (1)..(298): Xaa is any amino acid
MTLARQKAQGVNMIINHNLSAMFADRTLRVTQVSLDKNMEKLSSGIRINRAGDDASGLAVSEKLRSQIRGLNMASFNAMNGISFIQVTEGYLQESQDIIQRLRELAVQAANGVYTEEDRLYIQIEVSALVAEIDRIASHAQFNGMNLLTVRFGRPLGENLVTASMWLHIGANMDHRTQVYIGTMTAKGLGIRNVADDSFISLSAPDNANRAIGTLDVALKRVNKQRADLGAYQNRLEHAIRGINIGAENLQAAESRIRDADMAFETVNYTKNMILTQSGTAMLAQANQKGQTVLQLLQ

SEQ ID NO: 62657 - DNA, 600 bp, Unknown
  Obtained from environmental sample
  misc_feature (1)..(600): n is a, c, g, or t
atggcgatgatgcaccacggcgtggttgaacactgggaaggacagaaaaaactccacccggattatttaatacaggaattcgccagctttggaagttttctcgcttcatgggatgtaagagctgtttttacgggtcattatcacgcgcaggatattgcgcgcgccgaatataacggaaaagttatttatgatattgagaccggttctcttgtaaccgctccgtgtccgatgcgttatgtcgagataaaagacaacagtttaaatatccgcaccgaaacaatcgtagacaagctttatccgtggactaattttgcacataacgccacagcctttgtaaagaaaacggtcatgctggaagcggcaaatgttcttagaagattcaaagtatccgaaaaagatattgtcattattaccgacgctgtaggggacgcttttaccgcgcattacagcggagatgaagatccggctttgcaaaaaaagacggacaaatccaagttgagtctttggggacgttttgttcttggacaacagcaatatgctattgacggtctttggaaagatctggagcccgcggataataacgtaaaaatagatttgtaa

SEQ ID NO: 62658 - protein, 199 aa, Unknown
  Obtained from environmental sample
  misc_feature (1)..(199): Xaa is any amino acid
MAMMHHGVVEHWEGQKKLHPDYLIQEFASFGSFLASWDVRAVFTGHYHAQDIARAEYNGKVIYDIETGSLVTAPCPMRYVEIKDNSLNIRTETIVDKLYPWTNFAHNATAFVKKTVMLEAANVLRRFKVSEKDIVIITDAVGDAFTAHYSGDEDPALQKKTDKSKLSLWGRFVLGQQQYAIDGLWKDLEPADNNVKIDL

SEQ ID NO: 62659 - DNA, 756 bp, Unknown
  Obtained from environmental sample
  misc_feature (1)..(756): n is a, c, g, or t
atgggtatccaagtcaccggtagtatcggtaatttccgcgtcaatatcggcattgtctcaccgctttgtacttacggaacaattcccgtagtgattgaactgtataggagcaaggtacatatcgcgccgctcatagcgtttctcgccgcttcgtcactgatgaaccctcagctttttatcatgacggcgggcggtattggaatggaaatggcgattgcccgtacgctcgccgtttttgtgttcagtttccttgtgggaatgttgtcctatcttattcccgaaaaattaatggttaggaaaagtatcaatttttacgataacggttgtgaaagaatcgcaaaccgagaaaaaaaattatttatcgtgaagcaatattttattaactgcttaatgaatttaaaacatttaggggtctacctgctcatcggtatattcctgggcgtggttgtggagcggtatataccaaatggcctgatatataccgcttttcgggcgggacgcatacagtccatactcgccggagccttgttgggcatacccctgtctccctgcggcggagccgcgataccattagtcagcgccatgataattaacggcatggggaaaggaaccgcgctcgcctttttcatagtcggccccgccacacgcccgacgccgcttatcgctatggcgacattgtttacccccctgtttctggttgggtattgcctgttccttattatttcagcggtattaatggggttggtttatgtgtaa

SEQ ID NO: 62660 - protein, 251 aa, Unknown
  Obtained from environmental sample
  DOMAIN (1)...(251): Predicted permease
  misc_feature (1)..(251): Xaa is any amino acid
MGIQVTGSIGNFRVNIGIVSPLCTYGTIPVVIELYRSKVHIAPLIAFLAASSLMNPQLFIMTAGGIGMEMAIARTLAVFVFSFLVGMLSYLIPEKLMVRKSINFYDNGCERIANREKKLFIVKQYFINCLMNLKHLGVYLLIGIFLGVVVERYIPNGLIYTAFRAGRIQSILAGALLGIPLSPCGGAAIPLVSAMIINGMGKGTALAFFIVGPATRPTPLIAMATLFTPLFLVGYCLFLIISAVLMGLVYV

SEQ ID NO: 62661 - DNA, 1614 bp, Unknown
  Obtained from environmental sample
  misc_feature (1)..(1614): n is a, c, g, or t
ttgcctgttccttattatttcagcggtattaatggggttggtttatgtgtaaattggcgttattattatgggagaaggcattatgaaaaagattttgtttttattgttcttgatatctcggccggctttgccgcctgcggcggaaacaaggataattcaccggcggatgaagaagtgttctttacgccgccggagccgtcagtggtttcattgttgcagtcaacaacggcaacgaaagcgtcagacttaacttatgcggatataaaagcccttgttaccgaggcggttgcactggcgggcgggcttgacgatatcataaaatccggtgatgtagttgtgctcaagccgaatgtactaaccacttattacggctggtcaacatccggaaccgccattcccgaaaaagtgaacggcgtttgcacagactggcgtgttgtacaggcggcagccgaacttgtaagggcgattatcggtccgtacaattccgccaccggcaaaggtaaaatcatgctcattgaaggttcatgtaacggaaatatggcgtcacaatttgccaatataggttatactgcggcaaacctgacagaagtaaacgagattatcgggcttgatacagagggcggcgcatattctcccggagacgggtcaaacctaacggcctatgttactcatgtcgcgttgagtaattataaatataaatctgttcctaacggttcttattggaacgcgccatcctataaaacatattataaaggcgacggcaaatattgggtgagtaaaaaaatgttcgaggcggacgcgcttatttccttaccggtcgtaaaaaatcatgggagcgcggttgttaccggttccataaaaaacatatcaataggcgccgctccgccaaaaatntacggaatggccaataatagtatcgggcgtaacggcatggtaaaccatgcttcaattaatttgcatgagtggattgcggactatttttcctgcctccccgccgattttgtggtaatggacggattgcaggggcttgataacggcccgggcacaggcaacaatctggcggaattacagggcaaacagaaaaatttgcgcagcatactcgcgtcaaaagacccgcttgcaatagacattgttgaagcaaatttaatgaactggaattacaccacggtgccctatatgacctatttggccgagaaaggccaggttggcggaaaaccaaacgggcggacaatacccctgcgcggggatacgaaaaacattgtcgtactggggaacaaaaaagttgacgatgtaaggaaagattttgcgggaaatttaccgatgtcgggcggcgataagctcacatcagcgcagttggcaaaaccgacggtgactattagttccgcggcattttccggatcaaaccttaacctgactctttcaaccggcgctgacaataacgttgttaaaatcgatgtgtatatcgacggggcatacacaaagagtttcaacaccggtatggccaatgtttcgctgaatgctgcaagccttgccgcaggttctcacagcatagaggtatgcgcgtataccaattttatgtccagcgcggcagcgacaactacggcggtcaagtga

SEQ ID NO: 62662 - protein, 537 aa, Unknown
  Obtained from environmental sample
  DOMAIN (73)...(406): Domain of unknown function (DUF362)
  misc_feature (1)..(537): Xaa is any amino acid
MPVPYYFSGINGVGLCVNWRYYYGRRHYEKDFVFIVLDISAGFAACGGNKDNSPADEEVFFTPPEPSVVSLLQSTTATKASDLTYADIKALVTEAVALAGGLDDIIKSGDVVVLKPNVLTTYYGWSTSGTAIPEKVNGVCTDWRVVQAAAELVRAIIGPYNSATGKGKIMLIEGSCNGNMASQFANIGYTAANLTEVNEIIGLDTEGGAYSPGDGSNLTAYVTHVALSNYKYKSVPNGSYWNAPSYKTYYKGDGKYWVSKKMFEADALISLPVVKNHGSAVVTGSIKNISIGAAPPKXYGMANNSIGRNGMVNHASINLHEWIADYFSCLPADFVVMDGLQGLDNGPGTGNNLAELQGKQKNLRSILASKDPLAIDIVEANLMNWNYTTVPYMTYLAEKGQVGGKPNGRTIPLRGDTKNIVVLGNKKVDDVRKDFAGNLPMSGGDKLTSAQLAKPTVTISSAAFSGSNLNLTLSTGADNNVVKIDVYIDGAYTKSFNTGMANVSLNAASLAAGSHSIEVCAYTNFMSSAAATTTAVK

SEQ ID NO: 62663 - DNA, 1737 bp, Unknown
  Obtained from environmental sample
  misc_feature (1)..(1737): n is a, c, g, or t
atggaaaattttttaaccgacaatgaagatatattgttccaactggagcatcttgatctggatcgcatcattcatcttaaagaagaaaacttcagccaggcgaagcagtacccccacgcgccgaaggacgttcaggacgcgaaagaatcgtaccgcatggtgctgaatatcatcggcgaaatcgcgggccagtggatggctcctaacgctccgtccgttgacgaggctggcccgaccctcgccaacaaccaggtgacgcttcaccccgctactaagaagacgctggacatgctggctaaagccgacatgatgggttttgtcattccgcgccagtacggcggccttaatatgcccaacacgatactcaccatcgccgcggatattgcggcgcgggcggacggctctttcctcaatttcggactccagcaggataacgccggaacgattaacaaattcgcctcggaagatcagaagacgcggtatctgccgagactctgctcgggcgaatgggattcggcgatggttctcaccgagccggacgcgggaagcgatcttcaatcggtgaacctcaaggccgtgcagggcgcggacggcaagtggtatctgaacggcgttaaacgctttatcaccaacggttgcggaaccatcggtctggtgcttgcccgcagcgaggaaaagggaaagggcgcgagggggctttcgtttttcatttacaagcgcgacgacgagtcggggaagccgacaatgattatcaggcggctggagcacaagctgggcatacacggttcgcccacctgtgagcttcaatttaacaacgcgcccgcggaactgctcggcgagaggcagaggggccttaccaagtacaccctgtggctcatgaacaacgcgaggctcggagtggcggcgcagggtgtcggcattgccgaggccgcctaccgcgaggctgacctttatgcggcaaagcgcatacagttcggcgctccgattcgggaactgcccgcggtcttcgagatgctcacggagatgagggtcgcggtcgaggcgggacgcagtctgttatacgaaaccgcccgcttcgttgacctcaaggaaggactggaagagtattccgaaaaacaccctgaggaaaaaggcgagataacggaagacaaaaagaaatacggaaaatacgcgggtttcttcactccgcttgtaaaggcctacgccacggaaatggcgaacaaggtcgccaatgacgcgattcagattcacggcggcacgggctacatgaaggaatttaacgcggaacgccactatagggacgcgaggatcaccaacatctacgagggaaccacccagcttcagattgtcgcggctatcggaccggtgacatcgggcgtcgcccagatggttatggacgaatacgacaaggtaaattacaaccacagccctgatctgcttgcgaagctccgcgacgctcgcaaggtttttgaagaggccctggaatacgccaagtcttacgaaggccatgagcagtttctcacgtaccattcccgcaggcttgtggaaatggccaccgaccttatcctgagttatctgctgatgagggacggtaaccacagcgagcgcaagcagaaagtggcggcggtctttatcgcaaaaatgccctcgcggataaaagccaaccgcgactttattatgggagataatggcacgctgctgaaaaattacgaagcggtgatcgggaagataaattaa

SEQ ID NO: 62664 - protein, 578 aa, Unknown
  Obtained from environmental sample
  DOMAIN (173)...(224): Acyl-CoA dehydrogenase, middle domain
  misc_feature (1)..(578): Xaa is any amino acid
MENFLTDNEDILFQLEHLDLDRIIHLKEENFSQAKQYPHAPKDVQDAKESYRMVLNIIGEIAGQWMAPNAPSVDEAGPTLANNQVTLHPATKKTLDMLAKADMMGFVIPRQYGGLNMPNTILTIAADIAARADGSFLNFGLQQDNAGTINKFASEDQKTRYLPRLCSGEWDSAMVLTEPDAGSDLQSVNLKAVQGADGKWYLNGVKRFITNGCGTIGLVLARSEEKGKGARGLSFFIYKRDDESGKPTMIIRRLEHKLGIHGSPTCELQFNNAPAELLGERQRGLTKYTLWLMNNARLGVAAQGVGIAEAAYREADLYAAKRIQFGAPIRELPAVFEMLTEMRVAVEAGRSLLYETARFVDLKEGLEEYSEKHPEEKGEITEDKKKYGKYAGFFTPLVKAYATEMANKVANDAIQIHGGTGYMKEFNAERHYRDARITNIYEGTTQLQIVAAIGPVTSGVAQMVMDEYDKVNYNHSPDLLAKLRDARKVFEEALEYAKSYEGHEQFLTYHSRRLVEMATDLILSYLLMRDGNHSERKQKVAAVFIAKMPSRIKANRDFIMGDNGTLLKNYEAVIGKIN

SEQ ID NO: 62665 - DNA, 795 bp, Unknown
  Obtained from environmental sample
  misc_feature (1)..(795): n is a, c, g, or t
ttgaagctcacaggtgggcgaaccgtgtatgcccagcttgtgctccagccgcctgataatcattgtcggcttccccgactcgtcgtcgcgcttgtaaatgaaaaacgaaagccccctcgcgccctttcccttttcctcgctgcgggcaagcaccagaccgatggttccgcaaccgttggtgataaagcgtttaacgccgttcagataccacttgccgtccgcgccctgcacggccttgaggttcaccgattgaagatcgcttcccgcgtccggctcggtgagaaccatcgccgaatcccattcgcccgagcagagtctcggcagataccgcgtcttctgatcttccgaggcgaatttgttaatcgttccggcgttatcctgctggagtccgaaattgaggaaagagccgtccgcccgcgccgcaatatccgcggcgatggtgagtatcgtgttgggcatattaaggccgccgtactggcgcggaatgacaaaacccatcatgtcggctttagccagcatgtccagcgtcttcttagtagcggggtgaagcgtcacctggttgttggcgagggtcgggccagcctcgtcaacggacggagcgttaggagccatccactggcccgcgatttcgccgatgatattcagcaccatgcggtacgattctttcgcgtcctgaacgtccttcggcgcgtgggggtactgcttcgcctggctgaagttttcttctttaagatgaatgatgcgatccagatcaagatgctccagttggaacaatatatcttcattgtcggttaa

SEQ ID NO: 62666 - protein, 264 aa, Unknown
  Obtained from environmental sample
  misc_feature (1)..(264): Xaa is any amino acid
MKLTGGRTVYAQLVLQPPDNHCRLPRLVVALVNEKRKPPRALSLFLAAGKHQTDGSATVGDKAFNAVQIPLAVRALHGLEVHRLKIASRVRLGENHRRIPFARAESRQIPRLLIFRGEFVNRSGVILLESEIEERAVRPRRNIRGDGEYRVGHIKAAVLARNDKTHHVGFSQHVQRLLSSGVKRHLVVGEGRASLVNGRSVRSHPLARDFADDIQHHAVRFFRVLNVLRRVGVLLRLAEVFFFKMNDAIQIKMLQLEQYIFIVG

SEQ ID NO: 62667 - DNA, 1014 bp, Unknown
  Obtained from environmental sample
  misc_feature (1)..(1014): n is a, c, g, or t
atgagtgcagagaatagcgttatggtttatgtacagcagaatgcaggcaaagccgccgaggtgagcttggaactcgtctccaaggcgcgcgaactcgcggacaagctgggagcggaggttagcgccgcgcttttcggcgataaggtgtcgggggaagtaccccgccttgccggctacggggccgaccgcgtgtatgttatggaagattcccgcctcaaattttacacgcccattccctacagcaagctgatgatacaggtagtctccgagaggaagccccagatcgtgctgtacggcgcgaccaccgagggccgcgatctcgcgcctcgcgtagcgtcccacctgaaagtgggattgacagcggactgtacggatttgcagatcggggatcacaaacagcaggataccgaatacaaaaatatcctttaccagatacgccccgcttttggcggcaacataatcgccacaatcgtaagccccgagaaaaagccccagatggcgacggtccgcgagggcgttatgcgaatggcagcgcccaatacttcgcgcaaagccgaagtcgtgaatgtttccgcgaaacttaacccggaagattttccgagcgagataatcgaacgtgtcatggaagaaaagaccgtcaaccttaaaggggcgcagattatagtgtctggcggcatgggagtgggaagcaaggaaaatttcgcccttatacgtgagcttgcccagactttgggagctgaagtgggcgcttcccgcgccgcggtcgatcagggttttatcggcaaggaacatcaggtggggcagacgggaaccacggtcagaccgaagctgtacatagcatgcggcatttccggggccattcaacacagggcgggcatggacgcttcttccagaatcatcgcgattaacagcgatccggaagcgccgattttcggcattgcccattacggaatagtgggggatttgaacgaggtcatccccctgatgatcaaagcgtacaaggccagagtgtag

SEQ ID NO: 62668 - protein, 337 aa, Unknown
  Obtained from environmental sample
  DOMAIN (6)...(202): Electron transfer flavoprotein domain
  misc_feature (1)..(337): Xaa is any amino acid
MSAENSVMVYVQQNAGKAAEVSLELVSKARELADKLGAEVSAALFGDKVSGEVPRLAGYGADRVYVMEDSRLKFYTPIPYSKLMIQVVSERKPQIVLYGATTEGRDLAPRVASHLKVGLTADCTDLQIGDHKQQDTEYKNILYQIRPAFGGNIIATIVSPEKKPQMATVREGVMRMAAPNTSRKAEVVNVSAKLNPEDFPSEIIERVMEEKTVNLKGAQIIVSGGMGVGSKENFALIRELAQTLGAEVGASRAAVDQGFIGKEHQVGQTGTTVRPKLYIACGISGAIQHRAGMDASSRIIAINSDPEAPIFGIAHYGIVGDLNEVIPLMIKAYKARV

SEQ ID NO: 62669 - DNA, 753 bp, Unknown
  Obtained from environmental sample
  misc_feature (1)..(753): n is a, c, g, or t
atggaaaaacagtaccatattgactttgacgattcacacggcgcgtcatatgcgattcttccaggcgatcccggcagggttgaaaagatcgcttcgtatctggataattcacgcttttttcatcagaaccgggagtacacatcctggcttggcgaactatcaaataggactgttatggtcatatctaccggcatgggcggtccttccactgccatcgctgtggaagagctttttaaaacaggcgtacgcaatttcatccgggttggtacctgcgggggcatggcgttgcctgttttaggcggggacattgtcatcgcgacaggggctatccgcatggaaggcaccaccaaagaatatgttccggttgaatttcctgcaatagcaaaccttgaggttaccaacgcattggttgaagccgccaaaaagctcaacgcgcaatggcatgccgggatcgtgcagtgcaaggattccttttacgggcagcataatcccgatcatatgcctgtcggctatgagctaatgaacaagtgggacgcctggataaaagccggctgcctcgcgtctgagatggaaagcgctgctcttttcatcgtgagccagatactaggcgcaagggctggctgtgtgcttaatgtggtgtggaaccaggagcgggaacgcgccggcatgaacaacccccacagccacgacacaagcctcggtataaaagctgccgtggaagcaatccgtattttgatcaggaaagaagtttaa

SEQ ID NO: 62670 - protein, 250 aa, Unknown
  Obtained from environmental sample
  DOMAIN (16)...(242): Phosphorylase family
  misc_feature (1)..(250): Xaa is any amino acid
MEKQYHIDFDDSHGASYAILPGDPGRVEKIASYLDNSRFFHQNREYTSWLGELSNRTVMVISTGMGGPSTAIAVEELFKTGVRNFIRVGTCGGMALPVLGGDIVIATGAIRMEGTTKEYVPVEFPAIANLEVTNALVEAAKKLNAQWHAGIVQCKDSFYGQHNPDHMPVGYELMNKWDAWIKAGCLASEMESAALFIVSQILGARAGCVLNVVWNQERERAGMNNPHSHDTSLGIKAAVEAIRILIRKEV

SEQ ID NO: 62671 - DNA, 342 bp, Unknown
  Obtained from environmental sample
  misc_feature (1)..(342): n is a, c, g, or t
atggcgatgggagccacccaccccgaaacctttacttccatttccggcatcggcgatctggatgttacctgccgttccgtttttggcagaaaccggcgttttggcaaagaaataatcgagaaaaaaattctggagccgttcaaagatattgatgatcttattgcgcgaatatccgaacttggttacctgcccgaaggcattgcggcgacaaaatatgttaaagtttttgcggaaaaataccggcttaaaatacccatttccatagggatgtatcaaattttaaaccgcgagatagaaccatctgattttctggaaaattttttaaatgggctggggcattaa

SEQ ID NO: 62672 - protein, 113 aa, Unknown
  Obtained from environmental sample
  DOMAIN (1)...(107): NAD-dependent glycerol-3-phosphate dehydrogenase C-terminus
  misc_feature (1)..(113): Xaa is any amino acid
MAMGATHPETFTSISGIGDLDVTCRSVFGRNRRFGKEIIEKKILEPFKDIDDLIARISELGYLPEGIAATKYVKVFAEKYRLKIPISIGMYQILNREIEPSDFLENFLNGLGH

SEQ ID NO: 62673 - DNA, 1344 bp, Unknown
  Obtained from environmental sample
  misc_feature (1)..(1344): n is a, c, g, or t
atgtttgataagttaacaaacaaaatcaccgatgccctgcgctttgtcgccggaaaatcaacgataagtgaaaaaaatattgaagatgccgttgatgccatcaaaatggcgctgctggaagcggacgttaatctgcgcgtggtgcggcgttttgtcaacgccacgatagaagaagcaaaaggcgaaaaggtactgcgcgccgttgatcccggccagcaatttattaaaattattcacgataaactggtttcgtttctgggcggcgccgataccgcggaacaaaaactaaagctaaaagggccggatgtaatttccgcgataatgatgctgggattacagggttccggtaaaaccaccagctccgcaaagcttgccctgcgcctgaaaaaagagggacgcaaacccctgcttgtcgcctgcgacctggtacgccccgcggctatggaacagcttgccgtgcttggcggacaagtcggcgtaccggttcaccgtgaggagggggctaaggacagcgccgcagtgtacaggaacgctcttgcatgggcaaagcaaaacctgattgacaccctgattattgataccacgggccgcctgcaaattgatgaatccatgatggcggagctttcccggctgaaagaagccgtacagcccgatgaaatgctccttgtcgccgactcgatgaccggccagtccgccgttgacatcgcgaaaacctttgacgaaaaaatcggactaacgggcgttgttctgaccaagtttgattcggacacgaggggcggcgcggcgctttcccttaaaaccataaccggcaagccccttaaatttacgggaaccggggagaagcccgaagactttgagcctttccacccggagcgcatggcgggacgcatccttggcatgggcgacgttgtaagcctggtggaaaaagcccaggaagtaattgatcagaaagaggccatggaactccagaaaaaaatggagaaggaaaactttacccttgaggactggcttaaccagcttcgctcggtaaagaaaatgggctcccttcagtcaatgctggaaatgatccccggaatgcaggggcagataagcgaagatgacattgacaaggcgaacctgaaacgtcaggaagccataatctcatccatgacccgcaaggaacgcgccaaccatctgatcataggccccccgcgccgcagccgcattgccaaaggctccggcacctcggtagcggaagtcgcccgccttcttaaacaatttgagaagatgcgcgtcatgatgaagaaaatggctaaaatgggaaaaaaccccgcgcagctaaatcagttaataggtaataggtaa

SEQ ID NO: 62674 - protein, 447 aa, Unknown
  Obtained from environmental sample
  DOMAIN (1)...(87): SRP54-type protein, helical bundle domain
  misc_feature (1)..(447): Xaa is any amino acid
MFDKLTNKITDALRFVAGKSTISEKNIEDAVDAIKMALLEADVNLRVVRRFVNATIEEAKGEKVLRAVDPGQQFIKIIHDKLVSFLGGADTAEQKLKLKGPDVISAIMMLGLQGSGKTTSSAKLALRLKKEGRKPLLVACDLVRPAAMEQLAVLGGQVGVPVHREEGAKDSAAVYRNALAWAKQNLIDTLIIDTTGRLQIDESMMAELSRLKEAVQPDEMLLVADSMTGQSAVDIAKTFDEKIGLTGVVLTKFDSDTRGGAALSLKTITGKPLKFTGTGEKPEDFEPFHPERMAGRILGMGDVVSLVEKAQEVIDQKEAMELQKKMEKENFTLEDWLNQLRSVKKMGSLQSMLEMIPGMQGQISEDDIDKANLKRQEAIISSMTRKERANHLIIGPPRRSRIAKGSGTSVAEVARLLKQFEKMRVMMKKMAKMGKNPAQLNQLIGNR

SEQ ID NO: 62675 - DNA, 414 bp, Unknown
  Obtained from environmental sample
  misc_feature (1)..(414): n is a, c, g, or t
atgccaaggatgcgtcccgccatgcgctccgggtggaaaggctcaaagtcttcgggcttctccccggttcccgtaaatttaaggggcttgccggttatggttttaagggaaagcgccgcgccgcccctcgtgtccgaatcaaacttggtcagaacaacgcccgttagtccgattttttcgtcaaaggttttcgcgatgtcaacggcggactggccggtcatcgagtcggcgacaaggagcatttcatcgggctgtacggcttctttcagccgggaaagctccgccatcatggattcatcaatttgcaggcggcccgtggtatcaataatcagggtgtcaatcaggttttgctttgcccatgcaagagcgttcctgtacactgcggcgctgtccttagccccctcctcacggtga

SEQ ID NO: 62676 - protein, 137 aa, Unknown
  Obtained from environmental sample
  misc_feature (1)..(137): Xaa is any amino acid
MPRMRPAMRSGWKGSKSSGFSPVPVNLRGLPVMVLRESAAPPLVSESNLVRTTPVSPIFSSKVFAMSTADWPVIESATRSISSGCTASFSRESSAIMDSSICRRPVVSIIRVSIRFCFAHARAFLYTAALSLAPSSR

SEQ ID NO: 62677 - DNA, 1215 bp, Unknown
  Obtained from environmental sample
  misc_feature (1)..(1215): n is a, c, g, or t
atggaaaaccaattccagctgagttatctgaattataaaaaagacgcgtatgttattgtggaaggcaagcagaaggcggactttttctttatcatccaacagggaaatgtaagaatcttcaaagatgcattggtgggtggcgaagatgacgtactcggtcccggggacatctttggcgttatttccaccatgtcatcccacagccatatagaatccgcccaggcgttgacagacgttgtgctcatttctgttcagaagaatcaatacgtggagctcatccagagaaatacccaggtagccataaaaataatcatgcaattttccaagcgcctcaggtacctgaacgagacactcgcgaggcttaccctgaaaaacaacgctgtagacggcccttcccacctgtataatgtggcggaatattatctcagccaaaaacagtatggccaggccatgtatgcctatggccaatatgtaaagcactgccccaacggagaaaaagcggcggccgccagtgaaaagtttgcgaagctgtcaagccaaatcgaacaaacgaaattcgccgcgaatgaagtgaaccggacttaccgcagaaatacaatgctctttgccgaaggggaaccgggagaccaacttttcatcattcagaaaggctccataaagattacaaaaatcgttgaccataaagaggtgcttcttgcgatgctgaagcccggcgatatactcggtgaaatggcggtattggaaggcaaaccccgggcggccagcgctttggcttatgaggactgtgacgtgatggttgtgaacaaagctaactttgaattaattataaaaaaccagccccagatcatcgccaagattacaaccctccttgcggataggatctggctgatgtacaagcagttggccaatgccctgattgaaaatccaaagggccggatgtatgacgcgctgcttatccagcttgaaaagaaccgtatcaccctggacggcgaaacttcttatatcttcacttttgggctgcctgaactgattaacatggtcgggcttcccgagaagcagggcactgcggtttttacacagatgctggaaaacaaggaaattcagatagtaggcagcaagatccgcactacatctactgcggaaattcttaaacagtcggaatatttccgcaagatggacaaaatagaaaaaaccagattacaaaataataactaa

SEQ ID NO: 62678 - protein, 404 aa, Unknown
  Obtained from environmental sample
  DOMAIN (9)...(98): Cyclic nucleotide-binding domain
  misc_feature (1)..(404): Xaa is any amino acid
MENQFQLSYLNYKKDAYVIVEGKQKADFFFIIQQGNVRIFKDALVGGEDDVLGPGDIFGVISTMSSHSHIESAQALTDVVLISVQKNQYVELIQRNTQVAIKIIMQFSKRLRYLNETLARLTLKNNAVDGPSHLYNVAEYYLSQKQYGQAMYAYGQYVKHCPNGEKAAAASEKFAKLSSQIEQTKFAANEVNRTYRRNTMLFAEGEPGDQLFIIQKGSIKITKIVDHKEVLLAMLKPGDILGEMAVLEGKPRAASALAYEDCDVMVVNKANFELIIKNQPQIIAKITTLLADRIWLMYKQLANALIENPKGRMYDALLIQLEKNRITLDGETSYIFTFGLPELINMVGLPEKQGTAVFTQMLENKEIQIVGSKIRTTSTAEILKQSEYFRKMDKIEKTRLQNNN

SEQ ID NO: 62679 - DNA, 1431 bp, Unknown
  Obtained from environmental sample
  misc_feature (1)..(1431): n is a, c, g, or t
atggaacaggcattcatcgacatactaaaacaactcgtaaaagaacaaggcagcgccgtgttaacaacagacacgaaaaaatgcaaggcgtttttagccgactacactaaaaacgattacaaaaaagaaagccgctttcttttacaggctgttgacgcggaagtcgcaaaacaaatagacagcgcggacgaccttgcggcgtgcaagaaagcgcaaatcagggaactggaagaagaacatggacttaataccgttattgcgacggacatagtgaacgtcctggcgcttgttttacgaggtgacacaaccgtaacaatatcgcctgccgatgagaaagccgccgccgaagccaaggccgctgcagaagcaaaagccgccgccgaagcaaaggctgccgccgaagcaaaagctgccgccgaagcaaaagctgccgcggaagcaagagccgccgcagaagccagagccgctgccgaagcaagagtcgccgcagaagaaagagccgctgccgaagccagagccgccgccgaagcaaaggctgccgccgaagccaaagccgccgccgaagccagagccgccgccgaagccagagccgccgctgaagccagagccgccgctgacgccaaagccgccgctgaagcaagaactgctgtcgacgctaaagccgcatcaacatccgccaaaggaaaactgactcttaaaaaaggctattatgaaggtgacttagttaacggcgagcctaatggtaaaggtacaatatactatgtttcacaaatgcaccacaaatcatcttacacaggcgatgtagtcaacggtaaaccccatggcaaagggaaaaaagtaacttttataacatttcctttttatgaatcagtttacgaaggtgattttgcttacggagagccccatggcaaagggaaagaaacaaaaacaacagacggttttcccagcggcctttataccgaaataatttatgaaggtgattttgtagccgggaaaaaaaccggtaaaggaaagacgacagaaaattattttactaaatccggttatgataagaaatactctaacgacagagtatatgaaggcgatcatgttgacggaaaacctgaaggcaaagggaaatcaactgacaaagacggcactgtttgcgaaggctatttcaatgggaacaacatcaaaggaaagataacattcgccaacggtaatgtatacgaaggcgatatttggtccagctatccgtccggtaaaggaaaaatgatgttttcaaacggcgatgtatacgaaggcgattggtatgttggcagtcgtaccggcaaaggcaaaatgacatacgctgacggcagaattgaagaaggaaactggaaagacaacgtgtttaagggcaagggaccgtttggcctgttcggcaggacaagcgggataaataaaaaataa

SEQ ID NO: 62680 - protein, 476 aa, Unknown
  Obtained from environmental sample
  DOMAIN (10)...(368): TolA protein
  misc_feature (1)..(476): Xaa is any amino acid
MEQAFIDILKQLVKEQGSAVLTTDTKKCKAFLADYTKNDYKKESRFLLQAVDAEVAKQIDSADDLAACKKAQIRELEEEHGLNTVIATDIVNVLALVLRGDTTVTISPADEKAAAEAKAAAEAKAAAEAKAAAEAKAAAEAKAAAEARAAAEARAAAEARVAAEERAAAEARAAAEAKAAAEAKAAAEARAAAEARAAAEARAAADAKAAAEARTAVDAKAASTSAKGKLTLKKGYYEGDLVNGEPNGKGTIYYVSQMHHKSSYTGDVVNGKPHGKGKKVTFITFPFYESVYEGDFAYGEPHGKGKETKTTDGFPSGLYTEIIYEGDFVAGKKTGKGKTTENYFTKSGYDKKYSNDRVYEGDHVDGKPEGKGKSTDKDGTVCEGYFNGNNIKGKITFANGNVYEGDIWSSYPSGKGKMMFSNGDVYEGDWYVGSRTGKGKMTYADGRIEEGNWKDNVFKGKGPFGLFGRTSGINKK

SEQ ID NO: 62681 - DNA, 363 bp, Unknown
  Obtained from environmental sample
  misc_feature (1)..(363): n is a, c, g, or t
atgagaaagccgccgccgaagccaaggccgctgcagaagcaaaagccgccgccgaagcaaaggctgccgccgaagcaaaagctgccgccgaagcaaaagctgccgcggaagcaagagccgccgcagaagccagagccgctgccgaagcaagagtcgccgcagaagaaagagccgctgccgaagccagagccgccgccgaagcaaaggctgccgccgaagccaaagccgccgccgaagccagagccgccgccgaagccagagccgccgctgaagccagagccgccgctgacgccaaagccgccgctgaagcaagaactgctgtcgacgctaaagccgcatcaacatccgccaaaggaaaactga

SEQ ID NO: 62682 - protein, 120 aa, Unknown
  Obtained from environmental sample
  misc_feature (1)..(120): Xaa is any amino acid
MRKPPPKPRPLQKQKPPPKQRLPPKQKLPPKQKLPRKQEPPQKPEPLPKQESPQKKEPLPKPEPPPKQRLPPKPKPPPKPEPPPKPEPPLKPEPPLTPKPPLKQELLSTLKPHQHPPKEN

SEQ ID NO: 62683 - DNA, 564 bp, Unknown
  Obtained from environmental sample
  misc_feature (1)..(564): n is a, c, g, or t
ttggcggatgttgatgcggctttagcgtcgacagcagttcttgcttcagcggcggctttggcgtcagcggcggctctggcttcagcggcggctctggcttcggcggcggctctggcttcggcggcggctttggcttcggcggcagcctttgcttcggcggcggctctggcttcggcagcggctctttcttctgcggcgactcttgcttcggcagcggctctggcttctgcggcggctcttgcttccgcggcagcttttgcttcggcggcagcttttgcttcggcggcagcctttgcttcggcggcggcttttgcttctgcagcggccttggcttcggcggcggctttctcatcggcaggcgatattgttacggttgtgtcacctcgtaaaacaagcgccaggacgttcactatgtccgtcgcaataacggtattaagtccatgttcttcttccagttccctgatttgcgctttcttgcacgccgcaaggtcgtccgcgctgtctatttgttttgcgacttccgcgtcaacagcctgtaaaagaaagcggctttcttttttgtaa

SEQ ID NO: 62684 - protein, 187 aa, Unknown
  Obtained from environmental sample
  SIGNAL (1)...(27)
  misc_feature (1)..(187): Xaa is any amino acid
MADVDAALASTAVLASAAALASAAALASAAALASAAALASAAALASAAAFASAAALASAAALSSAATLASAAALASAAALASAAAFASAAAFASAAAFASAAAFASAAALASAAAFSSAGDIVTVVSPRKTSARTFTMSVAITVLSPCSSSSSLICAFLHAARSSALSICFATSASTACKRKRLSFL

SEQ ID NO: 62685 - DNA, 387 bp, Unknown
  Obtained from environmental sample
  misc_feature (1)..(387): n is a, c, g, or t
ttgcttcagcggcggctttggcgtcagcggcggctctggcttcagcggcggctctggcttcggcggcggctctggcttcggcggcggctttggcttcggcggcagcctttgcttcggcggcggctctggcttcggcagcggctctttcttctgcggcgactcttgcttcggcagcggctctggcttctgcggcggctcttgcttccgcggcagcttttgcttcggcggcagcttttgcttcggcggcagcctttgcttcggcggcggcttttgcttctgcagcggccttggcttcggcggcggctttctcatcggcaggcgatattgttacggttgtgtcacctcgtaaaacaagcgccaggacgttcactatgtccgtcgcaataa

SEQ ID NO: 62686 - protein, 128 aa, Unknown
  Obtained from environmental sample
  misc_feature (1)..(128): Xaa is any amino acid
MLQRRLWRQRRLWLQRRLWLRRRLWLRRRLWLRRQPLLRRRLWLRQRLFLLRRLLLRQRLWLLRRLLLPRQLLLRRQLLLRRQPLLRRRLLLLQRPWLRRRLSHRQAILLRLCHLVKQAPGRSLCPSQ

SEQ ID NO: 62687 - DNA, 396 bp, Unknown
  Obtained from environmental sample
  misc_feature (1)..(396): n is a, c, g, or t
atgacctactatgacggtacttatgatgaaggaaactggaaagaaggctattttattcacggtaaatggaaatttaaagacggatcattgtacgaaggcgatattgttgacgacataccgcacggtaaaggaaaaagaacatggagaaaaactttcagcgccgctgcattggctgtatatgaaggcgatttttccgccggcaaacaacacggtaaaggaaaaatgacatattatgacggtacttttgaagaagggaactggaaagatggcgaatttaaaggcaagggaccatttggcttatttggcagggcatccgaaaaggcggcggctgagttggagagagaaatagccaggcagaaagctcttaacactttgcgtatagacatcaaaaattaa

SEQ ID NO: 62688 - protein, 131 aa, Unknown
  Obtained from environmental sample
  DOMAIN (60)...(82): MORN repeat
  misc_feature (1)..(131): Xaa is any amino acid
MTYYDGTYDEGNWKEGYFIHGKWKFKDGSLYEGDIVDDIPHGKGKRTWRKTFSAAALAVYEGDFSAGKQHGKGKMTYYDGTFEEGNWKDGEFKGKGPFGLFGRASEKAAAELEREIARQKALNTLRIDIKN

SEQ ID NO: 62689 - DNA, 2679 bp, Unknown
  Obtained from environmental sample
  misc_feature (1)..(2679): n is a, c, g, or t
ttgatgaatttaatatgccgattatataagtatgaaaaaggtaccattttttcgtttgttttttgtcggtttacggttattttactgcttattagcggttgtaaaagcacttcaaagccccctgatatctgggatttattgcaaagcggggacgaaaatgcgcgtaatcacttccttagcgaagtcgatgtaaacgcagttgacccggatgggaaatcgcctctgcattacgcggcagaaaaaaaggacgcccagcttgcggctttttttatatcgctgggagctaaccccaatgttaccgataattttggtcaaactccgcttggaatctgtatcgctaataatgacgcaaaagtcgccgaggttttagcgacaggcggtcttgatattcatcagcctattcctgcagaggaaaacgcaatatcgtcgatcctcgctatggaaaaagcgccgactgtttttaacgcgattttaaatccaattactgtaaattccgcagatagattgggaagaactattttgcatattgcggtaatcgcgggtaatgaaagcgcggtatcggatatacttaaaatttcttccgcgcctatcgctcttataaataaaaaagataacgaagataaaaattctgttgactacgctcttgaaagacctgattccaaaattcatatctatatagccgagcaattaattttagccggcggttactgcgataatcagattttcacttattttggacctgctgttcgcagcggaaactacaatatacgccgtaacgaagggcttgctcccattcattatgcggtaattgaaaaccataccggacttatttatttccttttggataaaaaagtcgatttaaacattaaaactacttcgggagctacggctttacatgaggctgcaagggttggaaataaagacgttatagcgttacttattaaaaatggagcagatgttaacgccagagacggaaagggaaacactactctccatgtggggattccggctaatgtttacttagatgtattgggaatgttagtcgccaacggagccgatgtcaatctccgcgatgaacacggcgacactccccttcatatcgccattatgttaaatcgttcccctgaatcaatacaatttttgttaaattcagagagcgatgttcatatcagaaatataaacggaaaaacgccgttgtatatcgcggttcaggaacgcagaattacgctgattccgctgttattagcggaaggttctgaaatatttgcggcggacaacaatgcaataacaccttttgacttagcggtaaaatcaaacgacggtacttttaatttattaattacaaatgagactgtaaatcaaagagacagctacggcaatactatgcttcattgcgcgataaacaataaagcaacaccggaacaaatcggcagaatacttgatcagcgcgcgcttgttgattcaagaaacagagccggagataccgctcttcatctcgccgtcagaacaaatcagaaagaaagcggcgaatatttaatttcacgcggggcgagtattttttcgctcaacagcgccggcgaaagcccgcttttcctcgcgcttggaacaagtaatttacgcgaatggataataaacccaacaaccattaccgcaagggacgggcttggaaacaatatgctccactacgcggcggaatggggtttaaataacgcaattacaatgattataagaagcggtattcccgttgatacccagaatgccacagggcaaacgcctttattcatggcgacaaaaagcaacagcgcctctacattgaaaatctttgtcgacaataacgctaatcttaacgcgcgcgacagtcagggaaattctccgcttcacgccgctgtacgctggaacgccgtaacatcggtatctttcctgatttcggctgggatcgacgttgatgttcatgccttaaacggcaacacaccgttacatgattcagtcacccttaatttaccggaaattcaagctctgcttataagcaagggagccaaccttgagagcaaaaatattgacggcaacacgccgttaatggaagccgtaaggggcgcgtatgtaaactccatcgacaaacttatcgcgagcaacgcggacacatcgacaagaaacataaggggagatactccgcttcacatcgccgttgcatcggaaagaatcgatataatcgagcgacttcttaaaacaggcgtttccattcacgcgcgcaacacaaaaaacaggactccgtttcaaatgtctttaaccatatcgcccaggattgtatccgctcttttggaaaacaacagaatcaatatatccgacgacttcggcaattctgttcttcacgttgcgttacacgaaagagccgatgataacgtaataaggacaataatcagtcagggagccagagttaacgcggttgactataacggaaaaacgccgctacgccttgctcttgattatgaaatgcttgaagcggcaaaaatcatcgcggattcgggagccgacccattcataacagcggctgacaacagatcgcccgctgaaatcgccattgcaaaaggcgaggtatatttaagggcggttttctcaggcagagcgataaacgcgagagacagttccggcaataccattctgcactactccgcaagatag

SEQ ID NO: 62690 - protein, 892 aa, Unknown
  Obtained from environmental sample
  DOMAIN (784)...(817): Ankyrin repeat
  misc_feature (1)..(892): Xaa is any amino acid
MMNLICRLYKYEKGTIFSFVFCRFTVILLLISGCKSTSKPPDIWDLLQSGDENARNHFLSEVDVNAVDPDGKSPLHYAAEKKDAQLAAFFISLGANPNVTDNFGQTPLGICIANNDAKVAEVLATGGLDIHQPIPAEENAISSILAMEKAPTVFNAILNPITVNSADRLGRTILHIAVIAGNESAVSDILKISSAPIALINKKDNEDKNSVDYALERPDSKIHIYIAEQLILAGGYCDNQIFTYFGPAVRSGNYNIRRNEGLAPIHYAVIENHTGLIYFLLDKKVDLNIKTTSGATALHEAARVGNKDVIALLIKNGADVNARDGKGNTTLHVGIPANVYLDVLGMLVANGADVNLRDEHGDTPLHIAIMLNRSPESIQFLLNSESDVHIRNINGKTPLYIAVQERRITLIPLLLAEGSEIFAADNNAITPFDLAVKSNDGTFNLLITNETVNQRDSYGNTMLHCAINNKATPEQIGRILDQRALVDSRNRAGDTALHLAVRTNQKESGEYLISRGASIFSLNSAGESPLFLALGTSNLREWIINPTTITARDGLGNNMLHYAAEWGLNNAITMIIRSGIPVDTQNATGQTPLFMATKSNSASTLKIFVDNNANLNARDSQGNSPLHAAVRWNAVTSVSFLISAGIDVDVHALNGNTPLHDSVTLNLPEIQALLISKGANLESKNIDGNTPLMEAVRGAYVNSIDKLIASNADTSTRNIRGDTPLHIAVASERIDIIERLLKTGVSIHARNTKNRTPFQMSLTISPRIVSALLENNRINISDDFGNSVLHVALHERADDNVIRTIISQGARVNAVDYNGKTPLRLALDYEMLEAAKIIADSGADPFITAADNRSPAEIAIAKGEVYLRAVFSGRAINARDSSGNTILHYSAR

SEQ ID NO: 62691 - DNA, 447 bp, Unknown
  Obtained from environmental sample
  misc_feature (1)..(447): n is a, c, g, or t
atggccttaatcatgcccaaggcgaattccgcgagatttctcgttttcattgccggatgcaagtcgtcggcgtttaccgttacgaagtttagcggcgtagacgcggtcagcgcgccgtactcgtttgacatagagtttcagccgtccgaatcgttgaccgcgtccggcgcttcggattcggagcttaccgcggaacgcgttctcggcaaaccctgccgctttgagctgatccgcgacgggagcggcgagattaccggatacgacggcgtcgtttcggagttcaggaaaatgatccggtctaagcccgtctacgcgatacgcttggtgccgtggatggaactcctgtcgctcaatgtcaacaacagggtattccaaaagcaaagagtggtggatatcatcaagcaagtttatcagaatgccgggatagcccgcgcgttgcgcctttag

SEQ ID NO: 62692 - protein, 148 aa, Unknown
  Obtained from environmental sample
  misc_feature (1)..(148): Xaa is any amino acid
MALIMPKANSARFLVFIAGCKSSAFTVTKFSGVDAVSAPYSFDIEFQPSESLTASGASDSELTAERVLGKPCRFELIRDGSGEITGYDGVVSEFRKMIRSKPVYAIRLVPWMELLSLNVNNRVFQKQRVVDIIKQVYQNAGIARALRL

SEQ ID NO: 62693 - DNA, 1599 bp, Unknown
  Obtained from environmental sample
  misc_feature (1)..(1599): n is a, c, g, or t
gtgcagtaccgcgagagcgaccttaatttcatatcacggctgatggagcaaaacggtatatggtactatttttccggcgacggcggcgtagtcgtcaccgatgatttcgcagaattccctaagatggccggcggtattccctttgtggaaaacatcggctttgcggagactactaagcgtttacgcgacgataatgacgtagaggcgcggaatttcactaaacaggccgatgttgacggagaatcctccgttgacaataccgacgaatcggaagcattgcggctggaatatctctacggcggcgaattcggcgaatcggtctacgcgttaaccgccgtatcagccgttatccccaaaagcgttcggctgcgcaaccaaaactaccgtacgccggaaacgccgccggagggcgcatcggagggcgttgatataggcggcgcgtgggggagcgtgtacgagtacggcggcgcgttcaagaacgacgaggagggcaaacgcttggcgtcgctctatttaacgcgtttgcaaacggaaaattcgcaaacgctcggaagtagcaggtgcgcggcttttcgatccgggcgtataatctcaatcgacggcgtcggtgagtttttgttgctctccgtagagcataaaggcgggcagggggaggggagcggcaatccggaatacacatacaataaccgcttccgctgtattgattcaaccaagaaatcatacgccccgccgctgctcgcgaagccgccggtagccacagggctcatcacggcgcccatagacgcgttgggggaagatttgccgaacatcgacgagatggggagataccgcgtcaaactcccattcgacctctccgaaacgccggagtacggcgcgaccaaagatatccggctatcgcagatatcgggcggggacggctacggcgtccacttcccgtcaaagaaaaactcggagatgatactcggctacgttgacggaaatccggacaagcccgtaggcctcggcctgctgcccgacgccaacgcgaagtcggtctcaaacagcgggaataggactgaaaacgtcatacggacttggggcggcaacgagcttgtcatggacgacgagagggaaaaatcaaagatcgccatgagcaccacggaggggcataagctggttatggacgacctgaaagggctggcgcaaatcgctatgcgcaccgccgccggccacgggctgattatgaacgacgaggataaaaaagagatggtcacactccatacggtaggcggcaacgaacttattatggatgatgatgaggaaggagagaccgttacgctgtcaacgcctaaagtcgagggcaaacttggagtgctcagcagaataaaaccgcttttaacggcggcaagtacggcggtaaacgtcgttaaaacaatatcgctgagcaaaatcgggcttcccgatagcggcgtggctcttaataaagacatcgggaaaagcgaactttcattggataataaggagttttccgccgcccttaaagcgtgcgggcaggagatatccctaaaagaggatgtcaataattcgaattgcggaataaacctcaccactcgaccatga

SEQ ID NO: 62694 - protein, 532 aa, Unknown
  Obtained from environmental sample
  DOMAIN (251)...(333): Protein of unknown function, DUF586
  misc_feature (1)..(532): Xaa is any amino acid
MQYRESDLNFISRLMEQNGIWYYFSGDGGVVVTDDFAEFPKMAGGIPFVENIGFAETTKRLRDDNDVEARNFTKQADVDGESSVDNTDESEALRLEYLYGGEFGESVYALTAVSAVIPKSVRLRNQNYRTPETPPEGASEGVDIGGAWGSVYEYGGAFKNDEEGKRLASLYLTRLQTENSQTLGSSRCAAFRSGRIISIDGVGEFLLLSVEHKGGQGEGSGNPEYTYNNRFRCIDSTKKSYAPPLLAKPPVATGLITAPIDALGEDLPNIDEMGRYRVKLPFDLSETPEYGATKDIRLSQISGGDGYGVHFPSKKNSEMILGYVDGNPDKPVGLGLLPDANAKSVSNSGNRTENVIRTWGGNELVMDDEREKSKIAMSTTEGHKLVMDDLKGLAQIAMRTAAGHGLIMNDEDKKEMVTLHTVGGNELIMDDDEEGETVTLSTPKVEGKLGVLSRIKPLLTAASTAVNVVKTISLSKIGLPDSGVALNKDIGKSELSLDNKEFSAALKACGQEISLKEDVNNSNCGINLTTRP

SEQ ID NO: 62695 - DNA, 444 bp, Unknown
  Obtained from environmental sample
  misc_feature (1)..(444): n is a, c, g, or t
ttgtatattaagtgtatgaataatgagcaacttaggaaaattgatattggaggtttcaaatccattaaaaaaagcagcgtggaattaaatatgcttaatgtgcttattggaagcaatggagcgggaaaatccaattttatttctgtttttaccttgctaaataatgtaataaaaaaagagttgcaaacatatatagcagcttgcggaggagcaaatacgtttttgttcaatgggtcaaaagaaacgactttaatacatttacattttcaatttggaagcaattcttattgttttaatttatccaaaacagacaatgacactttttatttcgatagtgaatggtttggttaccgtggtaatgtggattatagcagaagtatatcatcaggacattctgaatctaaatgggaaaaaggaatggcaatagatactcggccgatctga

SEQ ID NO: 62696 - protein, 147 aa, Unknown
  Obtained from environmental sample
  misc_feature (1)..(147): Xaa is any amino acid
MYIKCMNNEQLRKIDIGGFKSIKKSSVELNMLNVLIGSNGAGKSNFISVFTLLNNVIKKELQTYIAACGGANTFLFNGSKETTLIHLHFQFGSNSYCFNLSKTDNDTFYFDSEWFGYRGNVDYSRSISSGHSESKWEKGMAIDTRPI

SEQ ID NO: 62697 - DNA, 3228 bp, Unknown
  Obtained from environmental sample
  misc_feature (1)..(3228): n is a, c, g, or t
ttgtgccacacacaccgcaaacaaaacggcaaaacaaatttctattttccccctatgaaattccgcgacctacccaaatcacaaacattcccccaaatagaggaaaaaatcctcttcatctgggacacagacgacagcttcgccaaatgcctgcaaaaagacggcaagccgttttccttttatgacggacctccattcgcaacagggctgccgcattacgggcatttgctcgccggcactatcaaagatattgtgccacgctactggacaatgaaagggtgcaaagtgccacgccgctttgggtgggactgccacgggcttcccattgagagcataatacagaaccagctaaatctcgctggcattgaggagatacaaaaattcggtatagacaaattcaacgaagcctgtcgcggaacggtgctcaaatatacaggcgagtggagaaagacggttcgccgtatggggcggtgggtggattttgacaatgactacaaaacgatggacaccgattttatggagtccgtctggcacgtgttcaaggagtgctgggacaaagggctaatctacaaaggctaccgcgttcagccatacagccccgccctcgccacgccgctctcaaactttgaaaccaaccaaggctacaaagacaggcaagaccccagcatcacgcttatgttcccgctcactgaacgcaaaggcgaaagcctgctcgtttggacaacaacgccctggacacttccctccaaccttgccattgccgttggcgaggatatagactatgttttgatagacggctgctgggtagccgatgcaagggctggcacatatttcaaagagccaaaaatcacagccaaatgcaagggaaaagatttggcagggttgcactacgaaccgctgttcaggcttgcagacggctttgcaactgcggaggaatccgccaaacgctacacaatttacaccgcacctttcgtgagcgttgaagacggggcgggggcggttcatatcgcgccctcgtttggagaggaagattttgtgcttgggcaggaaatagggcttggtctgtttgacccattggacgcggagggcaaattcaccagcaaagttccgcaatggcaaggggtgggggctaaggaagccgacaaagcgataatcgcgcatctcanagagcaaggcagggtgtttaagcacgagacgatagtgcatagctatccgcattgctggcggacaggcgttccgctgctatacagggcactcagcacttggtttatgaaacttgacgcacccgtaacgaacgcggagggcacaaccaaatccgtcaaggaatggatgctcacctgcaaccagcaaatagagtgggtgcccgaccacatcaaaaacggtcggttcggcaaatggctggaaaacgcacgcgactggaacctgtcacgcaaccgcttctggggaacgccaatacctgtgtggattgcaggtgacggcgaaatgctctgcataggctcaatagaggaattaaaaaaagcaagcgggacagaattgcacgacttgcacaaacacttcgtggataaaatagcaataacaaaaaacggcaaaacattcaaacgcacaagcgaagtctttgattgctggtttgagagcggcgcaatgccctacgcccaaaaccactaccccttctccaacgcggagcacttcaacaaaaccttccccgccgacttcatcgccgaaggcttagaccaaacaagaggctggttctacacactgaccgtgctagccgccgccctgttccaaaagcccgcattcaaaaacgtgatagtgaatggcataatcctcgccgaagacggctccaaaatgagcaagagcaaaaagaactaccccgaccccaccgaactcatagaccgcacaggcgcggacgcagtccgcctgttcctcataaactccgccgccctcaaagccgaggaactgcggttcagcgaggagggcgttaagcaaatagtgaaaagtgtgatgctcccattgtggaacgcgctcggcttcttcatctccaaccacaacgcagactcctcaaaaggccagctcaaatggcagcccgcagacgaatggaaaagcgacaacgagctagacctatggataatcgcggtgctgcaagacctgagcaaaaaagtggaaaccgaaatggcagcatacagactatacgccgtagtccccgtaatcctctcgttcatagacgacctcacaaactggtatgtccgccgaagccgccgccgcttttggaaaagcgacaacgacagcgacaaaaacaacgcctacgcaacactatacaaagcactcgtggatttcagcaaaatcctagccccattcctgccattcctcgcagaggaaatctaccaaatactcgtgagggaagcgaacccaaacgccccagtctcggttcatctcacctcataccccgaacacaacgcagagtacgcaaacgaaaaactagtccgccgaatgtcattggttagaagcgccatagaaaaaggcagagcgatacgcagcgcaaacgaaatcaaaaaccgccagcccctcaaaacattgacgctagttccccacaacgaggaagcaaagcaagtagccgagacaatgcaagatttaatccttgaagaactaaacgtagagcaactccatttcgctggcgatgacaccgagctggcgaaaatctccgccaagcccaacttcgcaggcataaaagcaaaaggagcggactacgccaaaaatatgaaaaccatatccaccgccatcaccgcattaaccgccgagcaaatcaagcaaatccaaagcggcacaccgcttgacgttgccggtctccccatagactactcctgcctaatgctagtccgcgaagtagccgaaggtctcgccgtagaagcagacgaaaactacaccatagccttggatttgaaaataacgccagagctgcgtcaaagctgcatagcgagagagttggtaaatcgcatacaaaaccgccgcaaggaaatggatttgcagattacggacaagataaacattgagttgggagtgttgggtgctgacacggattttaaggtagcagtggaaaagcacaaatcttatattttggaagagacacaaggtgttaatctttatgtgaatgatattgtgttttttactggcaagttgccaacggtgaatgttgaggggagtgaagtggaggtttgtatattaagtgtatga

SEQ ID NO: 62698 - protein, 1075 aa, Unknown
  Obtained from environmental sample
  DOMAIN (706)...(860): Anticodon-binding domain
  misc_feature (1)..(1075): Xaa is any amino acid
MCHTHRKQNGKTNFYFPPMKFRDLPKSQTFPQIEEKILFIWDTDDSFAKCLQKDGKPFSFYDGPPFATGLPHYGHLLAGTIKDIVPRYWTMKGCKVPRRFGWDCHGLPIESIIQNQLNLAGIEEIQKFGIDKFNEACRGTVLKYTGEWRKTVRRMGRWVDFDNDYKTMDTDFMESVWHVFKECWDKGLIYKGYRVQPYSPALATPLSNFETNQGYKDRQDPSITLMFPLTERKGESLLVWTTTPWTLPSNLAIAVGEDIDYVLIDGCWVADARAGTYFKEPKITAKCKGKDLAGLHYEPLFRLADGFATAEESAKRYTIYTAPFVSVEDGAGAVHIAPSFGEEDFVLGQEIGLGLFDPLDAEGKFTSKVPQWQGVGAKEADKAIIAHLXEQGRVFKHETIVHSYPHCWRTGVPLLYRALSTWFMKLDAPVTNAEGTTKSVKEWMLTCNQQIEWVPDHIKNGRFGKWLENARDWNLSRNRFWGTPIPVWIAGDGEMLCIGSIEELKKASGTELHDLHKHFVDKIAITKNGKTFKRTSEVFDCWFESGAMPYAQNHYPFSNAEHFNKTFPADFIAEGLDQTRGWFYTLTVLAAALFQKPAFKNVIVNGIILAEDGSKMSKSKKNYPDPTELIDRTGADAVRLFLINSAALKAEELRFSEEGVKQIVKSVMLPLWNALGFFISNHNADSSKGQLKWQPADEWKSDNELDLWIIAVLQDLSKKVETEMAAYRLYAVVPVILSFIDDLTNWYVRRSRRRFWKSDNDSDKNNAYATLYKALVDFSKILAPFLPFLAEEIYQILVREANPNAPVSVHLTSYPEHNAEYANEKLVRRMSLVRSAIEKGRAIRSANEIKNRQPLKTLTLVPHNEEAKQVAETMQDLILEELNVEQLHFAGDDTELAKISAKPNFAGIKAKGADYAKNMKTISTAITALTAEQIKQIQSGTPLDVAGLPIDYSCLMLVREVAEGLAVEADENYTIALDLKITPELRQSCIARELVNRIQNRRKEMDLQITDKINIELGVLGADTDFKVAVEKHKSYILEETQGVNLYVNDIVFFTGKLPTVNVEGSEVEVCILSV

SEQ ID NO: 62699 - DNA, 414 bp, Unknown
  Obtained from environmental sample
  misc_feature (1)..(414): n is a, c, g, or t
atgtctttgtccgacataatcaacgcgtcgctcgaccgttttcacagcatcgccaagactgagacggtcttcggggagccgctcaaggcgggggacgtgacgcttatacctatttcaaaggtgtcgatagggttcgccgccggcgggggtgggaaggacgacaagtgcggttctggagcgggcgctgggggcggggtgaccgtgactccggtggctttggtctccatatccaaagagggcggtttgcaggtgcaccctttagacaacgacctcggcgacctcggaggcctgatagccgccgcgccggaagcggtgaagaagctcataaagatgttcaagaagaaagacgcggatggggataaggacgggaatggggatgatgaagcagataaaggggatggaaacactgtctga

SEQ ID NO: 62700 - protein, 137 aa, Unknown
  Obtained from environmental sample
  misc_feature (1)..(137): Xaa is any amino acid
MSLSDIINASLDRFHSIAKTETVFGEPLKAGDVTLIPISKVSIGFAAGGGGKDDKCGSGAGAGGGVTVTPVALVSISKEGGLQVHPLDNDLGDLGGLIAAAPEAVKKLIKMFKKKDADGDKDGNGDDEADKGDGNTV

SEQ ID NO: 62701 - DNA, 1515 bp, Unknown
  Obtained from environmental sample
  misc_feature (1)..(1515): n is a, c, g, or t
ttgttcgtgcggttcgtggttaaaaagattttgactttaacgctgaaaggccccaaaaaatatgtacatcattcaagtagcccccgaatgcgcccccgtcgccaaagtcggcggtctggcggacgtaatcttcggtctctcctgggagcactctatacgcggaaacgacgtagagatcatcattcccaagtacgactgcatgcgctacgaccaaatctgggggatgaccgtcagccacaacgacctctgggtcccctggttcggcggcgcggtgcactgctccgtctggttcggcttcgtccacgggcgcaagtgcttcttcatagacccgcactcaaacgacaacttcttcaaccgccgcactttctacggctgcaacgacgacgtgctgcgctacgccttcttctgcaaagccgccctcgagtacatgctgaaaagcgggaagcggcccgacatcatacactgccacgactggcagaccggcctcctgcccgtcatgctcgccgagatataccagcaccacgacatgtggcgccagcgcgtctgctacaccatacacaacttcaagcaccagggcatcttcggccacgaaattctggccgccacgggcctggggcgccccgaatactacttcagcccgctccagctgcgcgacgacaacaacgcctccgtcctcaactgcatgaagggcggcatagtatattcaaacttcgtgaccaccgtctcccccaaacacgcctgggaggcccgccacaccgggcagggccacggtctgggcaacaccctgcacacccaccaaggcaagttcggcggcgtgctcaacggcgtggactacggaacgtggaacccggagctcgacggcttcctccccgcccgatacggcgtggacaacatagaagaaaaatacaagaacaaggacgccctgcgcgaccgcttctggctatacaagagcaacaagcccataatctcgtacataggccgcctcgacgaacagaagggcctcggcctcatctgccacgccgcccactacgccctgtcccgaggcgcccagttcatactgctcggctccccgtccaacaacgcgatagccggccagttcgcccacctgaggaaccaattgggtcagagcgtcgactgccacatagaattgggattcaacgaggagctctcgcacctgatctacgccggctccgacatggtggtggtccccagcgccttcgagccctgcggcctgacgcagcttatagcgctgcgatacggcaccgtccccatagtccgctccgtgggcgggctggccgacacggtcttcgacaaagactacgcccacgtagacatgggcatgcgcaacggctacaccttcaacgacctgaacaaccaggcgctggagtcggccatgaacagggcgatagggctctactacgactacccgaacgatttcaggtcgctcatgataaacgggatgaaggcggactattcttggaactatccgggaacgcattatatgaatatttatga

SEQ ID NO: 62702 - protein, 504 aa, Unknown
  Obtained from environmental sample
  misc_feature (1)..(504): Xaa is any amino acid
MFVRFVVKKILTLTLKGPKKYVHHSSSPRMRPRRQSRRSGGRNLRSLLGALYTRKRRRDHHSQVRLHALRPNLGDDRQPQRPLGPLVRRRGALLRLVRLRPRAQVLLHRPALKRQLLQPPHFLRLQRRRAALRLLLQSRPRVHAEKREAARHHTLPRLADRPPARHARRDIPAPRHVAPARLLHHTQLQAPGHLRPRNSGRHGPGAPRILLQPAPAARRQQRLRPQLHEGRHSIFKLRDHRLPQTRLGGPPHRAGPRSGQHPAHPPRQVRRRAQRRGLRNVEPGARRLPPRPIRRGQHRRKIQEQGRPARPLLAIQEQQAHNLVHRPPRRTEGPRPHLPRRPLRPVPRRPVHTARLPVQQRDSRPVRPPEEPIGSERRLPHRIGIQRGALAPDLRRLRHGGGPQRLRALRPDAAYSAAIRHRPHSPLRGRAGRHGLRQRLRPRRHGHAQRLHLQRPEQPGAGVGHEQGDRALLRLPERFQVAHDKRDEGGLFLELSGNALYEYL

SEQ ID NO: 62703 - DNA, 1473 bp, Unknown
  Obtained from environmental sample
  misc_feature (1)..(1473): n is a, c, g, or t
atgtacatcattcaagtagcccccgaatgcgcccccgtcgccaaagtcggcggtctggcggacgtaatcttcggtctctcctgggagcactctatacgcggaaacgacgtagagatcatcattcccaagtacgactgcatgcgctacgaccaaatctgggggatgaccgtcagccacaacgacctctgggtcccctggttcggcggcgcggtgcactgctccgtctggttcggcttcgtccacgggcgcaagtgcttcttcatagacccgcactcaaacgacaacttcttcaaccgccgcactttctacggctgcaacgacgacgtgctgcgctacgccttcttctgcaaagccgccctcgagtacatgctgaaaagcgggaagcggcccgacatcatacactgccacgactggcagaccggcctcctgcccgtcatgctcgccgagatataccagcaccacgacatgtggcgccagcgcgtctgctacaccatacacaacttcaagcaccagggcatcttcggccacgaaattctggccgccacgggcctggggcgccccgaatactacttcagcccgctccagctgcgcgacgacaacaacgcctccgtcctcaactgcatgaagggcggcatagtatattcaaacttcgtgaccaccgtctcccccaaacacgcctgggaggcccgccacaccgggcagggccacggtctgggcaacaccctgcacacccaccaaggcaagttcggcggcgtgctcaacggcgtggactacggaacgtggaacccggagctcgacggcttcctccccgcccgatacggcgtggacaacatagaagaaaaatacaagaacaaggacgccctgcgcgaccgcttctggctatacaagagcaacaagcccataatctcgtacataggccgcctcgacgaacagaagggcctcggcctcatctgccacgccgcccactacgccctgtcccgaggcgcccagttcatactgctcggctccccgtccaacaacgcgatagccggccagttcgcccacctgaggaaccaattgggtcagagcgtcgactgccacatagaattgggattcaacgaggagctctcgcacctgatctacgccggctccgacatggtggtggtccccagcgccttcgagccctgcggcctgacgcagcttatagcgctgcgatacggcaccgtccccatagtccgctccgtgggcgggctggccgacacggtcttcgacaaagactacgcccacgtagacatgggcatgcgcaacggctacaccttcaacgacctgaacaaccaggcgctggagtcggccatgaacagggcgatagggctctactacgactacccgaacgatttcaggtcgctcatgataaacgggatgaaggcggactattcttggaactatccgggaacgcattatatgaatatttatgattttataaagcataaatag

SEQ ID NO: 62704 - protein, 490 aa, Unknown
  Obtained from environmental sample
  DOMAIN (286)...(466): Glycosyl transferases group 1
  misc_feature (1)..(490): Xaa is any amino acid
MYIIQVAPECAPVAKVGGLADVIFGLSWEHSIRGNDVEIIIPKYDCMRYDQIWGMTVSHNDLWVPWFGGAVHCSVWFGFVHGRKCFFIDPHSNDNFFNRRTFYGCNDDVLRYAFFCKAALEYMLKSGKRPDIIHCHDWQTGLLPVMLAEIYQHHDMWRQRVCYTIHNFKHQGIFGHEILAATGLGRPEYYFSPLQLRDDNNASVLNCMKGGIVYSNFVTTVSPKHAWEARHTGQGHGLGNTLHTHQGKFGGVLNGVDYGTWNPELDGFLPARYGVDNIEEKYKNKDALRDRFWLYKSNKPIISYIGRLDEQKGLGLICHAAHYALSRGAQFILLGSPSNNAIAGQFAHLRNQLGQSVDCHIELGFNEELSHLIYAGSDMVVVPSAFEPCGLTQLIALRYGTVPIVRSVGGLADTVFDKDYAHVDMGMRNGYTFNDLNNQALESAMNRAIGLYYDYPNDFRSLMINGMKADYSWNYPGTHYMNIYDFIKHK

SEQ ID NO: 62705 - DNA, 1665 bp, Unknown
  Obtained from environmental sample
  misc_feature (1)..(1665): n is a, c, g, or t
atgaatatgatagaccactttgaaaaaatcattgggatggccaaagaaaacggctttaacgacgctttctttgaggcggcaaaggaacacctggacgcggtctcgggccttatgcatataagccccgtacagactgccctctttgcgattattttggagcgtttcggcaacagcaatgtatctttggacaccattgtcgagaccttaaaatgcggtaaaatgcagcttcttaggtatatggatgatattgacgtactgaaaaagaataaattgatcaaggaaacgcgtcaatcggattactcaagacacaagagcaacagctctaaatatcaaatcccgagggatgtcattaatgcggtccgcaaaggcattgaatgtaattccatcaaaaataatgaaaacctcagtcccgaagaattttttgactacgccgaggagttgttgggcgctgtagcagatgatgaaatagacactgatgaactaaatgaagaaataaaatttcttttagatggcaataaaaatatttgctttgtaaagaaaaaagtcgaatatgatttgggagaagactccgtaatgcttttgtttattttttgctgtgaattgctgcaccatgataaagatacaatagaaatgaataacctttggagcatactgactaatttttttgagccaacaaagctgtaccaattcaagaaaaaattcaaatcaagagatctcaaaataatgcaaaaagggctggttgagtatgaatttgaaaacggcatggctgatacaaattatatccggctcactcaaaaggcaaaagacgaattcctctgcgatgttgatcttaaagaaaaaataaaacataggggaagggattttattcgcgtagaaaacattcccataaagaagcttttttacagcgggaaaatcaaaaaccgcatcggcgaattaacggaaatgctgcgcgaggaaaatttttcaggcattcagaaacgcctgggggaaagcgggatgcgcaccgggtttgcctgtattttttcaggcccgccaggaaccgggaagaccgagaccgcttatcagattgcccgtgaaacaggcagggatataatgcttgttgatatagccaataccaaaagcatgtggttcggggaaagcgaaaaacgcattaaggcggttttcgatcgttataggggaattgtgaaaaacaacggaagggttcccatcctcctctttaacgaggccgatgccgtttttggcaaacgcagggaatttgcgggatcccgcagcggtccggatcaaacggaaaacgcgatacaaaacataattttacaggagatggaaaacttaaacgggattcttatcgccacaaccaacatgacatccaactttgataaagcttttgaacgccgcttcctttacaaaataaattttgaaaagcccgatctggaattaaaaaggttgatgtggcaaagctttatccctgcccttaatgattctgacgccggacgcctcgcggagaaattcgatttttcaggcggccagatagaaaacatagcccgaaaaggcacggtttcctttattctgaaaggggcagcacctgatatatcttcccttgaaactttttgcggggaagagtcattcgaaaagacctcaaacggaataggctttcacggctgctaa

SEQ ID NO: 62706 - protein, 554 aa, Unknown
  Obtained from environmental sample
  DOMAIN (334)...(502): ATPase family associated with various cellular activities (AAA)
  misc_feature (1)..(554): Xaa is any amino acid
MNMIDHFEKIIGMAKENGFNDAFFEAAKEHLDAVSGLMHISPVQTALFAIILERFGNSNVSLDTIVETLKCGKMQLLRYMDDIDVLKKNKLIKETRQSDYSRHKSNSSKYQIPRDVINAVRKGIECNSIKNNENLSPEEFFDYAEELLGAVADDEIDTDELNEEIKFLLDGNKNICFVKKKVEYDLGEDSVMLLFIFCCELLHHDKDTIEMNNLWSILTNFFEPTKLYQFKKKFKSRDLKIMQKGLVEYEFENGMADTNYIRLTQKAKDEFLCDVDLKEKIKHRGRDFIRVENIPIKKLFYSGKIKNRIGELTEMLREENFSGIQKRLGESGMRTGFACIFSGPPGTGKTETAYQIARETGRDIMLVDIANTKSMWFGESEKRIKAVFDRYRGIVKNNGRVPILLFNEADAVFGKRREFAGSRSGPDQTENAIQNIILQEMENLNGILIATTNMTSNFDKAFERRFLYKINFEKPDLELKRLMWQSFIPALNDSDAGRLAEKFDFSGGQIENIARKGTVSFILKGAAPDISSLETFCGEESFEKTSNGIGFHGC

SEQ ID NO: 62707 - DNA, 1761 bp, Unknown
  Obtained from environmental sample
  misc_feature (1)..(1761): n is a, c, g, or t
atgacaggaacaaaaggaacggtggtagccgttaacggcaatatggtaagcgcccgttttgacggcgctgtctccatgaacgaggtcggttatgtcaaggtcgccgacaaaaagctaaaaagcgaggtaatccggatccgcggcgaagtatgccagttgcaggtcttcgagatcaccaagggtatcgcggttggcgatacggtggaatttaccggggatatgcttgccgtggaactggggcccggccttttgggccaggtgtacgatggcctccagaaccctttgccccagcttgcccaggcggcgggctattttctggaaaggggcgtctacatggatcccctgccggacaataaaaaatgggattttacccccaccgccaaagtgggcgacaaagtggttcgcgccgataccctcggcaccgtaatggaaggggcctttacccaccggattatggtgcccttcaacctgtacggctcatacaccgtgtcaaaaatctccaaagccggctcatacaaaatcaaagacacagtcgccgaacttaaagacgaaaaaggcaagaccgtcaacgttacattcagcttccgctggccggtaaaacgcgccgtggactgctatgaggaaaggcttaaaccggaagaacccatggtaacgagggtacgccttatcgacaccttcttcccggtagcccgcggcggcacctactgtatccccggccccttcggcgcgggcaagacggtattgcagcagattacaagccgttttgcggacgtagacattgtaatcgtagccgcctgcggtgagcgcgccggcgaagtcgtggaaaccttaaaggaattccccgaattaaaagacgaaaaaacaggtcgctccctcatggaaagaacaatcattatttgtaatacatcttcaatgcccgtcgccgcgcgcgaagcttccgtttacacggctgtaacgctcgccgagtattacaggcagatgggattgaacgtactcttgcttgcggactccacaagccgttgggcgcaggctatgcgtgaaatgtcagggcgcttggaagagattccgggcgaggaagcgttcccagcttacatggaatcgacaatcgccagcttctacgaaagagccggtatcgtccgcctgcgtgacggcagtttaggctctgtcacaatcggcggaacagtaagtcccgcgggcggtaactttgaagaacccgtaacgcaggctacattaaaagtcgtaggcgcgttccacggtctttcccgcgaacgttccgacgcgcgcaagttcccagccattcacccgcttgattcatggtcgaagtacaaaggaatcatcgacggcgaaaaagtagcctacgcgcatggttttatgcgccgcagttccgaagttgaacagatgatgaaggtcgtcggcgaagaaggaacaagcatagaagactacattattttccttaagggcgatttaatcgacgccgtatacttccagcagaactcgtttgacgaagtagacgcggcggtaaaacccgaaagacagaaatatgtttttgccaaattgttgtttattcttggttcaaaatttacttttgcggacaagaatgaagcgcgttcatggtttaacaaactcaggcaaaaattcctcgattacaacggaagccagtggaagagcgatcgttttgacaaacttgagtccgaaattgaatcggctgtaaagagtcaatcacagggtcttgataagaccgccgaaaaaataatttactag

SEQ ID NO: 62708 - protein, 586 aa, Unknown
  Obtained from environmental sample
  DOMAIN (8)...(72): ATP synthase alpha/beta family, beta-barrel domain
  misc_feature (1)..(586): Xaa is any amino acid
MTGTKGTVVAVNGNMVSARFDGAVSMNEVGYVKVADKKLKSEVIRIRGEVCQLQVFEITKGIAVGDTVEFTGDMLAVELGPGLLGQVYDGLQNPLPQLAQAAGYFLERGVYMDPLPDNKKWDFTPTAKVGDKVVRADTLGTVMEGAFTHRIMVPFNLYGSYTVSKISKAGSYKIKDTVAELKDEKGKTVNVTFSFRWPVKRAVDCYEERLKPEEPMVTRVRLIDTFFPVARGGTYCIPGPFGAGKTVLQQITSRFADVDIVIVAACGERAGEVVETLKEFPELKDEKTGRSLMERTIIICNTSSMPVAAREASVYTAVTLAEYYRQMGLNVLLLADSTSRWAQAMREMSGRLEEIPGEEAFPAYMESTIASFYERAGIVRLRDGSLGSVTIGGTVSPAGGNFEEPVTQATLKVVGAFHGLSRERSDARKFPAIHPLDSWSKYKGIIDGEKVAYAHGFMRRSSEVEQMMKVVGEEGTSIEDYIIFLKGDLIDAVYFQQNSFDEVDAAVKPERQKYVFAKLLFILGSKFTFADKNEARSWFNKLRQKFLDYNGSQWKSDRFDKLESEIESAVKSQSQGLDKTAEKIIY

SEQ ID NO: 62709 - DNA, 555 bp, Unknown
  Obtained from environmental sample
  misc_feature (1)..(555): n is a, c, g, or t
gtgagatcatactattactttattgcacagcttccttctcttttttacgagcaaaaaccgcccatgacatccgagcattttaaatcattagcggaagatttactggaagaaagcgatttaaaagtaatgaaatatctttcgtttaacgacgcgttttcgcctgaaggcggctgcgcttttgtaaaaaactggaaaaactgggaacgcgctttaaaattaaatcttgccaaagaaagagcgataaaattaaagagagatattccggccggggaaattccgtttttcccgcaggaagcgtcaattaccgcagttaaagcggttgacgaaaaatcacctttagacggcgagtttttactggataaagcgcgctggaccgccatagacgaaatcgccggcagagattattacagcgtaaataacatatacgcttattatttaaaattattactgcttgaaagaaggcagggatttaatatagaaaaagggtttgcagattataaaactttgtacgctgaaattttagcaagcgcacaacattccccgggagaaaactaa

SEQ ID NO: 62710 - protein, 184 aa, Unknown
  Obtained from environmental sample
  misc_feature (1)..(184): Xaa is any amino acid
MRSYYYFIAQLPSLFYEQKPPMTSEHFKSLAEDLLEESDLKVMKYLSFNDAFSPEGGCAFVKNWKNWERALKLNLAKERAIKLKRDIPAGEIPFFPQEASITAVKAVDEKSPLDGEFLLDKARWTAIDEIAGRDYYSVNNIYAYYLKLLLLERRQGFNIEKGFADYKTLYAEILASAQHSPGEN

SEQ ID NO: 62711 - DNA, 339 bp, Unknown
  Obtained from environmental sample
  misc_feature (1)..(339): n is a, c, g, or t
atggcgagaatatcacaacatgtcggcggaaattacaacgacgacgtgttaaaatccgcactgccggaattgattaaaaaatgggccgaaaaagacggcggcgatctttcggttgttttaccggaaggcgagctttcaaggcttcaaggtttctttaacgaaaaattaaaaagtgagctttctaagggcgtggaattaaaatctaaccgcaagttagcttcaggtttcagaatttccaataaagaaggttccgtatactatgatttttcatctgaagccgtcgccaaacaactttccgcctacttgaatccaaaattggcggaactcttaaaaaagtaa

SEQ ID NO: 62712 - protein, 112 aa, Unknown
  Obtained from environmental sample
  misc_feature (1)..(112): Xaa is any amino acid
MARISQHVGGNYNDDVLKSALPELIKKWAEKDGGDLSVVLPEGELSRLQGFFNEKLKSELSKGVELKSNRKLASGFRISNKEGSVYYDFSSEAVAKQLSAYLNPKLAELLKK

SEQ ID NO: 62713 - DNA, 819 bp, Unknown
  Obtained from environmental sample
  misc_feature (1)..(819): n is a, c, g, or t
atggccgaggcttttttggggatgctcattccctacgccgccggacagggcggccctgtgaatgaaattttcaatattcttggcatacttgcggcaatgggcgccggggcccttttggggcttttcttcgggctctcggtgattacatttcgcagccctcagggaattgccggaattggacttcagatgttcggggtgggcgcggccggcaccctgttccgccattttgtcggcggaacccaaagcgtaccgggcataggcgccctgcccattcccctgctttcaaagattcccctgttggggcaaattctcttcagccataatttactggtctacctcgcgttcctggcagttccgctttcctggtacatcctcaacaaaaccccctgggggctggaggtccgcgccgccggaacgcatccgcgcgcggcggattccataggcgtcagggtgactctggtccgttatcaggcgcttgcccttggcggcgcgatggcaggtcttgccggcgcttatctctccctctgtcaggcgaaaatgttcagcgacagcctcatcgcgggcaggggcttcatcgccgtagcattggtgtactttggccactggaatcccgcgcggatcatgggaggcgccctgctgttcagccttgcccagtcccttcagctcgccattcaggcccaggggatcaacttcccctacgaattcgcggtaatgctgccctacgtgctggtcatccttgtgctttccttctcccgcagaaacaaacacctcagccccgccgccctgggcaaaccgtttaacagggagatgcgggtgtag

SEQ ID NO: 62714 - protein, 272 aa, Unknown
  Obtained from environmental sample
  DOMAIN (1)...(248): Branched-chain amino acid transport system / permease component
  misc_feature (1)..(272): Xaa is any amino acid
MAEAFLGMLIPYAAGQGGPVNEIFNILGILAAMGAGALLGLFFGLSVITFRSPQGIAGIGLQMFGVGAAGTLFRHFVGGTQSVPGIGALPIPLLSKIPLLGQILFSHNLLVYLAFLAVPLSWYILNKTPWGLEVRAAGTHPRAADSIGVRVTLVRYQALALGGAMAGLAGAYLSLCQAKMFSDSLIAGRGFIAVALVYFGHWNPARIMGGALLFSLAQSLQLAIQAQGINFPYEFAVMLPYVLVILVLSFSRRNKHLSPAALGKPFNREMRV

SEQ ID NO: 62715 - DNA, 1035 bp, Unknown
  Obtained from environmental sample
  misc_feature (1)..(1035): n is a, c, g, or t
ttgtgctttccttctcccgcagaaacaaacacctcagccccgccgccctgggcaaaccgtttaacagggagatgcgggtgtagggcaatggcagattttgtccatctccacgtccattccgacttttccctggctgatgccgctgtttccgtgatgcggctggcggacagggccgaggaactggggatgtctcaccttgcccttaccgaccacggcaatatgttcggggctatggaatttatcaaggcctgtgagcatgaaaaacgaaaaaaaaccgtaaaaccgataatcggctgcgaggtctatgtttctccgggctcccgttttgaaaaaaaagggtctgaaaacgaaaataaatattaccaccttattcttctcgcctatagccgcgcgggttattttaatcttgtaaaattatgctctttcgcctatacggaaggtttttattacaggcctcggatagacgaggaacttttatccaaataccacgaggggcttatatcgctttccgcctgcgcttccggggaaattccacggcttattcaggccggtaaaatggatgaagctgaaaaaaaagccctttattaccgcgatctttttggcgaggatgctgagggaaaccccaatttttaccttgaaatacaggatcacggaattccgtcgggggtattgaggggcagtgacttgtctcaaaaagacattaacgaggcggtagccggcatttccaaaaaaacaggcattccccttgtcgctacgaatgacgttcattatctggacaaggacgattatatcgcgcatgacgttcttctctgcgtcggaaccaaaaatgtacgcaccgaggaaaaacgaaaaaaatatttcggggatcagttttattttaagacgggcgatgaaatggcggaaattttcgccgattatccgcaggcggttgaaaacacggtaaaaatcgccaagcgctgtaactcggacgtaccaaaaataaaaaacaaggattacccgcatatcttcccgattttgaatcccccgaggctttag

SEQ ID NO: 62716 - protein, 344 aa, Unknown
  Obtained from environmental sample
  DOMAIN (34)...(259): PHP domain
  misc_feature (1)..(344): Xaa is any amino acid
MCFPSPAETNTSAPPPWANRLTGRCGCRAMADFVHLHVHSDFSLADAAVSVMRLADRAEELGMSHLALTDHGNMFGAMEFIKACEHEKRKKTVKPIIGCEVYVSPGSRFEKKGSENENKYYHLILLAYSRAGYFNLVKLCSFAYTEGFYYRPRIDEELLSKYHEGLISLSACASGEIPRLIQAGKMDEAEKKALYYRDLFGEDAEGNPNFYLEIQDHGIPSGVLRGSDLSQKDINEAVAGISKKTGIPLVATNDVHYLDKDDYIAHDVLLCVGTKNVRTEEKRKKYFGDQFYFKTGDEMAEIFADYPQAVENTVKIAKRCNSDVPKIKNKDYPHIFPILNPPRL

SEQ ID NO: 62717 - DNA, 732 bp, Unknown
  Obtained from environmental sample
  misc_feature (1)..(732): n is a, c, g, or t
ttgaatactataatcgacatgggttatacgggatattttcttatagtcgcggattttataaactacgcaaaagagagaaacatccccgtaggcccgggacgcggttcgggggccggttccattgtcgcttactccctgcgtattacagatattgatcccttaaaatacggtcttatatttgaacgcttcttaaaccccgatcgtatttccatgccggactttgacattgacttcgccaacgagggacgcgaggaagtaataaactatgttacccgcgcttatggcaaggaaagggtagcgcagataatcacattcggaacattgggcgctaaagcggttatcaaagacgtagccagagtattgggaatatctattccggaatcggaaatgataacaaaacttatttcgtttgatcctgatattaccctgaataaagcaaaggaagaggagccgcgccttcgggaactggaaagcgacccgcgtttcacggaattatttgccatcgcgcataaactggaaggccttaaccgccattcaagcatacacgccgcgggtatcgtaatcggaaagaagccgcttattgaattggttcccctctttcaggaaagggaggaaaaaggcggcaatatagccacgcagtacagcatgaacttccttgaagggtgcggccttgttaaaatggattttcttggccttaaaaccttgacatcattaaacattcaaaagagttaa

SEQ ID NO: 62718 - protein, 243 aa, Unknown
  Obtained from environmental sample
  DOMAIN (1)...(242): Bacterial DNA polymerase III alpha subunit
  misc_feature (1)..(243): Xaa is any amino acid
MNTIIDMGYTGYFLIVADFINYAKERNIPVGPGRGSGAGSIVAYSLRITDIDPLKYGLIFERFLNPDRISMPDFDIDFANEGREEVINYVTRAYGKERVAQIITFGTLGAKAVIKDVARVLGISIPESEMITKLISFDPDITLNKAKEEEPRLRELESDPRFTELFAIAHKLEGLNRHSSIHAAGIVIGKKPLIELVPLFQEREEKGGNIATQYSMNFLEGCGLVKMDFLGLKTLTSLNIQKS

SEQ ID NO: 62719 - DNA, 963 bp, Unknown
  Obtained from environmental sample
  misc_feature (1)..(963): n is a, c, g, or t
gtgaaggaaaaagccacgcgttttccagttcgcttccgacggtatgcaggatatttaaggcagacgaagcctacttccatagaagatttaaccgcattaaacgccatgtaccgtccggggcccatgcagtttattccccgctttgtagaatgtaaaaacggaaaagcgccgatatcttatcctgatccgagtcttgaaggagtacttaaagaaacctacggcgttattgtctatcaggaacaggttatggaagtggcgaagataatagcgggatacagcatgggaaaagccgatcttcttcgccgcgccatgggaaaaaagaagaaagaaattcttgacggagaaaaaattccgttcttggaaggagcggcgaaacagggatactcggcgcagagagcgggcgctattttcgatatgcttgttccgttcgccggttacggttttaataaaagccacgccgccgcttattcggtgctggcgtatcaaaccgcctacctaaaagcgaattttcccgccgaatatatggccgctacgttgatagttgaaataaaaagcaccgacaggcttttatacagcattgtcgaaacccgtaaaatgggaataagcgtcgatccgcccaatataaattattcggacaaactttttaccgtagtggacggcagaattgtttacggctttttgggaattaaaggcgtaggtgacgctccggctgatgaaattgtacggggcagaaaggacggtcattataaaagttttatggatttcttgaatagggtagatataaaagccgtaagcaaaaaagttatagaactgcttattcaaacaggagcgtttgacgattttaatgtgtcgcgcgaaactcttgccggcaatatggaaaaggcgatagagtacgctcaaaaaagaaaagaggacaaacagctggacagtcaaacctttcggcgatcaactcggccaatctga

SEQ ID NO: 62720 - protein, 320 aa, Unknown
  Obtained from environmental sample
  DOMAIN (1)...(127): Bacterial DNA polymerase III alpha subunit
  misc_feature (1)..(320): Xaa is any amino acid
MKEKATRFPVRFRRYAGYLRQTKPTSIEDLTALNAMYRPGPMQFIPRFVECKNGKAPISYPDPSLEGVLKETYGVIVYQEQVMEVAKIIAGYSMGKADLLRRAMGKKKKEILDGEKIPFLEGAAKQGYSAQRAGAIFDMLVPFAGYGFNKSHAAAYSVLAYQTAYLKANFPAEYMAATLIVEIKSTDRLLYSIVETRKMGISVDPPNINYSDKLFTVVDGRIVYGFLGIKGVGDAPADEIVRGRKDGHYKSFMDFLNRVDIKAVSKKVIELLIQTGAFDDFNVSRETLAGNMEKAIEYAQKRKEDKQLDSQTFRRSTRPI

SEQ ID NO: 62721 - DNA, 1290 bp, Unknown
  Obtained from environmental sample
  misc_feature (1)..(1290): n is a, c, g, or t
atgggaattaacctttataagcttttcaatcctataaaacattacgaatggggatcgatgaatttaattcccaaatttacaggtatagaaaacaaggatatgcgtccctgtgcggaaatgtggatggggacccatttgtcccagtcacatattcaacaggacggcaaaatgataagccttacgcaggctataggaaaggaacttccgtttctttttaaagtgctcgccgttgaaaagccgctttccattcaggcccatcccaatctggcccaggcccgcgaaggttttgaaaaggagaccagggcaggtttggcaatcgattcgcctgagcgcaattataaagatccaaaccacaagccggaaatcatagccgcccttaccccgtttacgggcttatgcggtttccgcgatgttgttgaaatccgcggtctgcttgctgctttccttgagtctgcttctgttgttctgcgcgaaagttttgccccgttgacacatgcgctttctaaccgcgagcctgccggcgctttgcgggattttctcgccggacttttcggcctttcacaacaggcgcgggaagcgcttacggattatatccttttgttgaaggagccgccgcccggctgtggcgcgtcgtataacgatggcgcgtcacatagcgatggcgcgtcacatagcgatggcgcgtcacatagcgatggcgcatcgcatagcgatggcgcatcgcatagcgatggcgcatcgcatagcgatgcgatggaacttatgcagaatttcgcccagctgtatcccggcgatccggcggtgatagcgcctctctatctgaatgttttccgtcttgaaccgggtgaggcgttttttctgaaagccggggttctccatgcctacattcacggctttggcgtggaactgatggcaaattccgacaatgtgctgaggggcgggcttacttcaaaacatattgatattcctgaattgatgaaggtgttggactttaatcccttaaagccgcaaattataaaaccggaaactgattttttctgctttacctacccggccccctgcgaggaattttccctcacggtgatgcatggtacgggcggtgtgataaatatgccgttggcgttggcccaaagcgcctcaatcggtattgtcaccgagggggaagtttctgtttccggcatggttcttaaacagggggaatcggctttttttccccctgccaatagcggtgaaagccctctggcattgcaggggcatttcaccttttatatcgcgtcggttccgctatga

SEQ ID NO: 62722 - protein, 429 aa, Unknown
  Obtained from environmental sample
  DOMAIN (5)...(394): Phosphomannose isomerase type I
  misc_feature (1)..(429): Xaa is any amino acid
MGINLYKLFNPIKHYEWGSMNLIPKFTGIENKDMRPCAEMWMGTHLSQSHIQQDGKMISLTQAIGKELPFLFKVLAVEKPLSIQAHPNLAQAREGFEKETRAGLAIDSPERNYKDPNHKPEIIAALTPFTGLCGFRDVVEIRGLLAAFLESASVVLRESFAPLTHALSNREPAGALRDFLAGLFGLSQQAREALTDYILLLKEPPPGCGASYNDGASHSDGASHSDGASHSDGASHSDGASHSDGASHSDAMELMQNFAQLYPGDPAVIAPLYLNVFRLEPGEAFFLKAGVLHAYIHGFGVELMANSDNVLRGGLTSKHIDIPELMKVLDFNPLKPQIIKPETDFFCFTYPAPCEEFSLTVMHGTGGVINMPLALAQSASIGIVTEGEVSVSGMVLKQGESAFFPPANSGESPLALQGHFTFYIASVPL

SEQ ID NO: 62723 - DNA, 453 bp, Unknown
  Obtained from environmental sample
  misc_feature (1)..(453): n is a, c, g, or t
atgaaaatttttgtcgatgccgattcctgcccgcgggatgcgcgggaattaaccctgcgtaccgcgcggcggcgggggataccggcggtatttgccgcaaaccgccccgtaccgggaatcaccggggaaaatgttaccatggaaatctgcccgtccggtgacaattccgccgatgaccgcatcgtggaattagcggaaccaggagaccttgccatcagccgcgacatcgccctggcaaagcggcttctggaaaaagacgtcgccgtcattgacgaccgggggcgggtcttttcccgtgacaacatcaacgaactgctgtccttgcgcaattttacggtgggtcttgccgaaagcggactgggtgtggaacgaataacaaactacggcaaaaaggaacgtaaagcctttgccgacagtctggatcgtgtgctggtaaaactgctcaaaaattga

SEQ ID NO: 62724 - protein, 150 aa, Unknown
  Obtained from environmental sample
  DOMAIN (1)...(146): Uncharacterized BCR, YaiI/YqxD family COG1671
  misc_feature (1)..(150): Xaa is any amino acid
MKIFVDADSCPRDARELTLRTARRRGIPAVFAANRPVPGITGENVTMEICPSGDNSADDRIVELAEPGDLAISRDIALAKRLLEKDVAVIDDRGRVFSRDNINELLSLRNFTVGLAESGLGVERITNYGKKERKAFADSLDRVLVKLLKN

SEQ ID NO: 62725 - DNA, 1245 bp, Unknown
  Obtained from environmental sample
  misc_feature (1)..(1245): n is a, c, g, or t
atggatccgaaccgtgaaaagaagcccaaaccgaaacgggaaagaaagcccggcgggcaacccgggcacgcaggggttaccctgcaacagagtgaaaatccggacatgataattgaactcaaagtagaccgggagaggctgcctgccggccaatggacatatgccggctgtgagaaacgccaggtttttgacctgaagattaccgcccatgtcacggaataccaggcggagatactggccaatgaaaggggcgacaaggtgacggcggagtttcccggcggcctggtgcaaaaagcgcaatacggcaacggggtaaaagcgcacagcgtgtatatgtcggtgcagcagcttataccgtgcgaacgggtgagcgagcattttgcaagccagatgggtctgcctttgagcgccgggacagtgcataatttcaaggaagaagcgtataacctgctagaaccgtatgaaatatgggtacaagaacagataaggaactcaaaaataattcatgcagatgagacgggcatagtgattgaaggcaagggggtatggctgcatgtggcatgcaccggcctgtacacattatattatccgcatgagaaacgggggaaagccgcaacggatgaaatggatgtcttgaacgcacagggcggcatactgatacatgatcactggaaaccctatttcacttatgataacaaagaacacgggttgtgcaacgcgcattatttgagggaactgacagcggcgacggaggaggggcaaaaatggcctgagcgaatggcggggcttttgactgcgaccaacaaccaaaccgttgaagcgggcgggaaactgtcggaagatgaacagcatagggtacgaaaaaaataccggagaatacttgcggatgcggaaaaagaaaatccgattcctgcccggcagggcgaacaaaaaaagggacgggtagcacgtacaaagacgcggaatctcctggatcggatgagggagcatgaagaggacgtactgcggtttatgaccgatgttgatgtgccgtttactaacaaccaggctgagcgggatatccgcatggtgaaagtgcaacagaaaatatcagggagcttccgctcttgggacggcgcaagattcttttgccggatacgcggttacttgtcaacttgtgaaaagcatcttatttcatctgcaaatgcattgaaaatcctttttaacggtaaatttccagattttatgtccttcctggctgaatag

SEQ ID NO: 62726 - protein, 414 aa, Unknown
  Obtained from environmental sample
  DOMAIN (52)...(237): Transposase IS66 family
  misc_feature (1)..(414): Xaa is any amino acid
MDPNREKKPKPKRERKPGGQPGHAGVTLQQSENPDMIIELKVDRERLPAGQWTYAGCEKRQVFDLKITAHVTEYQAEILANERGDKVTAEFPGGLVQKAQYGNGVKAHSVYMSVQQLIPCERVSEHFASQMGLPLSAGTVHNFKEEAYNLLEPYEIWVQEQIRNSKIIHADETGIVIEGKGVWLHVACTGLYTLYYPHEKRGKAATDEMDVLNAQGGILIHDHWKPYFTYDNKEHGLCNAHYLRELTAATEEGQKWPERMAGLLTATNNQTVEAGGKLSEDEQHRVRKKYRRILADAEKENPIPARQGEQKKGRVARTKTRNLLDRMREHEEDVLRFMTDVDVPFTNNQAERDIRMVKVQQKISGSFRSWDGARFFCRIRGYLSTCEKHLISSANALKILFNGKFPDFMSFLAE

SEQ ID NO: 62727 - DNA, 1329 bp, Unknown
  Obtained from environmental sample
  misc_feature (1)..(1329): n is a, c, g, or t
atggccgagcctgcggatacccctgtaaatctgccacctgtcggcgctttgtatgcggcgttgggcgtaaaaaactgtatgcctcattcgcacggatcacagggctgctgttcctatcacagaatggtgctttcacgccattttaaggaacccgcaatagcgtcaagctcgtcattcactgaaggagcgagcgtattcggcggcaagagcaatataacaacggctgcaaaaaacgtttttgatatgtacaatcccgatattatcgccgtacataccacttgtttgtcggaaaccatcggcgacgacttgggttcattcataatggacttggaagtccccgaaggaaaaatcgttgtacataccaacacgccgagttatgtaggctcccacatcaacggtttcttcaatatgatgatgggctttatgaactacctgaccaaaaaaacgggagcgcccaacggtaagacggcgatattccccggttgggtaaacccgggcgacattcgtgaactgaaacgtttagcgaaacttttgggcgtgaagacaactttcttccccgaccaaagcggagtgttggacgctcccatgacgggcgaatatgtaatgtaccccgacggcggcacaacaatagaagaaatccgctctttgggcgacagcagcggattaatcgctctcggcgaaattatcagtattgaacccgccgaacttctcaagaaaaaatggaaagtggattacactcttcttccgcttcctgtcggcgtggactataccgacaaatatgtgcttgctctgcgtaatcaggcgaacactgtcgttcccgaagaattggaaattgagcgcggacagttagtcgatttacttctggacgctcatcagtacacatatcaaaagaaagtcgccatattcggcgatcccgatgtggtaatcggacttacttcgcttgttttggaaatgggtatgactccgaaatatgttatcacaggaacgccgaaggaagagtttaccgtcaagattaacgagctgtttgaaaaatacagcgtaacaaattgcactgtaaaggcgaacgccgacttattcgaacttcaccagtggattaagaatgagaaagtggatttgatgattggtacaacttacggcaagcaaatcgcgaaagccgaagatattccgtttatccgagcgggcttccccgtgcttgatcgctacggcggtcctttacagccgattgtaggttactcgggagccatacgccttgttgaacaaataacaaacgccctgctcgacaggtttgaccgagacgttgcagacgaagactttgaaattgttctgtaa

SEQ ID NO: 62728 - protein, 442 aa, Unknown
  Obtained from environmental sample
  DOMAIN (4)...(427): Nitrogenase component 1 type Oxidoreductase
  misc_feature (1)..(442): Xaa is any amino acid
MAEPADTPVNLPPVGALYAALGVKNCMPHSHGSQGCCSYHRMVLSRHFKEPAIASSSSFTEGASVFGGKSNITTAAKNVFDMYNPDIIAVHTTCLSETIGDDLGSFIMDLEVPEGKIVVHTNTPSYVGSHINGFFNMMMGFMNYLTKKTGAPNGKTAIFPGWVNPGDIRELKRLAKLLGVKTTFFPDQSGVLDAPMTGEYVMYPDGGTTIEEIRSLGDSSGLIALGEIISIEPAELLKKKWKVDYTLLPLPVGVDYTDKYVLALRNQANTVVPEELEIERGQLVDLLLDAHQYTYQKKVAIFGDPDVVIGLTSLVLEMGMTPKYVITGTPKEEFTVKINELFEKYSVTNCTVKANADLFELHQWIKNEKVDLMIGTTYGKQIAKAEDIPFIRAGFPVLDRYGGPLQPIVGYSGAIRLVEQITNALLDRFDRDVADEDFEIVL

SEQ ID NO: 62729 - DNA, 1299 bp, Unknown
  Obtained from environmental sample
  misc_feature (1)..(1299): n is a, c, g, or t
ttgcgaggatgtaagactgccgtgaatacaagcatactggatgaacgcaagtcgtcgatatcacaaaaacgcggaagcggtttgttctgcgagcgtgaaagcgtatcgggagcggtcagtcagcgggcttgtgtatattgcggagcgagggttgtattaaacccgattacagacgcttaccatatcgttcacggtccaatcgggtgcgccagttatacttgggacattcgaggttctcttacatccggcgctgatactttccgtaacagcttttccaccgacttacgggaaaccgacatcgtgttcggcggcgtaaaaaaattaaccgccgccattgacgagttaatggcggaagccgaccccgctcccaaattgatctttgtgtacgccacctgcattgtgggagttatcggcgacgatgtggaagcggtatgccgaacagcggaaacaaaatacggtatccgagtgatccctgtaaaagctccgggtttttcgggaacgaaatctcaaggttacaaacttgcctgcgaagcgataatgacattgattaagccgcataaaaatcgatccaaaaaattcggagtgaatattttgggtgattacaatcttgcgggagaaatgtggatcatcaaaggttacttggaacagttgggcattcccgtcatttctacaattacaggcgattcttcttacgaaaaattgattaacgctccaagcgcttcgcttaacattgtgcagtgcgccggttcgtcggcgtatcttgccgaacgtatgagcgaagaaatgggtataccgtacattaaggtcagctttttcggcattgaggataccacttcttcgctgtttcgtgtagcggacgcgcttggcaagacagggcttcaggaaaaatcccgtcagcttgtcgctgaacgtattgcgggcgttttgcctgttatcgaaaaatacaagccgaggctggaaggaaaaaaggcggctatatttgtcggcggcggctttaaggcgatttctcttattcggcaatttaacgaacttggaatgaaaaccgttgtcgtcggaacgcagacgggaaaaaaagacgaatatgaaattatcaattcgcttgttgacgaggacgctgtcgtattggacgatgccaaccccgccgagcttgagcgttttatgcttgaaaaaaaggcggatattttagtgggcggcgttaaagagcgtccgcttgcgtataaacttggtatggcgttttgcgatcataaccatgagcgcaaacatccgcttgcgggctttgaggggattgaaattttgtaa

SEQ ID NO: 62730 - protein, 432 aa, Unknown
  Obtained from environmental sample
  DOMAIN (36)...(430): Nitrogenase component 1 type Oxidoreductase
  misc_feature (1)..(432): Xaa is any amino acid
MRGCKTAVNTSILDERKSSISQKRGSGLFCERESVSGAVSQRACVYCGARVVLNPITDAYHIVHGPIGCASYTWDIRGSLTSGADTFRNSFSTDLRETDIVFGGVKKLTAAIDELMAEADPAPKLIFVYATCIVGVIGDDVEAVCRTAETKYGIRVIPVKAPGFSGTKSQGYKLACEAIMTLIKPHKNRSKKFGVNILGDYNLAGEMWIIKGYLEQLGIPVISTITGDSSYEKLINAPSASLNIVQCAGSSAYLAERMSEEMGIPYIKVSFFGIEDTTSSLFRVADALGKTGLQEKSRQLVAERIAGVLPVIEKYKPRLEGKKAAIFVGGGFKAISLIRQFNELGMKTVVVGTQTGKKDEYEIINSLVDEDAVVLDDANPAELERFMLEKKADILVGGVKERPLAYKLGMAFCDHNHERKHPLAGFEGIEIL

SEQ ID NO: 62731 - DNA, 1236 bp, Unknown
  Obtained from environmental sample
  misc_feature (1)..(1236): n is a, c, g, or t
atgtttaacgccgagcctgatattttagcctacaacatgatggggtatgatgcagctgtttttggcaatcacgaatttgacggcaatcaggaaaaattaaacaagcagattcaacttgccaaattcccgtttatttcatcgaatatcaaaacacaggacggcgcgtttctcggcggtaatcagtatattgtaaagaaatacggcaatattacggtgggcattttcgggattacaaccctgcggacgcaaactatagcaagtcccgataaatcgcttgtttttataaatgaaattgacgccgcccgtgatgtagtaggcattttgctcaatgtagaaaaagtagatattgtaatcggcttaacccacatgggagacgtaaaggaaatgccggatcatattacgtctgttgaacttgcgggcgcagtaccaggaatagacattataatagacgggcactctcattcgttttttaatgggcctttaaaagctgggaacacatggattataagcgcaaatgaatggggaaaatacgtaggtcacggcaaattgaacattgtcaatggaaagcttgacagttttttatgggaaccgatacctatcggccccgatttggctgtaactgaaatgcttaaaccgtatttggaaaaagctggcgcgtctcttaaagaggtaattggagaagctgcggaaacatttattttcggtaacagattgacgcgttatcaggaaaccgccgtcggaaatattgttacagacgcaaacgcgtggtatttcagaacaatcagcggcttggatgttgactttgttatgcacaacggcggtaacatccgcgcagaaattcccaaaggacctattacccgtgagcggattctgacaatactcccctttgataattacctttatattgtttccatgcgcggttcggaaattaatgaactgtttaattttattgccaccatcccgcaggggaacggaggctttccgcaattttccggagatgtgcgttttaccattgataaaacttcgggaaacggagttgtaaaagagcttaccattggagataaacctgttgatccaaatcggacatacaggctttgtaccaacgattatattctaggcggcggagacggatacgaagtaatgaaaaaggcaaacgatccttttaacacttcgattttactttcctatgttgnaactgaatacatcaaggcgcaaaaaaggccggttcaactgtaa

SEQ ID NO: 62732 - protein, 411 aa, Unknown
  Obtained from environmental sample
  DOMAIN (224)...(383): 5'-nucleotidase, C-terminal domain
  misc_feature (1)..(411): Xaa is any amino acid
MFNAEPDILAYNMMGYDAAVFGNHEFDGNQEKLNKQIQLAKFPFISSNIKTQDGAFLGGNQYIVKKYGNITVGIFGITTLRTQTIASPDKSLVFINEIDAARDVVGILLNVEKVDIVIGLTHMGDVKEMPDHITSVELAGAVPGIDIIIDGHSHSFFNGPLKAGNTWIISANEWGKYVGHGKLNIVNGKLDSFLWEPIPIGPDLAVTEMLKPYLEKAGASLKEVIGEAAETFIFGNRLTRYQETAVGNIVTDANAWYFRTISGLDVDFVMHNGGNIRAEIPKGPITRERILTILPFDNYLYIVSMRGSEINELFNFIATIPQGNGGFPQFSGDVRFTIDKTSGNGVVKELTIGDKPVDPNRTYRLCTNDYILGGGDGYEVMKKANDPFNTSILLSYVXTEYIKAQKRPVQL

SEQ ID NO: 62733 - DNA, 1158 bp, Unknown
  Obtained from environmental sample
  misc_feature (1)..(1158): n is a, c, g, or t
atggccgagaaacgcgtgcagcgacgacgccctctggctggtttcgccattgccgagtatatccgggaaacaggagacgcggcctttgcggaaatgtttctcccctacgccgacgccgaagcggcgacggattcggtgtacgaacactgtaaaaaaatacttgatttttcgcggcgcatgacgggcagccacggcatctgccaggggctaagggcggactggaacgactgccttaacctgggcggcggcgaaagcgcgatggtaagctacctttttctctgggcgctggataacttcgtcaggctggcggaattcctgggcaaaaccgaggatgcagtcgcttacaaaacgatccatgaaaagaccgccgaagtctgccggaagacgctttgggacggcaaatggtatttgcgtggctttaccgggaaaggccgtcccatcggcacggacgccgacgttgaaggcaaggtacatctggagagcaatacctgggccgttatcgccggcggcgacgatcccgagcggggcaggcaggcaatggattcggtgaaggaatatctgggcacgccctacggccttatgctcaacgcgccggcctatacggttatagatgacgatgtgggctttgtaacccgcgtttatcccggtctaaaggaaaacggggcgattttcagccaccccaatccctgggcctggattgccgaatgtatactcggcaggggcgacagggcgatggacctgtataacagactctgccccgccgcatggaatgacaaatgcgacatccgcaaggccgagccgtacagcacctgccaattcatcaccgggaagaaccatccggcgttcggcgaagcgcatcatccctttatgaccggctccggcggctggagctacttcgccgccgtccagtatatactgggcatcaggccggattttgacaaacttatcgttaacccctgcatacccgccgattgggacggattttacgccgtccgctgttttcggggcggggaatatcacataacggtacgaaaccccgaacatttatgcaaaggcgtagctgaaataagggtcaatggcgaaaagagcgatataattcccgttatagagcaggggcagatttgccatgtggaagtggttattggtttaattcattga

SEQ ID NO: 62734 - protein, 385 aa, Unknown
  Obtained from environmental sample
  misc_feature (1)..(385): Xaa is any amino acid
MAEKRVQRRRPLAGFAIAEYIRETGDAAFAEMFLPYADAEAATDSVYEHCKKILDFSRRMTGSHGICQGLRADWNDCLNLGGGESAMVSYLFLWALDNFVRLAEFLGKTEDAVAYKTIHEKTAEVCRKTLWDGKWYLRGFTGKGRPIGTDADVEGKVHLESNTWAVIAGGDDPERGRQAMDSVKEYLGTPYGLMLNAPAYTVIDDDVGFVTRVYPGLKENGAIFSHPNPWAWIAECILGRGDRAMDLYNRLCPAAWNDKCDIRKAEPYSTCQFITGKNHPAFGEAHHPFMTGSGGWSYFAAVQYILGIRPDFDKLIVNPCIPADWDGFYAVRCFRGGEYHITVRNPEHLCKGVAEIRVNGEKSDIIPVIEQGQICHVEVVIGLIH

SEQ ID NO: 62735 - DNA, 1275 bp, Unknown
  Obtained from environmental sample
  misc_feature (1)..(1275): n is a, c, g, or t
atgagcgaatacattattgacggcggtgttccgctgaacggaacggtaaaggcaagcggcaacaaaaacgccgccctgccgtgtattgcggcggcgctgttaactgacgaacccgtcatattaagaaatatcccggaaatagaagatgtgcaggtgatgcttgagatatacgcttctttgggaggaagcgtagaaactcttgagcctaattcattccgtttgcggcttggcaatatcaccgattccatgattcctgtcgaacaggcaaaaaagataagggcatcgatactgtttgccggcccgcttctggcgcgaaccggcaaagtgatgctgccgccccccggcggggacgttataggcaggcggcggctggatacccattttcttgcccttacggaactgggggcaaaggtaaaaacaaatgatacttttacttttaccgcaaaatcgctgacaggagccgacatttttctggacgaggcctctgttacaggcactgaaaacgcaataatggcggcggtactcgcaaagggaaaaacgatactcaccaacgcggcaagcgagccgcatgtgcaggatctctgccgtatgcttgtttttatgggtgcgcagatcgagggtatcggttcaaacatactgactatcaccggagtaaaaaaactttccggctgcgattttacaataggggctgattacatggaagttggttcctttatcgggcttgccgccgttaccggaggggatcttcacatcgaagggacgcggccccaggatctgcgtccggcgaaaatagcctttggcaagctgggcatctcctgggcgcatgagggaacgattatccatgtcccccagaaacagccgatggaggtgaattgcgatcttggcggcatgattcccaagatcgacgacgcgccatggcccggatttccccccgatcttaccagcattatcaccgttgtagccacgcaggtaaaagggacggtgctgatccacgaaaaaatgtttgaatcgcgtatgttctttgtagacaagcttatcggaatgggtgcgcagatagtgttatgcgatccccaccgggcggttgtttcgggccccgccaaactgcacggctctgaactaacaagccccgatgtccgcgctggcatggccatgcttatagccgccctctgcgctgaaggccgaagcgttatacgcaacgtttatcagattgaacgcggctacgagcgccttgtggaaagactctccgccctgggcgcgttacttttccggcattaa

SEQ ID NO: 62736 - protein, 424 aa, Unknown
  Obtained from environmental sample
  DOMAIN (6)...(414): EPSP synthase (3-phosphoshikimate 1-carboxyvinyltransferase)
  misc_feature (1)..(424): Xaa is any amino acid
MSEYIIDGGVPLNGTVKASGNKNAALPCIAAALLTDEPVILRNIPEIEDVQVMLEIYASLGGSVETLEPNSFRLRLGNITDSMIPVEQAKKIRASILFAGPLLARTGKVMLPPPGGDVIGRRRLDTHFLALTELGAKVKTNDTFTFTAKSLTGADIFLDEASVTGTENAIMAAVLAKGKTILTNAASEPHVQDLCRMLVFMGAQIEGIGSNILTITGVKKLSGCDFTIGADYMEVGSFIGLAAVTGGDLHIEGTRPQDLRPAKIAFGKLGISWAHEGTIIHVPQKQPMEVNCDLGGMIPKIDDAPWPGFPPDLTSIITVVATQVKGTVLIHEKMFESRMFFVDKLIGMGAQIVLCDPHRAVVSGPAKLHGSELTSPDVRAGMAMLIAALCAEGRSVIRNVYQIERGYERLVERLSALGALLFRH

SEQ ID NO: 62737 - DNA, 1419 bp, Unknown
  Obtained from environmental sample
  misc_feature (1)..(1419): n is a, c, g, or t
gtgatagattggccgagtcggacagggcagcctgccagcgaggcgcgtatcagacagatgatagcggacagcggaaaaatgaaaatcgctgcgccgaaatacaaggtcgttgaaagcgggcttttgtcatctactcccaaacgcggttcagtagtttcggaatttacagatgacgatacagagacaattttatgggaattaagcaacggcgcgcgggtaattctggaaacgaacaatcaaagtaacgatgaaattattatggaggcaatagcgcggggcggaacaagcagcgccgcgcccgaagactatgtatctgcaagactcgccacaaaaatgacacaggtttccggacttggtcccttgactcgtccagagcttacaaggaaactctccgggataaaggtatccctttcaccgtcggtttacaactattaccgggggttcaagggttcttccaattcaggaggtctaaaaactttttttgaaatgctgtacctcagtttcacggattaccgcatagacagtgaggcggtacaggccatgatggctcaatacagaacatccctcgccctcagggataaagacccgcaaacagttttttccgatgagatcgacaggatgatctatagcggacacccgcattttaaacccctggaactgagtgatcttccaaaagcaaacattgacaccgctctcgcctttatccgaaaagcattaaacccagccgattatacttttgttttcatagggaatatggatttatatataatgcgggaatatgtcgagagctatcttgcggcaatccccaggggtgaaagctggaatacatggaaagatcttaatattaaacgcccgggaaaagttgaaaaaatagtttataaaggcaggggagaagcaagctctgtttatatggcatgggtttccaaagctccctttaccgatgaactcagcgcaatagcccaggtgttaaacgaatatcttgatataaaacttgatgatgagatccgcgagaaactcggaggcgtctattcgatctcttccggcataaatgtctcgccggttccccagggtgaactttccatgcagatttattttagctgcgatccaaaacgggcggaggaactgcaagccgccattatcgcgttattgaatcagacggcgcgcggcgtaattgaccgcgacacttttacaaaggccgtggaagcccccaagaaagagtgggaagtttcgattcagagcaactcctacatcgcccaaagctacgccaattcgtcggtattgctgaaccttccgctgtcgcgcttggacaggcggccaaaattgtacgatgccgtaacccaggctgacattcagagggtatgcgcccggcttttacaaagcaacggccccgcgctggttgtgttaatgccggaaaagtaa

SEQ ID NO: 62738 - protein, 472 aa, Unknown
  Obtained from environmental sample
  DOMAIN (225)...(403): Peptidase M16 inactive domain
  misc_feature (1)..(472): Xaa is any amino acid
MIDWPSRTGQPASEARIRQMIADSGKMKIAAPKYKVVESGLLSSTPKRGSVVSEFTDDDTETILWELSNGARVILETNNQSNDEIIMEAIARGGTSSAAPEDYVSARLATKMTQVSGLGPLTRPELTRKLSGIKVSLSPSVYNYYRGFKGSSNSGGLKTFFEMLYLSFTDYRIDSEAVQAMMAQYRTSLALRDKDPQTVFSDEIDRMIYSGHPHFKPLELSDLPKANIDTALAFIRKALNPADYTFVFIGNMDLYIMREYVESYLAAIPRGESWNTWKDLNIKRPGKVEKIVYKGRGEASSVYMAWVSKAPFTDELSAIAQVLNEYLDIKLDDEIREKLGGVYSISSGINVSPVPQGELSMQIYFSCDPKRAEELQAAIIALLNQTARGVIDRDTFTKAVEAPKKEWEVSIQSNSYIAQSYANSSVLLNLPLSRLDRRPKLYDAVTQADIQRVCARLLQSNGPALVVLMPEK

SEQ ID NO: 62739 - DNA, 2835 bp, Unknown
  Obtained from environmental sample
  misc_feature (1)..(2835): n is a, c, g, or t
atgaaaacaaaaggtaatttcctgattaaattcatccaggccgtgggtttcgctgttatagcggcggtttttctgtatgtctatttcgctcttccggataccgccatgtggggaggccttggcaaaccttccgatcctgttccggtcatgcagaacctcagaaccggggttctgccaagcggcctgcgctattatatccttgagaattccatgccggaaaaccgcgcgtatcttaccctggcggtaaaagccggctccgtgcttgaagaagataacgagcaggggcttgcccattttgtcgaacacatggcgtttaacggtacggaacgctttcccgaatcgaagctggtaagttacctacgctcgctgggaatgcgttttggtccggaggtaaacgcctacacttcctttgaccagaccgtgtacggcattgaggtacccgttgaaaacgacagcaagggtacaaggcgtatccccgaaaccgcgcttgccgttattgacgactggacgcgggcggttactttttctcccacggatgttgacgaagaacgtccggtaataatggaagaataccgtatgcggcttggcgcatgggagaggctcaggcaaaaatggctgccggtactgttcaggggatcgccttacgcaaaccggatgcccataggcctgccggaaattattgaaggcgcgccggcgtccagattggaaggtttttacaggaaatggtacagggcggataacatggccctgatccttgtgggcgattttgacggagccgcgcttgaggcttcgctaaccgatcattttaagatagaaaagccggccgaaccgacgaaccggcccttgtacgatctgccacttccccaaaaaggaaacgtagaagtccttacccttaccgaccccgaactgactgccgcttctatcaacctttattttaagcgcagcccgcaggcgaggcgggatgatctgtcgtattaccggagcgaaatcatcgactacctcatcgacaccatgctgggcctgcgttttgaagaggcgctcctgaaacctgaaacccctcatgtagacgttgacgcgggaaatgtcagttatgcggcatcctcacggttttatgttttgtcgtctcaggcaaaaacgggcagcgccgaggcaagccttgaggatttattgaaaataaaagagacgatgctccgttacggctttaccgattcggagatggcgacagcggctgaaatgctggtttcttatatgcaaaggctggttcaggaaaaagacaggcagcaatcgcaaagatacattaattcgctgacagattattaccttaatggcggaaattacgctgatgttgaatgggaactgaacgcggtctcgcaaatactgccccatatcaaggcaaaagacataaacgcggcggttaaagactattttgcgcccggcgatattcaggtgtttatttttgcgccggattcggagcaggacagtctgcctgatgaggcgcgtatcagacagatgatagcggacagcggaaaattgaaaattgccgcgcccaagtccagagccctcgaaagcgggcttttgccgtccgagcctgaacgcggttcaatagtttcggaatctgtcgatgccgaaacagaggcggttttatgggaacttagtaacggggcgcgggtgatcctcaaaacgaccaaaaacaaaaatgacgagattgtcatgcaggtaatggcccgtggcggaacaagcagcgtcgcgcccgaaaacgacgtatccgcaagcctcgctatagaaatgacgcaggtttccggtcttggttcctggtcccgtcccgagttgacaaggaaactcgccggaaaacaggtctccctttcgcagtacgtttacagctattaccggggtttcaggggttcctccaattcagccgatctaaaaactttttttgagatactttacctcacctttacagaccaacgcattgatgacgaggctgtacaggccatgatggatcagtataaaacttcactcgccctcaggcgcgaaaatccgcaagcggttttttccgatgagatcaacaggacgatcaacagcggacacccgcgctttaaaccattggaactggaagatcttcccaaagcgaatattgataccgctcttgcctttatccgcaagggccaaaaccccgccgattatacttttgtattcacggggaatctggatttaaaaataatgcgggaatatgtcgaaagttatatcgcttcaatcccgcgagggcaaagctggaacgcctggacggatctgaatgttacgcgtccgggaaaagttgaaaataccgtctacaaaggaaaggaagaacaaagcacggtttacatggtatggttttccggagcctcatacagcgacgaactcagcgcggcatgccaggtgttaaacgaatatcttgatataaaactggatgacgagatccgcgaaaaacttggaggcgtttattcgatttcttcaagcgtgggtatttcgccgattcctcatgacgagctttccatgcaaatttatttcaactgcgatccaaagcgggcgacggaactccaaaccgccgttatcgcggaattgaaccgggtggcggacggatttatagaccgcgacacttttacgaaagcagtggaagcccccaagaaagaatgggaagtctcgattcagagcaactcatacatcgcccagagttacgccaattcgtcggtattgctgaaccttccgctgtcgcggctggacaggcggccaaaactgttcgatgccgtgacccaggctgatattcaaaggcgtatgcacccggtttttacagagtaa

SEQ ID NO: 62740 - protein, 944 aa, Unknown
  Obtained from environmental sample
  DOMAIN (229)...(413): Peptidase M16 inactive domain
  misc_feature (1)..(944): Xaa is any amino acid
MKTKGNFLIKFIQAVGFAVIAAVFLYVYFALPDTAMWGGLGKPSDPVPVMQNLRTGVLPSGLRYYILENSMPENRAYLTLAVKAGSVLEEDNEQGLAHFVEHMAFNGTERFPESKLVSYLRSLGMRFGPEVNAYTSFDQTVYGIEVPVENDSKGTRRIPETALAVIDDWTRAVTFSPTDVDEERPVIMEEYRMRLGAWERLRQKWLPVLFRGSPYANRMPIGLPEIIEGAPASRLEGFYRKWYRADNMALILVGDFDGAALEASLTDHFKIEKPAEPTNRPLYDLPLPQKGNVEVLTLTDPELTAASINLYFKRSPQARRDDLSYYRSEIIDYLIDTMLGLRFEEALLKPETPHVDVDAGNVSYAASSRFYVLSSQAKTGSAEASLEDLLKIKETMLRYGFTDSEMATAAEMLVSYMQRLVQEKDRQQSQRYINSLTDYYLNGGNYADVEWELNAVSQILPHIKAKDINAAVKDYFAPGDIQVFIFAPDSEQDSLPDEARIRQMIADSGKLKIAAPKSRALESGLLPSEPERGSIVSESVDAETEAVLWELSNGARVILKTTKNKNDEIVMQVMARGGTSSVAPENDVSASLAIEMTQVSGLGSWSRPELTRKLAGKQVSLSQYVYSYYRGFRGSSNSADLKTFFEILYLTFTDQRIDDEAVQAMMDQYKTSLALRRENPQAVFSDEINRTINSGHPRFKPLELEDLPKANIDTALAFIRKGQNPADYTFVFTGNLDLKIMREYVESYIASIPRGQSWNAWTDLNVTRPGKVENTVYKGKEEQSTVYMVWFSGASYSDELSAACQVLNEYLDIKLDDEIREKLGGVYSISSSVGISPIPHDELSMQIYFNCDPKRATELQTAVIAELNRVADGFIDRDTFTKAVEAPKKEWEVSIQSNSYIAQSYANSSVLLNLPLSRLDRRPKLFDAVTQADIQRRMHPVFTE

SEQ ID NO: 62741 - DNA, 489 bp, Unknown
  Obtained from environmental sample
  misc_feature (1)..(489): n is a, c, g, or t
gtgcggaagacggttatgctcaccggcgacgaggtccgcatagcgtcggcggtggcggccgaggtcggcgtggacgaggtttacggcggcctgcttccgcacgaaaagtctgaaagggttgagctactgatagaccaaaaacgcgccgacggcaagttggcgtttgtgggcgacgggatcaacgacgctccggccattgctatcgccgacatcggcatcgcaatgggcgcgttggggtcggacgcggccatcgaggccgccgacgcggttcttatgaccgacgagccgtcgaagctggtcgaggccgtagacatcgcccgtttcacaaagaagatcgtgtggcagaatatagcctttgtcctaacgctgaaagcggtctttttggcgcttggcgccgtaggcgtggccacgatgtgggaagcggtcttcgccgacgtgggggcggcgcttatcgcggttcttaacgccgttaggataatacggaggtga

SEQ ID NO: 62742 - protein, 162 aa, Unknown
  Obtained from environmental sample
  misc_feature (1)..(162): Xaa is any amino acid
MRKTVMLTGDEVRIASAVAAEVGVDEVYGGLLPHEKSERVELLIDQKRADGKLAFVGDGINDAPAIAIADIGIAMGALGSDAAIEAADAVLMTDEPSKLVEAVDIARFTKKIVWQNIAFVLTLKAVFLALGAVGVATMWEAVFADVGAALIAVLNAVRIIRR

SEQ ID NO: 62743 - DNA, 489 bp, Unknown
  Obtained from environmental sample
  misc_feature (1)..(489): n is a, c, g, or t
ttgtccactagtcgaggtttctctagtagatttatcgggaaaaaccggattatctttaagaatattttagattttccgtatcacctccgtattatcctaacggcgttaagaaccgcgataagcgccgcccccacgtcggcgaagaccgcttcccacatcgtggccacgcctacggcgccaagcgccaaaaagaccgctttcagcgttaggacaaaggctatattctgccacacgatcttctttgtgaaacgggcgatgtctacggcctcgaccagcttcgacggctcgtcggtcataagaaccgcgtcggcggcctcgatggccgcgtccgaccccaacgcgcccattgcgatgccgatgtcggcgatagcaatggccggagcgtcgttgatcccgtcgcccacaaacgccaacttgccgtcggcgcgtttttggtctatcagtagctcaaccctttcagacttttcgtgcggaagcaggccgccgtaa

SEQ ID NO: 62744 - protein, 162 aa, Unknown
  Obtained from environmental sample
  misc_feature (1)..(162): Xaa is any amino acid
MSTSRGFSSRFIGKNRIIFKNILDFPYHLRIILTALRTAISAAPTSAKTASHIVATPTAPSAKKTAFSVRTKAIFCHTIFFVKRAMSTASTSFDGSSVIRTASAASMAASDPNAPIAMPMSAIAMAGASLIPSPTNANLPSARFWSISSSTLSDFSCGSRPP

SEQ ID NO: 62745 - DNA, 1143 bp, Unknown
  Obtained from environmental sample
  misc_feature (1)..(1143): n is a, c, g, or t
atgcgtatcaacaataacatatcggcgatcaacacccaccgtcagatgggtatccacgttgatgaggtcgccaagtcgatggagaggctgtcaagcggctaccgcatcaaccgcgccggcgacgacgccgccgggttggctatttccgagaagatgagggcgcagatccgcggtttgatgatggcctccaagaacgcccaagacaccatctccatgatacagaccgctgaaggcgccctcgccgagacgcaatccatcctgcaaaggatgcgcgaactctccgtacagtcggccaacgacacaaacaccgactcggaccgcgaagaactgcaagccgaggtcaagcaactgctgaccgagattaaccgcataggcaatacgaccgagttcaacacgaagaagttgcttgagggtagcgcgaagggcgtttcggacgagatcgtggggacatcgcgcgttaacaacaacagtagcttggtgatcgacgccactaaagagaaagcgatggcggcgaacgtcagcaacgataagagctgggcgtttgacggcgcttatatgctcgtgaaagtcgatcagtctaccgataagaacggcgacaaaatatttaaggccgagaactataacttaatcggaccggacgggaacgtcttcaagtttaagacctacacgccgaataccaaggccttgccgaacgggctggatgttaatacgattatcgcggagggcggggagacgaggcatttgttaaagagcggtaccggcacactgcttgttgcggatccgacactagccgacctctatcagaacaccggaactcccaactatggaactactgtaaggatcggcgcggaattgaccgagagggaattggataaagtgactacgaatagcatcttggtcgccggttccacttttacgttaaccggcggcaccggtaatggcggtgtggatatcaccggcggtacgatcggagcaccggcgcccggaataaataacattaaattggatagcgacggccggttgtcgctcacgcttaccgctggtagtgttcctcccctcaaagttgaggtaggacaaagcgttaccttaganaacnggtacggtaatcaagaacaacggcggcggtacgtctcggccatctga

SEQ ID NO: 62746 - protein, 380 aa, Unknown
  Obtained from environmental sample
  DOMAIN (27)...(165): Bacterial flagellin N-terminus
  misc_feature (1)..(380): Xaa is any amino acid
MRINNNISAINTHRQMGIHVDEVAKSMERLSSGYRINRAGDDAAGLAISEKMRAQIRGLMMASKNAQDTISMIQTAEGALAETQSILQRMRELSVQSANDTNTDSDREELQAEVKQLLTEINRIGNTTEFNTKKLLEGSAKGVSDEIVGTSRVNNNSSLVIDATKEKAMAANVSNDKSWAFDGAYMLVKVDQSTDKNGDKIFKAENYNLIGPDGNVFKFKTYTPNTKALPNGLDVNTIIAEGGETRHLLKSGTGTLLVADPTLADLYQNTGTPNYGTTVRIGAELTERELDKVTTNSILVAGSTFTLTGGTGNGGVDITGGTIGAPAPGINNIKLDSDGRLSLTLTAGSVPPLKVEVGQSVTLXNXYGNQEQRRRYVSAI

SEQ ID NO: 62747 - DNA, 426 bp, Unknown
  Obtained from environmental sample
  misc_feature (1)..(426): n is a, c, g, or t
ttgctgacgttcgccgccatcgctttctctttagtggcgtcgatcaccaagctactgttgttgttaacgcgcgatgtccccacgatctcgtccgaaacgcccttcgcgctaccctcaagcaacttcttcgtgttgaactcggtcgtattgcctatgcggttaatctcggtcagcagttgcttgacctcggcttgcagttcttcgcggtccgagtcggtgtttgtgtcgttggccgactgtacggagagttcgcgcatcctttgcaggatggattgcgtctcggcgagggcgccttcagcggtctgtatcatggagatggtgtcttgggcgttcttggaggccatcatcaaaccgcggatctgcgccctcatcttctcggaaatagccaacccggcggcgtcgtcgccggcgcggttgatgcggtag

SEQ ID NO: 62748 - protein, 141 aa, Unknown
  Obtained from environmental sample
  misc_feature (1)..(141): Xaa is any amino acid
MLTFAAIAFSLVASITKLLLLLTRDVPTISSETPFALPSSNFFVLNSVVLPMRLISVSSCLTSACSSSRSESVFVSLADCTESSRILCRMDCVSARAPSAVCIMEMVSWAFLEAIIKPRICALIFSEIANPAASSPARLMR

SEQ ID NO: 62749 - DNA, 312 bp, Unknown
  Obtained from environmental sample
  misc_feature (1)..(312): n is a, c, g, or t
atgcagagtatcaattacatagcgctgatggaacgtgatagacgcaccggaaaatatggtgttgtcgttcccgatatccctggattctccactgtcggcgattcatacgacgacgctgttaagaacgccgctgaggggttgaccggccacattgaggtcatggaaaaatacggcgagacggttgcgccgcctcgcactattgaagagataaaggagcagtggccggagtgggaagaatggcgcggggagacaggcggcgatattgtcgccgctataccggtggaaacgcggggtgtgttgcaatctaagtag

SEQ ID NO: 62750 - protein, 103 aa, Unknown
  Obtained from environmental sample
  DOMAIN (5)...(53): Uncharacterised protein family (UPF0150)
  misc_feature (1)..(103): Xaa is any amino acid
MQSINYIALMERDRRTGKYGVVVPDIPGFSTVGDSYDDAVKNAAEGLTGHIEVMEKYGETVAPPRTIEEIKEQWPEWEEWRGETGGDIVAAIPVETRGVLQSK

SEQ ID NO: 62751 - DNA, 477 bp, Unknown
  Obtained from environmental sample
  misc_feature (1)..(477): n is a, c, g, or t
atgattttatatcacggttcttacacagaaataattaaacctaatctgtcgttttctcgtaatgaactggattttggcataggcttttacacaacatctattaaaaaacaagcggataaatggtctttgaaattcaaaaaaaggcaagaactgtcaatagtttcaaagtatgaatttgatgaaaaaattatagataaaatttcaactttaaaattcaattcttattccgaagaatggcttgattttgttgttttatgcagaacaggcagtagtataggggaaaattatgatttgataattggcggcatagctaatgacgatgtatttaataccttgcaattatttatagataatctcatctcaaagcaagaaaccataaaaagattgcaatacgagaaaccgaatattcagtattgttttaaaaatcaagacattgttgatgcccatttgcattttttagggagttatgaaatatga

SEQ ID NO: 62752 - protein, 158 aa, Unknown
  Obtained from environmental sample
  misc_feature (1)..(158): Xaa is any amino acid
MILYHGSYTEIIKPNLSFSRNELDFGIGFYTTSIKKQADKWSLKFKKRQELSIVSKYEFDEKIIDKISTLKFNSYSEEWLDFVVLCRTGSSIGENYDLIIGGIANDDVFNTLQLFIDNLISKQETIKRLQYEKPNIQYCFKNQDIVDAHLHFLGSYEI

SEQ ID NO: 62753 - DNA, 663 bp, Unknown
  Obtained from environmental sample
  misc_feature (1)..(663): n is a, c, g, or t
atgacattaacacctcaatcatcgataaacactctccccggacgccaacgaaaaaacgacgacatctttacacatggtgcggcggcggagaaaccgtttgtgtatctctatgaacaacaacaagttgaggttgttcacggcccgtcgtttgccgctgaaaaagaggtctttaccgaccgttgcgtggccgatgggataccgatattggagcgcagaggcggcggcggaacggtggtgctctcacccggaacgctggtgattgtcgctgtcggcgagaggataggcgggcgagagtgggcgcccggcgtgttccgcagggtgaacaacgcgatcatcgccgcgcttagcaaggccggcatcggcaacgcggtggaagcgggtatcagcgatatcgccgtggaaggcaggaaggtactgggcagttcactctatattgggtcaaagccgccgctgttttactaccagtccagccttatggtatgcaacgatttgagccttatggatatatacctgcgccacccgcccaaagagccggagtaccgcgggggcaggggacacgggcagttctgcgcgacgcttcgagaattggggctgacggttggcgtcggggaacttgccggattaatagaggcggaacttagggctagattggggactgtatga

SEQ ID NO: 62754 - protein, 220 aa, Unknown
  Obtained from environmental sample
  misc_feature (1)..(220): Xaa is any amino acid
MTLTPQSSINTLPGRQRKNDDIFTHGAAAEKPFVYLYEQQQVEVVHGPSFAAEKEVFTDRCVADGIPILERRGGGGTVVLSPGTLVIVAVGERIGGREWAPGVFRRVNNAIIAALSKAGIGNAVEAGISDIAVEGRKVLGSSLYIGSKPPLFYYQSSLMVCNDLSLMDIYLRHPPKEPEYRGGRGHGQFCATLRELGLTVGVGELAGLIEAELRARLGTV

SEQ ID NO: 62755 - DNA, 813 bp, Unknown
  Obtained from environmental sample
  misc_feature (1)..(813): n is a, c, g, or t
gtgcggaattatccccacggaagaagaagtcttcgaaaaggtaaaggaaattttaaagaaatgaaaaaactatacggatatcctgaaagtttaactaatgtgcagacaaagtactgcggcggctgcgggcatggaataatccacagggttattacaagcgtaatagatgaaatgggtttaagggaaaagacgataatcacaaacccggtaggatgcgccatctgggcggatctgtattttgattttgactccgttcagcccccgcacggcagaactcccgcggcggcgacggggattaagcgcgttcatcccgatcaccttgttatctgctatcagggagacggagacatggccgctatcggaaccgcggaaatgatacacgcggcaaacagagcggaaaaatttaccactatatttgtgaataacgcgatttacggcatgacgggcgggcagatggcgcccactaccttgcttggtcagaaagcgactaccgcccccaggggaagggacgcggaggaagccggaatgggctatccaatcaaagttgcggaacttctcgcctcgcttgaggggacgcgctatatcgcgaggggcgctgtaaacaacgccgccaatattcgcaaggtaaagcaatatattaaaaaggcttttgaggctcagatggcgggtattggaagcactataatagaagttctttctccctgtccgacaaactggactatggatcccgttcaagctgtcgaatggctggaaaaaaacatgattcccgtatttccgcttggggagattaaaaacacattgaagaccgcttga

SEQ ID NO: 62756 - protein, 270 aa, Unknown
  Obtained from environmental sample
  DOMAIN (69)...(231): Thiamine pyrophosphate enzyme, C-terminal TPP binding domain
  misc_feature (1)..(270): Xaa is any amino acid
MRNYPHGRRSLRKGKGNFKEMKKLYGYPESLTNVQTKYCGGCGHGIIHRVITSVIDEMGLREKTIITNPVGCAIWADLYFDFDSVQPPHGRTPAAATGIKRVHPDHLVICYQGDGDMAAIGTAEMIHAANRAEKFTTIFVNNAIYGMTGGQMAPTTLLGQKATTAPRGRDAEEAGMGYPIKVAELLASLEGTRYIARGAVNNAANIRKVKQYIKKAFEAQMAGIGSTIIEVLSPCPTNWTMDPVQAVEWLEKNMIPVFPLGEIKNTLKTA

SEQ ID NO: 62757 - DNA, 660 bp, Unknown
  Obtained from environmental sample
  misc_feature (1)..(660): n is a, c, g, or t
gtgcaggaatgcgccgaccatacctacctcgcgtttgatcttgcggacaaataccgtatgcccgtcatcgttctcgcggacgggcttatcgggcagatgatcgagggcgtcgtattgccgcctgaaattaatcctccgaagagagactggtctgtcggtaacatgaaggacagacgaggagcggataaggcttctcgtcacataacatcaattgagcttgtccctgaaaaacttgaagctataacgaagaaccgctttgtccgttacgagaaagttaaagaggcggaaatccgttacgaggacaacggctgtaacggcgccgaccttgtaatggtcgcttacggaacctgcgcaagagtctgccttggcgccaaaacgctggcgaaaaaagagggaattaagctcggcatcttcaggcctattaccctttggcccttcccctacgacgctttgggaaaatatatatcggaaggaaaaagcattttatcggtggagatgtcgctgggccagctagttgaagatgtaaaactttcggcttacgaagcctcggttaaattcgggggcgcgaaagccgacatccatcttttgggccacgcgtgcggaattatccccacggaagaagaagtcttcgaaaaggtaaaggaaattttaaagaaatga

SEQ ID NO: 62758 - protein, 219 aa, Unknown
  Obtained from environmental sample
  misc_feature (1)..(219): Xaa is any amino acid
MQECADHTYLAFDLADKYRMPVIVLADGLIGQMIEGVVLPPEINPPKRDWSVGNMKDRRGADKASRHITSIELVPEKLEAITKNRFVRYEKVKEAEIRYEDNGCNGADLVMVAYGTCARVCLGAKTLAKKEGIKLGIFRPITLWPFPYDALGKYISEGKSILSVEMSLGQLVEDVKLSAYEASVKFGGAKADIHLLGHACGIIPTEEEVFEKVKEILKK

SEQ ID NO: 62759 - DNA, 507 bp, Unknown
  Obtained from environmental sample
  misc_feature (1)..(507): n is a, c, g, or t
ttgcttccggcgcaatcaacagaagaacccgccggggttttcaatccctgtctggcggattttattttgcccgcgcaaaacgggcaggctgttgactggcttgggctgtttgccattagcgcgggattcggccttgagaccgcctatgagtcgtaccgaaataacagcgatgactacagcgcccttctgctggcaagcctggcaaactccctggcggaagcctttgtcgaggaactgcatctgcgcgtccgccgggaatggtggggctacgcgccggaagaatcccttactatagaagaaatcctcaaaggcaagtataccggcatacgccccgcctttggctatccttcctgccccaaccacgaagataaacgtattgcctttgaactgcttgaggctgaaaaacgctgcggcctaaaactgacggataccgcgatgataatccccgccgcgtctgtctgcgggatgttctttgcaagtccagcggcgtattatttcagtgtgtga

SEQ ID NO: 62760 - protein, 168 aa, Unknown
  Obtained from environmental sample
  DOMAIN (31)...(168): Vitamin B12 dependent methionine synthase, activation domain
  misc_feature (1)..(168): Xaa is any amino acid
MLPAQSTEEPAGVFNPCLADFILPAQNGQAVDWLGLFAISAGFGLETAYESYRNNSDDYSALLLASLANSLAEAFVEELHLRVRREWWGYAPEESLTIEEILKGKYTGIRPAFGYPSCPNHEDKRIAFELLEAEKRCGLKLTDTAMIIPAASVCGMFFASPAAYYFSV

SEQ ID NO: 62761 - DNA, 963 bp, Unknown
  Obtained from environmental sample
  misc_feature (1)..(963): n is a, c, g, or t
gtgatggttcccgcagaacaaatactcgatgtagcggaaaaagagcaagccgccatgatcggcctttccggactaatcgccccctcactggacgagatggcgcacatcgcaagagagatggaaaagcggcgcatgaagataccgctgcttgttgggggcgctgcggcaagccttgtacataccagcctgcgccttgccccggaatattcaggcccggtggtttatgtgccaaacgcgggaaaatccgccgagacagtacgcgccctactttccgactcacagcggctccaatttttgcagaaactggaaaaaatttatcaggaagcggcccaacggcatgaggaaattcaatcccgcatggagttgatttcccttgaagcagcaagagcaaacagagtccctcccgctgcatacaaaccggctgctccaaaaaccgcatgtcttatcagcctggacaattaccccctggacagggttatcccgtacattaactggcagtcatttttacgcggatgggatacccaggtgcctgacaccattttggatgacgcaaaacgcctgctcgaacaggttgaaactaagggccttttgcaactccggggcgttacggggatttttcctgccgctgctgagaatgaagatattaaaattactgacaaatatcggttttgcttccggcgcaatcaacagaagaacccgccggggttttcaatccctgtctggcggattttattttgcccgcgcaaaacgggcaggctgttgactggcttgggctgtttgccattagcgcgggattcggccttgagaccgcctatgagtcgtaccgaaataacagcgatgactacagcgcccttctgctggcaagcctggcaaactccctggcggaagcctttgtcgaggaactgcatctgcgcgtccgccgggaatggtggggctacgcgccggaagaatcccttactatag

SEQ ID NO: 62762 - protein, 320 aa, Unknown
  Obtained from environmental sample
  misc_feature (1)..(320): Xaa is any amino acid
MMVPAEQILDVAEKEQAAMIGLSGLIAPSLDEMAHIAREMEKRRMKIPLLVGGAAASLVHTSLRLAPEYSGPVVYVPNAGKSAETVRALLSDSQRLQFLQKLEKIYQEAAQRHEEIQSRMELISLEAARANRVPPAAYKPAAPKTACLISLDNYPLDRVIPYINWQSFLRGWDTQVPDTILDDAKRLLEQVETKGLLQLRGVTGIFPAAAENEDIKITDKYRFCFRRNQQKNPPGFSIPVWRILFCPRKTGRLLTGLGCLPLARDSALRPPMSRTEITAMTTAPFCWQAWQTPWRKPLSRNCICASAGNGGATRRKNPLL

SEQ ID NO: 62763 - DNA, 828 bp, Unknown
  Obtained from environmental sample
  misc_feature (1)..(828): n is a, c, g, or t
ttgttgataaaaaattacggagccgccgccgtggtaatgctcattgacgagaaagggcaggcggtaagctatgatcgcaaaatcgaaatcgccgggcgcgcatacaggcttcttgttgatgccggttttcctgttgaaaacatcgtgtttgatcccaatgtgcttgccgttgcgaccggaataagcgagcatgacgcctgcggaatagattttatccgcgcctgcgcgtggattcgcgataactgccccggagtaaatatatcgggcggcatctcaaatctttcctacagtttcaggggaaacaacaagctgcgcgaagccatgcacagcgttttcctggtacacgctcaggctgccggcctgtcaatggcaatcgtaaatccggcggcgctcattgcgtataacacaatcgaggaagacctccgagccgccgtggaggacgtaattctcaaccgaagtcagggcgcggcggaacgcctgcttgaacttgcggaaaaaatcgccgcttcgggttccccgctcgccgcggcggcgcatactccggactggcgcaatcaacctgttgaaaaatgcattgttcacgccatgctgcgcggcattgacgattttatcgaggccgacgtgcttgaattgctgaaccgtccctcttcttccctttccgcccttgagatcatcgaaggccccctgatggacggcatgaaagaagtggggaaacgctttgacgagggaaccatttaccttccccatgttatacgaagcgcgagggttatgaaaaaagccgcccccgcgcttgaacctacatgggcaaaacaaacgctgcgactatag

SEQ ID NO: 62764 - protein, 275 aa, Unknown
  Obtained from environmental sample
  DOMAIN (184)...(274): B12 binding domain
  misc_feature (1)..(275): Xaa is any amino acid
MLIKNYGAAAVVMLIDEKGQAVSYDRKIEIAGRAYRLLVDAGFPVENIVFDPNVLAVATGISEHDACGIDFIRACAWIRDNCPGVNISGGISNLSYSFRGNNKLREAMHSVFLVHAQAAGLSMAIVNPAALIAYNTIEEDLRAAVEDVILNRSQGAAERLLELAEKIAASGSPLAAAAHTPDWRNQPVEKCIVHAMLRGIDDFIEADVLELLNRPSSSLSALEIIEGPLMDGMKEVGKRFDEGTIYLPHVIRSARVMKKAAPALEPTWAKQTLRL

SEQ ID NO: 62765 - DNA, 624 bp, Unknown
  Obtained from environmental sample
  misc_feature (1)..(624): n is a, c, g, or t
atggaagatgtgcttgatgtatactcccgtaaatatgacaaaaaatgtgttttggtgtgtacggatgaaattccccggcaacttattggcgaatctaggcctcctattccagccgagccaggtaaatctgaacgatacgatacagaatacgttcgcaatgggacatgcgttatattcatgtttgcagccccgtttgagaaatggaggagggctgaggtaaccgagaggcggacaaaaatcgattgggcgcatcagataaaaaagcttgtaacatttgattttcctgatgctgaaaaaattgttcttgtaatggataatcttgacatacacactatgggttcgctgtataaggcgtttccccctgaagaagcaaaacgaataagaggcaaacttgaagtgcattacacaccgaagcatgggagctgggtcaatatggcggaaatagaaaacaatgtactcataaaccatggcctttcaaaacggattccaacaattgagcagatgaaaaaagaagtggcggcatgggttgatgctcgcaaccaaagtgcatgcacaatcaattggaggtttaccacagatgacgcacggattaaacttaaacgtctttatccacaattacaatag

SEQ ID NO: 62766 - protein, 207 aa, Unknown
  Obtained from environmental sample
  misc_feature (1)..(207): Xaa is any amino acid
MEDVLDVYSRKYDKKCVLVCTDEIPRQLIGESRPPIPAEPGKSERYDTEYVRNGTCVIFMFAAPFEKWRRAEVTERRTKIDWAHQIKKLVTFDFPDAEKIVLVMDNLDIHTMGSLYKAFPPEEAKRIRGKLEVHYTPKHGSWVNMAEIENNVLINHGLSKRIPTIEQMKKEVAAWVDARNQSACTINWRFTTDDARIKLKRLYPQLQ

SEQ ID NO: 62767 - DNA, 495 bp, Unknown
  Obtained from environmental sample
  misc_feature (1)..(495): n is a, c, g, or t
atgccggcaaaaaaatacattgtgacattaacagaagatgaaaagaaaacgttgaaggaaataataaacaaaggaaagcatggcgcagagaagcgcaaacgagcccatgcgcttttgcttgcggatgaaaattactctgatgaaatgatagccgataaagcagggatgagcaggagagggctggaacagctgaggcaacggtttgttgaggatggatntgaagtaacacttgaagggaaacctcgcggccacagaccaaaagtattaggggctaaagacgaggcgcgtttaatagcgttagtatgcagccccaaaccagatgggcactctcgctggagcttgcgacttttacaacagacatggaaaaccttggcgtatactgatacaaagacagtatcatatcagacaatccgaaggactttaaaaaaaacgaaattaaaccttggcaaagcaaggaatggtgcataccaacaaggggagaaagcgattttgtag

SEQ ID NO: 62768 - protein, 164 aa, Unknown
  Obtained from environmental sample
  misc_feature (1)..(164): Xaa is any amino acid
MPAKKYIVTLTEDEKKTLKEIINKGKHGAEKRKRAHALLLADENYSDEMIADKAGMSRRGLEQLRQRFVEDGXEVTLEGKPRGHRPKVLGAKDEARLIALVCSPKPDGHSRWSLRLLQQTWKTLAYTDTKTVSYQTIRRTLKKTKLNLGKARNGAYQQGEKAIL

SEQ ID NO: 62769 - DNA, 654 bp, Unknown
  Obtained from environmental sample
  misc_feature (1)..(654): n is a, c, g, or t
atgaattcgtctgtttccttgaccagggtttcaccagactttgccatgtcatcagagcctttcttaaccgatgaagttatgtccctaagacggtctatggattccagtatttgctttcccccggtttcctgttctttcattgcgtttaagatgttctgctcatgctctgaaactgtttttacgcttgagtctatagccccaaaacgcgccaacacatcatcagaggatctggtaatgctgtctattgatgcttttacttttttaagcatagcagcggtggttttggattgctgtcccgatgactcggcgagtttgcggatttcatcggcgacaacggcaaagcctctgcccgcctccccggcgtgcgccgcctcaatcgcggcgttcatcgaaagcaaattggtctggcttgcgatgttgttcattaccgagtttatttccaggagcccttccgaatcgtgggctatttcccgtatttcctgtgctaccgcctggagacctattttgccgttctccgacgcctcggtcaacgcgccgacgtttttactgttttccgtcagtgtctcggttaccgagtgtatgttggccgtcatttcctcatggcggaagacgacatgtctacgctctcgggctgctgttctatcattttgttaa

SEQ ID NO: 62770 - protein, 217 aa, Unknown
  Obtained from environmental sample
  misc_feature (1)..(217): Xaa is any amino acid
MNSSVSLTRVSPDFAMSSEPFLTDEVMSLRRSMDSSICFPPVSCSFIAFKMFCSCSETVFTLESIAPKRANTSSEDLVMLSIDAFTFLSIAAVVLDCCPDDSASLRISSATTAKPLPASPACAASIAAFIESKLVWLAMLFITEFISRSPSESWAISRISCATAWRPILPFSDASVNAPTFLLFSVSVSVTECMLAVISSWRKTTCLRSRAAVLSFC

SEQ ID NO: 62771 - DNA, 1284 bp, Unknown
  Obtained from environmental sample
  misc_feature (1)..(1284): n is a, c, g, or t
atgatgaaagaaaaacaaaaacaggaacgccggacttctattaaaaagaggtttattattttctctgccgttctgtttttggttatttttattggcgggaacgcggcttttgcgttttcaatgtggcaaattctccataacactgcaggcaacgaacttgtgcagacgatggaacttgaacgaaccaaacttgaagcgtcagttaacagcgaaatcgccattgcccttaaaatggcaggttctcccgtgatacagcgcaactttctcaatcccgctgacatcgaactgaaaaaaattgcttttgaggaaatagacgcataccgtcaagctttcaaaggcgattctgttttctgggcaagtgatattaataaagaattttatttttctgaggataatcattatacggtcgataccgaaaatcccgataactattggtacaaaatgaccttatatgaaacagaaaaatataattttaacattaactataacccggaaatacaacggacattgctgtttattaacgcgccggtttttgacacgaagcacaaacctataggcttggtgggaacaggcatcgatcttaccgaatttgtaaataacatataccagaattataaaggcagcgcggatttatatttatttaacgatttgtgtgaaataaccggcagcaagaatgtcagccttgttaccaataaaacaacgctggataaagcgcttggcgataccggcaaggaatttcttgaaaaggtaaaatccaacaaaaacttattcttcagtgtacctaaaggcgtggctgccctggttaaagtcccttcccttaattggtatattgccgctattgctcctcttaccatgacagatgcactgaacagcggcatgacaatactttttctggtgatgatggctgtcatcgcggccatcttcgttatttcctatttgtttatctcgagtcttctaaaaccaatgcattatatggtacagacgctggatcaaatagcggttgatcgggacctcacccgccggcttgtattcaaacacaaggacgaaattggaacagtgggtgatttctttaaccgtacttttgaagaattcagaattcttgtagggacaataaaatacaaaatcaacgggttaaaccataccagttttgaactttctgtgaatatggaaaaaacctcgacagccgtagaacagatttcagctaaccttgacaacatggaaaaccttgtagtcaaacagggaaaacggagcgatgaaagcggggcgacgcgtagggggttataa

SEQ ID NO: 62772 - protein, 427 aa, Unknown
  Obtained from environmental sample
  DOMAIN (296)...(366): HAMP domain
  misc_feature (1)..(427): Xaa is any amino acid
MMKEKQKQERRTSIKKRFIIFSAVLFLVIFIGGNAAFAFSMWQILHNTAGNELVQTMELERTKLEASVNSEIAIALKMAGSPVIQRNFLNPADIELKKIAFEEIDAYRQAFKGDSVFWASDINKEFYFSEDNHYTVDTENPDNYWYKMTLYETEKYNFNINYNPEIQRTLLFINAPVFDTKHKPIGLVGTGIDLTEFVNNIYQNYKGSADLYLFNDLCEITGSKNVSLVTNKTTLDKALGDTGKEFLEKVKSNKNLFFSVPKGVAALVKVPSLNWYIAAIAPLTMTDALNSGMTILFLVMMAVIAAIFVISYLFISSLLKPMHYMVQTLDQIAVDRDLTRRLVFKHKDEIGTVGDFFNRTFEEFRILVGTIKYKINGLNHTSFELSVNMEKTSTAVEQISANLDNMENLVVKQGKRSDESGATRRGL

SEQ ID NO: 62773 - DNA, 2235 bp, Unknown
  Obtained from environmental sample
  misc_feature (1)..(2235): n is a, c, g, or t
atgaacgtggacgtcaaggaggccgtggagctcgccgcgaactcggaggagttcaaggtctccgggcgctgttcggtcttctgcaagagcgactgcacccacgccctgaacaaaaacatcccgatcgggcgggtcagcgcggggctttgcaggatgatggccgagaagattctggatttgctcgaaaaggtgccgaacaagaggatcatagcgacgggcggggtcacgcacaacgccgttatcatggatatgctcaggccccacgtggaggagctgtacatcccggagttcgccgactgttttgaggcggtcggcgcggctttttacgcgcttgtcaacaaaacgccgcttgggctggacaaggagcatatattcgtagacggcgggacgtcgttctcccagcttccgcccatagagatggggaagccgctggtgcggttcgaggatatcgagattcagaaggcggatccgggggatgaactgatattggggctcgatgtggggtctaccaccacgaaggccgtggcgttgcgcaccaaggacgacgcgatggtcgcgtccatatatctgaggacgaacggaaaccccgtgcaggcttcccgcgagtgctacgcggcgctgctggagcagatcacggttccggtcagcataatagggttgggcaccacgggttccggtcgccagatagcgggtctgcacggcggcaccgacggcgtcataaacgagatcatagcccacgccgccgccgccgcccacttcgacaaggaggtggacaccatatttgaaataggcggtcaggacgcgaagtatacttatctgacgggcggggtgccgtcggactacgctatgaacgaggcttgcagcgccggtacggggtcgtttctggaagaatccgctcgcgagtccctgaacatcaagacggaggagatcggcgaacgcgcgctgttgggcaagcagccgcccaacttcaccgaccagtgctcggcgttcatatccagcgacatcaagaccgccggtcaagagggcataggcaaggatgatatactggccggactggtctactcggtctgcatgaactatctcaaccgcgtgaaaggttctcggcaggtgggcaagaagatattcatgcagggcggcgtatgctacaataaggcggtgccggtggctatggcgtcgctcatgaagcaccaaatagtggtcccgcccgaacccggtctgatgggggcgttcggcgtagccatggagacggcgaataggatggacatagggctgagttccgtctccaagtttgatcttgacgaactctctaaccgcgaggccacgcgggagagcagctttgtctgcgccggcggcaaagagaagtgcgaccgcaaatgcgagatatcgcggataagggtgaacgacaagctctatccgttcggcggcgtctgcaacaagtactacaacctgcgtctgcacaaagaggtggacgtagaagatcttgacctcgtagccgtccgcaacaagttattatttgagcagttcggagtgatggaagggttggcgcataaagggcacgccaagacggccgacagtcacgggacgcaccctaagacggttggaataatgcgcactttcttaacgcacgcgctttacccgctgtactcaaacttcttccgcgagatgggctttaaggtagtgctcgccgacgcgattgatccggagggcatcgcgcgcatcgaggcggccttctgtctgccggcggagctcacgcacggcagttttctcaatctgctcaaaaagaaattggattacatattcctgccgcacgtctcgcagatacccgttaagaacccgtcttcctacagcaagacgtgtgtttttgttcaaggcgaggcgtattatttgaagacgacgtttaggcacgagatagaggcggcgcggacggcgatcctctcgccggtgctctcatttgagcgggactatgacagggcgcgcgcccgtcacgagttgatcaatatggctgtgtcggccatgcatatatcccaaaagatcgccgaggcggcgttcaatcgagcggttgagcggcagcgcgcttttgacgacgagttgcagacctacggcaggcgggcgcttgaatatttagacgctaaccccgacactttcgggcttgtcgtcttcggtcgcccgtacacagcttcgccctccgacccaatatgggcatccctcacaaagcgggctcgcgcgggtacataa

SEQ ID NO: 62774 - protein, 744 aa, Unknown
  Obtained from environmental sample
  DOMAIN (163)...(416): BadF/BadG/BcrA/BcrD ATPase family
  misc_feature (1)..(744): Xaa is any amino acid
MNVDVKEAVELAANSEEFKVSGRCSVFCKSDCTHALNKNIPIGRVSAGLCRMMAEKILDLLEKVPNKRIIATGGVTHNAVIMDMLRPHVEELYIPEFADCFEAVGAAFYALVNKTPLGLDKEHIFVDGGTSFSQLPPIEMGKPLVRFEDIEIQKADPGDELILGLDVGSTTTKAVALRTKDDAMVASIYLRTNGNPVQASRECYAALLEQITVPVSIIGLGTTGSGRQIAGLHGGTDGVINEIIAHAAAAAHFDKEVDTIFEIGGQDAKYTYLTGGVPSDYAMNEACSAGTGSFLEESARESLNIKTEEIGERALLGKQPPNFTDQCSAFISSDIKTAGQEGIGKDDILAGLVYSVCMNYLNRVKGSRQVGKKIFMQGGVCYNKAVPVAMASLMKHQIVVPPEPGLMGAFGVAMETANRMDIGLSSVSKFDLDELSNREATRESSFVCAGGKEKCDRKCEISRIRVNDKLYPFGGVCNKYYNLRLHKEVDVEDLDLVAVRNKLLFEQFGVMEGLAHKGHAKTADSHGTHPKTVGIMRTFLTHALYPLYSNFFREMGFKVVLADAIDPEGIARIEAAFCLPAELTHGSFLNLLKKKLDYIFLPHVSQIPVKNPSSYSKTCVFVQGEAYYLKTTFRHEIEAARTAILSPVLSFERDYDRARARHELINMAVSAMHISQKIAEAAFNRAVERQRAFDDELQTYGRRALEYLDANPDTFGLVVFGRPYTASPSDPIWASLTKRARAGT

SEQ ID NO: 62775 - DNA, 792 bp, Unknown
  Obtained from environmental sample
  misc_feature (1)..(792): n is a, c, g, or t
gtggacattgcggctgttggcggacaaatggagtacgctggcgcataccgaaacaaaaacaatatcccgggaaactgtcagaaggacattaaaaaaaacgaaattaaaccttggcgcagccaggaatggtgtatcccgccgcaagaggaaccagagtttgtagccgcaatggaggatatactggatgtgtacaccagaaaatatgatgaaaactgcatattgatatgcatggatgaagtcccccggcagttgatcggcgagacgcgcaagccggttccggcagggcgcggcaagatcgcccgttatgacaccgagtaccaacgcaatggcacatgtgagatttttatgtttaccgcccctctgcaaaactggagaagggcggaagtaacggaacgccgaacgcgccttgactgggcgcaacaaattaaaaaactgataacggtagattttcctcatgtgaaaaaaattgtttttgttatggataatctcaatattcataccataggctccctttataaagcgtttccgcctgaagaagcgcggcattatcgtaacatacttgaaattcattacacgccgaaacatggcagttggctcaatatggcggaaatcgaaatcaatgtgctggtgaaccacggtctttcaaaacgggttccctccatgcggcagatgaaaaaagaagtcgccgcttggaacaaagccagaaatcaggaagcaaataaaatcaaatggaggttttcaacagaaaaagcgaggattaaacttcatcggctttatccacagtttgaatag

SEQ ID NO: 62776 - protein, 263 aa, Unknown
  Obtained from environmental sample
  misc_feature (1)..(263): Xaa is any amino acid
MDIAAVGGQMEYAGAYRNKNNIPGNCQKDIKKNEIKPWRSQEWCIPPQEEPEFVAAMEDILDVYTRKYDENCILICMDEVPRQLIGETRKPVPAGRGKIARYDTEYQRNGTCEIFMFTAPLQNWRRAEVTERRTRLDWAQQIKKLITVDFPHVKKIVFVMDNLNIHTIGSLYKAFPPEEARHYRNILEIHYTPKHGSWLNMAEIEINVLVNHGLSKRVPSMRQMKKEVAAWNKARNQEANKIKWRFSTEKARIKLHRLYPQFE

SEQ ID NO: 62777 - DNA, 879 bp, Unknown
  Obtained from environmental sample
  misc_feature (1)..(879): n is a, c, g, or t
atgggacaagtcggaaggcggattggtgcctgttgccgaagaactgaaagttttgcccaattatccggttttaacaaatggatttcgatagtatcaagtggcggctttgtacggcttagggaaagcgattataccgaagatgcggcggccttgatgcgtgagtatggcgtaaaatcaatattgatggtgcccatttttacgtatgggaaattctggggcagcgtcaatttccaggatcacaccaacgacaggtactttgacgaaggctgcggcgatttgctctattcggcggcgcgcatatcctcaaacgcggttatcagagaagaaatgagatgccgcgagggaatggaagccgcgcttaacagggccgccatcgtgtttctctcgcaaaaggaagaaacatttgaagccaccatgacggccggcattggggaaattgccgatatgttcaatttggacagattttccatttggcgcaattcactcaggcccgacggcctgcacggagggcaaatctaccgctgggacaggaaatccggcggtacaacgatactgataaaagggctggaggatctcgcctacgccacgtttgcgccgcgatgggaaagtcttttagcgtcaggcgaagtaattaacagtccggcaaggcttctgcccgaagaggcccttctgaaatcatttggctgtgtgacggttcttgtcacgcccttgtttatcaacaacattttttggggctttgccctctttgaagacctccgcagtgagcgcttttttggagatgacgacatccatatgatgcgttcggccgcgtttctgtgcgcgaacaccgttatacgcgcagacatggaacgtaaaatgaactgcagcttgccaaactga

SEQ ID NO: 62778 - protein, 292 aa, Unknown
  Obtained from environmental sample
  DOMAIN (134)...(277): GAF domain
  misc_feature (1)..(292): Xaa is any amino acid
MGQVGRRIGACCRRTESFAQLSGFNKWISIVSSGGFVRLRESDYTEDAAALMREYGVKSILMVPIFTYGKFWGSVNFQDHTNDRYFDEGCGDLLYSAARISSNAVIREEMRCREGMEAALNRAAIVFLSQKEETFEATMTAGIGEIADMFNLDRFSIWRNSLRPDGLHGGQIYRWDRKSGGTTILIKGLEDLAYATFAPRWESLLASGEVINSPARLLPEEALLKSFGCVTVLVTPLFINNIFWGFALFEDLRSERFFGDDDIHMMRSAAFLCANTVIRADMERKMNCSLPN

SEQ ID NO: 62779 - DNA, 1929 bp, Unknown
  Obtained from environmental sample
  misc_feature (1)..(1929): n is a, c, g, or t
gtggtacagaacgatcccgtaaacccgaacaacacctttgtatggtcggacgagttcaggcatatgctcggctatacggacgagaatgatttccctaacgttctgagcagttggagcgacctcctgcatccggaagacaaggaaagaacgctggacgctttcgcaaaacatatactcgacaaaacaggcaagacgccctacgacgtagaataccgcctgctgcgcaagaccggcgaatactcctattaccgcgcttccggagagtgcattcgtgacagagacggcgccgccatacgagtcgccggcgcgctgatggatattaccgataccaagaacatgctgctggacaaggagcggcaaaaagaggcggcggaagccgccaaccgcgctaaaagcaccttccttgccaccatgagccatgaaataagaacgccgatgaacgccataatcggcatgaccacgataggaaaatccgcgccaactcttaaacgcaaaaattactgctttttgaaaatagaggacgcttcgaaccatttgctcggggtaataaacgatattctggatatgtcgaagatcgaagcgaacaaatttgaacttgccccggtggaatttaatcttgaaaaaatgctccggcgcgtggtgaatgtgattaatttccgcgtagatgaaaagcatcaggaactctccgtaaatatcgaccattccatcccccgcgccctcataggggacgatcagcggatagcgcaggtaattaccaacttgttgggaaacgccgttaaattcactcccgaacagggaacaatcaaccttaccgtgcgccttgcggaaaaagtaaacgacgtctgtaccctgcaaatttcggtaaccgacaccggaatcggcataactctcgaacagcagaaaagattgttccggtcttttgaacaggcggaatccagcacaacccgcaaatacggcggttctggtttaggcctcgcgatttccaaaaacattgtggaaatgatgaacggatcaatttgggttgagtcagaacagggaaaaggatcaacatttacttttacgattcaactgacgcccggcaaggaggaaaaacaagatcatttactcgatgttaatttgaaagatatccgtattttaaccgttgacgatgacccggatatattatccttcttcaaagaagttacgcagaggtttggaataacatgcgataccgccgcaagcggagaacaagcgcttgatcttatacgccaaaagggcgattacaatatctattttatagactggaaaatgccgaatatagacggcatacagcttacccgtgaaataaaggcgcgaaagcctgataattccattgtaaccatgatttcagccgccgaatggagcacgattgccaaagaagcgaaagtagcgggcgttgacgatttcctgtcaaaacctcttttcccttctacaatcgcggaagtaatcaatgaatgtctcggcgttgaacaagcggaaaaaactcagaaggctgatattaacggtatatttgaggggcggcgcatactgctggctgaagatgtggaaattaaccgcgaaattgtacaaactttgcttgaacccacaaagttggagatagactgcgcggaaaacggcatagaggccgtcggtatgtttaccgaggctccggatcggtatgatttaatttttatggacgtacagatgcccgaaatggacggctacgacgcgacgcggcgtatcagggctattgaagcgggcctgaacaaaaataatcctgatagacggctaaaaagaattcctattgtagccatgactgccaacgtattccatgaagatattaaaaaatgccttgatgccggcatggacagccatgtcgggaaaccgcttgatttcgaagaagtgatcaaaaagctgcacgactattggtaa

SEQ ID NO: 62780 - protein, 642 aa, Unknown
  Obtained from environmental sample
  DOMAIN (130)...(195): His Kinase A (phosphoacceptor) domain
  misc_feature (1)..(642): Xaa is any amino acid
MVQNDPVNPNNTFVWSDEFRHMLGYTDENDFPNVLSSWSDLLHPEDKERTLDAFAKHILDKTGKTPYDVEYRLLRKTGEYSYYRASGECIRDRDGAAIRVAGALMDITDTKNMLLDKERQKEAAEAANRAKSTFLATMSHEIRTPMNAIIGMTTIGKSAPTLKRKNYCFLKIEDASNHLLGVINDILDMSKIEANKFELAPVEFNLEKMLRRVVNVINFRVDEKHQELSVNIDHSIPRALIGDDQRIAQVITNLLGNAVKFTPEQGTINLTVRLAEKVNDVCTLQISVTDTGIGITLEQQKRLFRSFEQAESSTTRKYGGSGLGLAISKNIVEMMNGSIWVESEQGKGSTFTFTIQLTPGKEEKQDHLLDVNLKDIRILTVDDDPDILSFFKEVTQRFGITCDTAASGEQALDLIRQKGDYNIYFIDWKMPNIDGIQLTREIKARKPDNSIVTMISAAEWSTIAKEAKVAGVDDFLSKPLFPSTIAEVINECLGVEQAEKTQKADINGIFEGRRILLAEDVEINREIVQTLLEPTKLEIDCAENGIEAVGMFTEAPDRYDLIFMDVQMPEMDGYDATRRIRAIEAGLNKNNPDRRLKRIPIVAMTANVFHEDIKKCLDAGMDSHVGKPLDFEEVIKKLHDYW

SEQ ID NO: 62781 - DNA, 609 bp, Unknown
  Obtained from environmental sample
  misc_feature (1)..(609): n is a, c, g, or t
atggggggcgaggttttttttcagggactgccttgtacgggtaaacataaagattcgcggaaaacactgaaacggctgcgctgttcattgggactggtcttgcaggacgcggacgcgcagattgtgggcgagaccgtcatggaagacgcggggttcgggcctgaaaacctgggctgggcggcgcccgatgtaaaggccgcggcggaaaaggcgctctccgatatggggcttattgataaatcggacaattccccgcggcagctttctgggggcgagaaacgccggctcgcaatcgccggagtcgcggccatgggctgtaacataataatcatggacgagccttttgccaacctggactggccgggcgtggttcagacgctcaacattatacgcaatttgaagaactcggggaaaaccctgataatcctcacccatgagcttgaaaaggcccttgcgttagctgacaggctgataatccttcataaaggcaaagtccgcgcggattcgtctccggcggaggttcttaattcacttgatccctgctggggcgtgcgcgatccccgaaaaaattacacttcaatagaggattgctcatggctggaaaaataa

SEQ ID NO: 62782 - protein, 202 aa, Unknown
  Obtained from environmental sample
  DOMAIN (3)...(163): ABC transporter
  misc_feature (1)..(202): Xaa is any amino acid
MGGEVFFQGLPCTGKHKDSRKTLKRLRCSLGLVLQDADAQIVGETVMEDAGFGPENLGWAAPDVKAAAEKALSDMGLIDKSDNSPRQLSGGEKRRLAIAGVAAMGCNIIIMDEPFANLDWPGVVQTLNIIRNLKNSGKTLIILTHELEKALALADRLIILHKGKVRADSSPAEVLNSLDPCWGVRDPRKNYTSIEDCSWLEK

SEQ ID NO: 62783 - DNA, 573 bp, Unknown
  Obtained from environmental sample
  misc_feature (1)..(573): n is a, c, g, or t
ttggaggaaaatttgattaatcagcgtaaatttatttctgctttggttcttgcggctctgttcgccgcgttgatttcggcgggggcgtttattacggtgcctattgggcctgtcccttttgtgctgcagaatttttttactttgcttgccggccttgtgctggggccttttttggggaccgcgtccgtggccttgttcatcatagccggggccattggggtgccggtgttttccaataacggttctcctatgggtatcgcccggctcatggggcctacgggaggcttttatttggggtatcttttgagcgcgtttatcgccgggcttgtcatcggcttcccaaggcagggtgagaaaataaaaatttggcggctggcgctcgcggttgttcttgggtttcttacggtttatatacccgggcttctccgcttgaaatttttcctggacacatggcctaaaacctttgccgcgggatttttcccgttcctgatcggagacgccattaagggagttgcggcagccctggtcacgccgcgcctaagaagagccgcagcaagacaattaggcaattaa

SEQ ID NO: 62784 - protein, 190 aa, Unknown
  Obtained from environmental sample
  SIGNAL (1)...(26)
  DOMAIN (31)...(184): BioY family
  misc_feature (1)..(190): Xaa is any amino acid
MEENLINQRKFISALVLAALFAALISAGAFITVPIGPVPFVLQNFFTLLAGLVLGPFLGTASVALFIIAGAIGVPVFSNNGSPMGIARLMGPTGGFYLGYLLSAFIAGLVIGFPRQGEKIKIWRLALAVVLGFLTVYIPGLLRLKFFLDTWPKTFAAGFFPFLIGDAIKGVAAALVTPRLRRAAARQLGN

SEQ ID NO: 62785 - DNA, 1365 bp, Unknown
  Obtained from environmental sample
  misc_feature (1)..(1365): n is a, c, g, or t
ttgccgggggaagggctgtgcctgggaaaagaaccgttggagggaaagatgccaaacacacaggagttttgggacaacatgtacacaaaacaaagacggatagcacaagcggctgagaaacactcagggaagagcttggtcagcgtggcgcatcatattgatgtgcagtggatgtattgtgcctacgaatggacaaggaaagacggagcagccgggatagatggagtaacggcagccgagtatgaagtaggcctaatggggaagcttgaaaatctgggggaactgcttaaaagcggaaactactttgcaccgccggtaaagcgggtatatatacccaaagccggaagtacaaccgagaagcgacctataggcattccgacgtatgaggacaagatactccaaagggcgatagtaatggtactagaaccattactggagatggagttttacgacttctcttacgggttcagacctggaaaatcagcccacaaggctctcaaccagttatggaaagagagcatgggaatgaacggcggctatgtcatagatatggacatcagcaaatacttcgacacgatagaccacgggcttctgagagagatggtcaggcggcgggttagcgatggagtgataacaaggattatagggaaatggctcaatgctggggtgatggatggggacagacgagagtatcccgggaaagggactccgcaggggggagtaatatcgcctttgctgagcaacctgtttctgcatgaggtattagacgactggtttgtgaaagttgtaaagccccggatgaggggcaaggcaggcatgatacgctacgcggatgacgcaataataatgtgcgagctgaaagaagatgccgaacgaatatataaagtattagggctgcgttttgaaaagtacgggttgaaaatacaccctgaaaagacgaagctcctggccttcacgaaaccgcagggcgaacagaggaaagggaacagcagttttacctttcttgggttctgccactactggacgaaatcccgcaagagaaaatggatagtaggacggaagacggataacaagcggcttcacagagcaataaaagcgataagcgcatggtgcaggacaaaccgccaccaaccaatacggaaacaatgggaaacgctgaaaacgaaaattacgggacactacgcctactacggaataagcctgaactttttatgcatagcggagttttatgttcaggcacagaccgtgtggcttaaatggctcaatcgcagaggcaataaaggcaagcgcagttgggaagtctttagagattacttgaatgactggccgttaccgaaaccgaggataatgcactcgtattgttaa

SEQ ID NO: 62786 - protein, 454 aa, Unknown
  Obtained from environmental sample
  DOMAIN (102)...(339): Reverse transcriptase (RNA-dependent DNA polymerase)
  misc_feature (1)..(454): Xaa is any amino acid
MPGEGLCLGKEPLEGKMPNTQEFWDNMYTKQRRIAQAAEKHSGKSLVSVAHHIDVQWMYCAYEWTRKDGAAGIDGVTAAEYEVGLMGKLENLGELLKSGNYFAPPVKRVYIPKAGSTTEKRPIGIPTYEDKILQRAIVMVLEPLLEMEFYDFSYGFRPGKSAHKALNQLWKESMGMNGGYVIDMDISKYFDTIDHGLLREMVRRRVSDGVITRIIGKWLNAGVMDGDRREYPGKGTPQGGVISPLLSNLFLHEVLDDWFVKVVKPRMRGKAGMIRYADDAIIMCELKEDAERIYKVLGLRFEKYGLKIHPEKTKLLAFTKPQGEQRKGNSSFTFLGFCHYWTKSRKRKWIVGRKTDNKRLHRAIKAISAWCRTNRHQPIRKQWETLKTKITGHYAYYGISLNFLCIAEFYVQAQTVWLKWLNRRGNKGKRSWEVFRDYLNDWPLPKPRIMHSYC

SEQ ID NO: 62787 - DNA, 522 bp, Unknown
  Obtained from environmental sample
  misc_feature (1)..(522): n is a, c, g, or t
gtgcccggcgtttcgcttacgagcaatctgttctgtttaacaagggcgttgattaagctggacttgcccgcgtttggcgcaccgaatagggctgcttttgggagttcgctctgggaggctctaaacctctttttcaagttctgcaaatgctgcaaaattttatgctctagcaaaacttcgcttgtggtttccccttcggtgtcttccgcaaaatccacctccaattcgagtaaagccgaagccccttttacgctttctgcgagtgcgttgatttcgctggaaatttcaccgcttaaaaggcgttgcgcatcactcaggctttttgaattatttgcggctaatagagcgcccacagcctctgcctgtgtcaaatccaatttgccatttaaaaaagctcgctgcgtaaattcaccgcgctgtgccagctgcactccgggaactttgcaaatggcttctatcaacttgcgaactataaatggattcccgtgcgggaacaattctaaaacatcttcgccagtatag

SEQ ID NO: 62788 - protein, 173 aa, Unknown
  Obtained from environmental sample
  misc_feature (1)..(173): Xaa is any amino acid
MPGVSLTSNLFCLTRALIKLDLPAFGAPNRAAFGSSLWEALNLFFKFCKCCKILCSSKTSLVVSPSVSSAKSTSNSSKAEAPFTLSASALISLEISPLKRRCASLRLFELFAANRAPTASACVKSNLPFKKARCVNSPRCASCTPGTLQMASINLRTINGFPCGNNSKTSSPV

SEQ ID NO: 62789 - DNA, 1458 bp, Unknown
  Obtained from environmental sample
  misc_feature (1)..(1458): n is a, c, g, or t
ttggctggtctgcactacgaaccgctgttcaggcttgcagacggctttgcaactgcggaggaatccgccaaacgctacaccatttacaccgcgcctttcgtgagcgttgaagacggggcgggggcggttcatatcgcgccctcgtttggagaggaagactttgtgcttgggcaggaaatagggcttgggctgtttgacccattggacgcggagggcaaattcaccagcaaagttccgcagtggcaaggggtgggggctaaggaagccgacaaagccataatcgcgcatctcaaagagcaaggcagggtgtttaagcacgagacaatagtgcatagctatccgcattgctggcgaacaggcgttccgctgctatacagagcactcagcacttggtttatgaaacttgacgcacccgtaacgaacgcggatggcacaaccaaatccgtcaaggaatggatgctctcctgcaaccagcaaatagagtgggtgcccgaccacatcaaaaacggtcggttcggcaaatggctggaaaacgcacgcgactggaacctgtcacgcaaccgcttctggggaacgccaatacctgtgtggattgcaggtgacggcgaaatgctctgcataggctcaatagaggaattaaaaaaagcaagcgggacacaactgcacgacttgcacaaacacttcgtggataaaatagcaataacaaaaaacggcaaaacattcaaacgcacaagcgaagtctttgattgctggtttgagagcggcgcaatgccctacgcccaaaaccactaccccttctcaaacgcagaacacttcaacaaaaccttccccgccgacttcatcgccgaaggcttagaccaaacaaggggctggttctacacattgaccgtgctcgccgccgccctgttccaaaaacccgcattcaaaaacgtgatagtgaatggcataatcctcgccgaagacggctccaaaatgagcaagagcaaaaagaactaccccgaccccaccgaactcataaaccgcacaggcgcggatgcagtccgcctgttcctcataaactccgccgccctcaaaagccgaggaactgcggttcagcgaggagggcgtaaagcaaatagtgaaaagcgtgatgctccctctatggaacgcgctcggcttcttcatctccaaccacaacgcagactcctcaaaagggcagctcaaatggcagccagcggacgaatggaaaagcgacaacgagctagacctatggataatcgcggtgctgcaagacctgagcaaaaaagtggaaaccgaaatggcagcatacagactatacgccgtagttcccgtaatcctctcgttcatagacgacctcacaaattggtatgtccgccgaagccgccgccgcttctggaaaagcgacaacgacagcgacaaaaacaacgcctacgcaacactatacaaagccctcgttga

SEQ ID NO: 62790 - protein, 485 aa, Unknown
  Obtained from environmental sample
  DOMAIN (2)...(360): tRNA synthetases class I (I, L, M and V)
  misc_feature (1)..(485): Xaa is any amino acid
MAGLHYEPLFRLADGFATAEESAKRYTIYTAPFVSVEDGAGAVHIAPSFGEEDFVLGQEIGLGLFDPLDAEGKFTSKVPQWQGVGAKEADKAIIAHLKEQGRVFKHETIVHSYPHCWRTGVPLLYRALSTWFMKLDAPVTNADGTTKSVKEWMLSCNQQIEWVPDHIKNGRFGKWLENARDWNLSRNRFWGTPIPVWIAGDGEMLCIGSIEELKKASGTQLHDLHKHFVDKIAITKNGKTFKRTSEVFDCWFESGAMPYAQNHYPFSNAEHFNKTFPADFIAEGLDQTRGWFYTLTVLAAALFQKPAFKNVIVNGIILAEDGSKMSKSKKNYPDPTELINRTGADAVRLFLINSAALKSRGTAVQRGGRKANSEKRDAPSMERARLLHLQPQRRLLKRAAQMAASGRMEKRQRARPMDNRGAARPEQKSGNRNGSIQTIRRSSRNPLVHRRPHKLVCPPKPPPLLEKRQRQRQKQRLRNTIQSPR

SEQ ID NO: 62791 - DNA, 861 bp, Unknown
  Obtained from environmental sample
  misc_feature (1)..(861): n is a, c, g, or t
gtgaaaagcgtgatgctccctctatggaacgcgctcggcttcttcatctccaaccacaacgcagactcctcaaaagggcagctcaaatggcagccagcggacgaatggaaaagcgacaacgagctagacctatggataatcgcggtgctgcaagacctgagcaaaaaagtggaaaccgaaatggcagcatacagactatacgccgtagttcccgtaatcctctcgttcatagacgacctcacaaattggtatgtccgccgaagccgccgccgcttctggaaaagcgacaacgacagcgacaaaaacaacgcctacgcaacactatacaaagccctcgttgatttcagcaaaatcctagccccattcctgccattcttggcagaggagatttatcaaatacttgttagggaagcaaacccaaacgccccagtctcggttcatctcacatcttaccccgaacacaacgcggagtacgcaaacgaaaaactagtccgccgaatggcattggttagaagcgccatagaaaaaggcagagcgatacgcagcgcaaacgaaatcaaaaaccgccagcccctaaaaacattgacgctagttccccacaacgaggaagcaaagcaagtagccgagacaatgcaggatttaatcttggaagagttaaacgtagagcaacttcacttcgcaaatgatgacaccgagctagctaaaatctccgccaagcccaacttcgcaggcataaaagcaaaaggagcggactacgccaaaaatatgaaaaccctatccaccgccataaccgcattgaccgccgagcaaatcaagcaaatccaaagcggcacaccgctgacgttgccggtctccaaatag

SEQ ID NO: 62792 - protein, 286 aa, Unknown
  Obtained from environmental sample
  DOMAIN (43)...(197): Anticodon-binding domain
  misc_feature (1)..(286): Xaa is any amino acid
MKSVMLPLWNALGFFISNHNADSSKGQLKWQPADEWKSDNELDLWIIAVLQDLSKKVETEMAAYRLYAVVPVILSFIDDLTNWYVRRSRRRFWKSDNDSDKNNAYATLYKALVDFSKILAPFLPFLAEEIYQILVREANPNAPVSVHLTSYPEHNAEYANEKLVRRMALVRSAIEKGRAIRSANEIKNRQPLKTLTLVPHNEEAKQVAETMQDLILEELNVEQLHFANDDTELAKISAKPNFAGIKAKGADYAKNMKTLSTAITALTAEQIKQIQSGTPLTLPVSK

SEQ ID NO: 62793 - DNA, 366 bp, Unknown
  Obtained from environmental sample
  misc_feature (1)..(366): n is a, c, g, or t
atgctagtccgcgaagtagccgagggtctcgccgtagaagcagacgaaaactacaccatagcattggatttgaaaataacgccagagctacgtcaaagctgcatagcgagagagctggtgaatcgcatacaaaaccgccgcaaggaaatggatttgcagattacggacaagataaagatagcgttgaaagggttgggtgcttacgcggatttgcaagccgcggtggagaagcataggggttatattttggaggaaacgcaggggttagaagttttgtgtggcggagatgttggcggtgtgtttgtttctgtcaatgttgaaggatatgaaatagaaatttccatttcccccaattcggcacaataa

SEQ ID NO: 62794 - protein, 121 aa, Unknown
  Obtained from environmental sample
  misc_feature (1)..(121): Xaa is any amino acid
MLVREVAEGLAVEADENYTIALDLKITPELRQSCIARELVNRIQNRRKEMDLQITDKIKIALKGLGAYADLQAAVEKHRGYILEETQGLEVLCGGDVGGVFVSVNVEGYEIEISISPNSAQ

SEQ ID NO: 62795 - DNA, 309 bp, Unknown
  Obtained from environmental sample
  misc_feature (1)..(309): n is a, c, g, or t
atgactgaagcaaagaaacgcagagtctacaccaaggaattcaagcaagatgctttgaatttatccaagcaacccggttatacagcattttccgctgccaagagccttggcatagacagcaagcaaatataccggtggcggaaggaagaggagctgaatggcaccctagctttccccggcaacggcaaagcagccctttccgacagcgagaagcgcatcagggagctggagaagcagctcagggattccgagctggagagagaaatcttaaaaaaagcactgggcattttctcaaggacaccaaaatga

SEQ ID NO: 62796 - protein, 102 aa, Unknown
  Obtained from environmental sample
  DOMAIN (7)...(90): Transposase
  misc_feature (1)..(102): Xaa is any amino acid
MTEAKKRRVYTKEFKQDALNLSKQPGYTAFSAAKSLGIDSKQIYRWRKEEELNGTLAFPGNGKAALSDSEKRIRELEKQLRDSELEREILKKALGIFSRTPK

SEQ ID NO: 62797 - DNA, 603 bp, Unknown
  Obtained from environmental sample
  misc_feature (1)..(603): n is a, c, g, or t
atgtgtaaacctaaattacttctacatatctgttgcgcgccggatgaggcttacgcggttgatttgattaaggatcaatatgagttgcgctgcttcttttgcaacccaaatatctttccggatgaagagttcgcgctacgcttaaacgaggccaaaaaagcggctatgatttacggggttccgtttacttgggatgattgcgactacgacgcgtgggttaatgccacggcggggttgacggacacccctgagggcggggctcggtgccgcgaatgtttttttctgaggctgacgcgcacggcggaggtttgcagggatatggggtggccggcgtttgggacggtgatgagcgtaagcccgcataagaagacggcaatgcttgacgaggcgggaaaacgagcggcggagtcgtgcggggtggagtacgcgccgtttgactttaagaagaaagacgggtttaggaagagcgtcgcccttagccggcggctggggctgtatcggcaggattattgcgggtgccgggttagcttggaggaggcgaaaaaaagggcggctgccggcgctatggcggccgatccgccggtctgcggatacggcagataa

SEQ ID NO: 62798 - protein, 200 aa, Unknown
  Obtained from environmental sample
  DOMAIN (6)...(198): Uncharacterized BCR, COG1636
  misc_feature (1)..(200): Xaa is any amino acid
MCKPKLLLHICCAPDEAYAVDLIKDQYELRCFFCNPNIFPDEEFALRLNEAKKAAMIYGVPFTWDDCDYDAWVNATAGLTDTPEGGARCRECFFLRLTRTAEVCRDMGWPAFGTVMSVSPHKKTAMLDEAGKRAAESCGVEYAPFDFKKKDGFRKSVALSRRLGLYRQDYCGCRVSLEEAKKRAAAGAMAADPPVCGYGR

SEQ ID NO: 62799 - DNA, 1512 bp, Unknown
  Obtained from environmental sample
  misc_feature (1)..(1512): n is a, c, g, or t
ttggagctcggcctaatagaagacgcccgcgatatgctcgacaaatataagacggtgtttcaggattactgggagtaccactacctctactcacgcgtctacgccgagcagaacaggccgcgcgaggccgtctcctgcctcattgtcggactgcgcttggagcgtgacaacgtcgattgcctgctcgggctcttctacgccttcgcgatgatgaacatggtgcgccggggcgggcgctttttgctcgaggcgcacaggcttcaccaagataacgagccggtgtacacggcgcttatttggtactacacggagataaacgagccggagatggcgatcacctgctttgaacgggcgaaggcgctcaactccaacaatcccgatacctaccgcaacggcgggcttgccttcgaccgcttggggcgcgtagaggaggccgcggcttgttacaaggcggcgttgcagataagcccgaactttgaggaggtgcgcgacctctacgccgatcacctgatatttaccggcaagaccgacgaggccgtcgcgcttttcgaggacgcgctccgcgagtcgcccaagaacgtgcgccatatatccaagctcatctactgcttgtcgcagcgcggcaatttcgatagggccgaggcgctggccaagcactcgatcgcgctgtatccgaactcacccacaggctacctcgatctcgcgtacatctgcctgaacacagggcgcatagacgatgcctccgagtgcgccgacaaggccatctccgtcgcgcccatagacgcggagggataccgcgtgaaggctatcgcgttctccgagcgcggcgaccacgcgaccgccgaggcgctcttcgagaaggccatatccctcgaccccgacaacgccgacgcaatgcgcgattactaccagcacctccgcatcgccgaaaagtacgagcggatgatagacgccgtgaacaaggtcataacgcttgaatacccgcattgcaccgaagactattggttcctcgccgacttctaccgcgagaagcggcaaaacgccgacgccttccgctgtctgcgcctcgcctacaacaccatgcctgccgaaaaggagctgctgccgcccatgatcgaaatactgttggaacaggggcactcgaagtacagcctgcccatattcgcggactacgtgcataggtgcggatggacggaaacgatgaaccgtttcacgcaaagcaagcatttcaaggacaatttcacccaagagggtatacggtttttgcgcttcaccgggcagcgtcccgcggccttccgcgagtacatattcaggcactacttgctccgtttcgggcttatgtactacacggcgatctccgccgcgttggcaatacccgccggcattctctttgggtgggcgggcgtgggcggggtggcggcggcgtacgcggcgtcgctgggggtgattaaggctgtgcgggcgtttaggcggaagcgggccggtaataaaaaccatgctcaaaatcattaa

SEQ ID NO: 62800 - protein, 503 aa, Unknown
  Obtained from environmental sample
  DOMAIN (126)...(159): Tetratricopeptide repeat
  misc_feature (1)..(503): Xaa is any amino acid
MELGLIEDARDMLDKYKTVFQDYWEYHYLYSRVYAEQNRPREAVSCLIVGLRLERDNVDCLLGLFYAFAMMNMVRRGGRFLLEAHRLHQDNEPVYTALIWYYTEINEPEMAITCFERAKALNSNNPDTYRNGGLAFDRLGRVEEAAACYKAALQISPNFEEVRDLYADHLIFTGKTDEAVALFEDALRESPKNVRHISKLIYCLSQRGNFDRAEALAKHSIALYPNSPTGYLDLAYICLNTGRIDDASECADKAISVAPIDAEGYRVKAIAFSERGDHATAEALFEKAISLDPDNADAMRDYYQHLRIAEKYERMIDAVNKVITLEYPHCTEDYWFLADFYREKRQNADAFRCLRLAYNTMPAEKELLPPMIEILLEQGHSKYSLPIFADYVHRCGWTETMNRFTQSKHFKDNFTQEGIRFLRFTGQRPAAFREYIFRHYLLRFGLMYYTAISAALAIPAGILFGWAGVGGVAAAYAASLGVIKAVRAFRRKRAGNKNHAQNH

SEQ ID NO: 62801 - DNA, 819 bp, Unknown
  Obtained from environmental sample
  misc_feature (1)..(819): n is a, c, g, or t
atgattaaagaaactgaaaattatctaaaagcgcaggcaaaagaaatccgtaaaatgacaatcgaggaaattggaaatctcggaacaggtcatatcggaggagccatgtcaatcgttgaccttttggctctgttatactttcacaaaatgaaggttgatccgaaaaatccccgctgggaagaaagggatcaacttgtagtttccaaggggcattcaggtcccgccgtttacgccactttggcgctcaagggatttttccccaaggactggcttacaaccctgaacaagggcggaacaagcctccccagccactgcgaccgcaacaagacccccggcatcgacatgaccacaggctctctcgggcagggtttttcagccgccatcggcatagcccttggtttaaagatggataaaaaaacatcgaccgtatacacgattatcggagacggcgaatccaacgaagggcaggtttgggaaggcgcggcatttgcgggctttcacaaactccccaacttaatcgcttttaccgattacaacaaacaacagcttgacggctttaccaaagatattttggacatgggaaacctcgccgcaaagtgggaacaattcggctggttcactcaggaagttgacggtcacgatattgccgccttggacgccgcgattgacaaagctctagcggaaaaagaaagagcttcgatgatcgttatgaacacaatcaagggaaagggatgcagtttcgcggaaggcgtggagaaaaaccacagcatggctttcgacatggaaaaggctaaagaagccatagccgcgttaggataa

SEQ ID NO: 62802 - protein, 272 aa, Unknown
  Obtained from environmental sample
  DOMAIN (97)...(237): Thiamine pyrophosphate enzyme, C-terminal TPP binding domain
  misc_feature (1)..(272): Xaa is any amino acid
MIKETENYLKAQAKEIRKMTIEEIGNLGTGHIGGAMSIVDLLALLYFHKMKVDPKNPRWEERDQLVVSKGHSGPAVYATLALKGFFPKDWLTTLNKGGTSLPSHCDRNKTPGIDMTTGSLGQGFSAAIGIALGLKMDKKTSTVYTIIGDGESNEGQVWEGAAFAGFHKLPNLIAFTDYNKQQLDGFTKDILDMGNLAAKWEQFGWFTQEVDGHDIAALDAAIDKALAEKERASMIVMNTIKGKGCSFAEGVEKNHSMAFDMEKAKEAIAALG

SEQ ID NO: 62803 - DNA, 534 bp, Unknown
  Obtained from environmental sample
  misc_feature (1)..(534): n is a, c, g, or t
atggcagaacaacaaaaagaaatgcgaatggcttatgtcgatacagtaatggcattagccgaaaaaaataaaaacattgtcgtactggaagcagatttaatgagttgtacaaacacgggtatttttaagaaaacatatcccgatcgttttttcaactgcggtatcgccgaagccaacatggtcggcattgccgccggtctttccactctgggaaaaattccttttgcgtcaggctttggctgtttttcatcaaggcgcgtatacgatcaatttttcctttccgccaactacgcaaagttaaacgtaaaattgattggcactgacccgggcgtaacagccgcgttcaacggcggaactcacatgccctttgaggagcttgccctgatgagggtaattccgaaagttacaatgattgaaccgtcagaccccgcgtcctgcgccgcttttgtgcgtctaatggcggaagaatacggctgtcattatctgcggtatccctcccaaaagccgtgcccgtatcttttcccgggaaaatga

SEQ ID NO: 62804 - protein, 177 aa, Unknown
  Obtained from environmental sample
  DOMAIN (6)...(171): Transketolase, pyridine binding domain
  misc_feature (1)..(177): Xaa is any amino acid
MAEQQKEMRMAYVDTVMALAEKNKNIVVLEADLMSCTNTGIFKKTYPDRFFNCGIAEANMVGIAAGLSTLGKIPFASGFGCFSSRRVYDQFFLSANYAKLNVKLIGTDPGVTAAFNGGTHMPFEELALMRVIPKVTMIEPSDPASCAAFVRLMAEEYGCHYLRYPSQKPCPYLFPGK

SEQ ID NO: 62805 - DNA, 387 bp, Unknown
  Obtained from environmental sample
  misc_feature (1)..(387): n is a, c, g, or t
gtgtacaacacaccgccgacatttggcatttacgtgctccgcaacgtcctggcctacaacaagggaataggcggcctaaagaccatcgaggctaacaaccacaaaaaaggcgagctgctgtatggctgcatagacaaacactccgggttcttcaagccattcgtcacagaaaaagccgacaggtcgctgatgaacattgacttcttcctcccaagcgaagagctgacggattcctttgtcaaagaagccaaaaagaatgggatggtggggctaaaaggctaccgcgacattggcggcatacgcgtcagtgcctataacgccgtgagcgtggacgacgtgaaaaccttggtcgaattcatggaagagttcgtaaagaagaatgcctag

SEQ ID NO: 62806 - protein, 128 aa, Unknown
  Obtained from environmental sample
  misc_feature (1)..(128): Xaa is any amino acid
MYNTPPTFGIYVLRNVLAYNKGIGGLKTIEANNHKKGELLYGCIDKHSGFFKPFVTEKADRSLMNIDFFLPSEELTDSFVKEAKKNGMVGLKGYRDIGGIRVSAYNAVSVDDVKTLVEFMEEFVKKNA

SEQ ID NO: 62807 - DNA, 519 bp, Unknown
  Obtained from environmental sample
  misc_feature (1)..(519): n is a, c, g, or t
gtgcctgatccaccccctgcagtcctccggcgtgatcgagtccagggccacggacatggcgggcagcagctcatcagcagtcctggccttcagcttccgcaggcatgccttgaccttggaccaggcgtgctcgatagggttgaaatcctaggaatacacgggcaggaacacgacattgactcctttgtcggcaagcggccgcaggacgcccttcactttgtgggccgacaggttgtccaggatcagcgtgtccccccttctcattgcgggcgcgaggcgcttcttgacgtaggccgcgaaaaactctccgtccagcgagcctttgtacgccagcggggcgaccaccccgcccagcccaagggcccccacaagcgacgtcctctcgaacctgacgtccggcacgtactcatacaccctctcgccagccatggccctcccatacagccgcgtcatgccgcagttcacgccggtctcatcgagccagtacgttcttgccgcgtccaccgcgctttggcttga

SEQ ID NO: 62808 - protein, 172 aa, Unknown
  Obtained from environmental sample
  misc_feature (1)..(172): Xaa is any amino acid
MPDPPPAVLRRDRVQGHGHGGQQLISSPGLQLPQACLDLGPGVLDRVEILGIHGQEHDIDSFVGKRPQDALHFVGRQVVQDQRVPPSHCGREALLDVGREKLSVQRAFVRQRGDHPAQPKGPHKRRPLEPDVRHVLIHPLASHGPPIQPRHAAVHAGLIEPVRSCRVHRALA

SEQ ID NO: 62809 - DNA, 396 bp, Unknown
  Obtained from environmental sample
  misc_feature (1)..(396): n is a, c, g, or t
gtggaggcgagggaagagtggcagtcaagccaaagcgcggtggacgcggcaagaacgtactggctcgatgagaccggcgtgaactgcggcatgacgcggctgtatgggagggccatggctggcgagagggtgtatgagtacgtgccggacgtcaggttcgagaggacgtcgcttgtgggggcccttgggctgggcggggtggtcgccccgctggcgtacaaaggctcgctggacggagagtttttcgcggcctacgtcaagaagcgcctcgcgcccgcaatgagaaggggggacacgctgatcctggacaacctgtcggcccacaaagtgaagggcgtcctgcggccgcttgccgacaaaggagtcaatgtcgtgttcctgcccgtgtattcctag

SEQ ID NO: 62810 - protein, 131 aa, Unknown
  Obtained from environmental sample
  misc_feature (1)..(131): Xaa is any amino acid
MEAREEWQSSQSAVDAARTYWLDETGVNCGMTRLYGRAMAGERVYEYVPDVRFERTSLVGALGLGGVVAPLAYKGSLDGEFFAAYVKKRLAPAMRRGDTLILDNLSAHKVKGVLRPLADKGVNVVFLPVYS

SEQ ID NO: 62811 - DNA, 405 bp, Unknown
  Obtained from environmental sample
  misc_feature (1)..(405): n is a, c, g, or t
gtgccattnttaaatatgtggatttatatgcttggcggccttttcattaaccggaaaaacccccgaaaagcgctgaaaacaataaactcaggcatagaaaaaataaaaaaaggcggggccatgatcatctttcccgaaggccatcgttcccgcgggcgcggccttttgcccttccaccccggctccttcaagctggcgacccagtccagggccgtaatagtcccggtggccctcaaaggcacctgggaagtatttgaaaaaagctaccgtgttaatcccggccccgtaagcgttactttctgcaaacctgtcaacaccgccgacatccccgccgaagaccggaagcaggttttggcggaaaagatatacaatgttatcaatgaagagttagggactggggactga

SEQ ID NO: 62812 - protein, 134 aa, Unknown
  Obtained from environmental sample
  DOMAIN (1)...(79): Acyltransferase
  misc_feature (1)..(134): Xaa is any amino acid
MPXLNMWIYMLGGLFINRKNPRKALKTINSGIEKIKKGGAMIIFPEGHRSRGRGLLPFHPGSFKLATQSRAVIVPVALKGTWEVFEKSYRVNPGPVSVTFCKPVNTADIPAEDRKQVLAEKIYNVINEELGTGD

SEQ ID NO: 62813 - DNA, 609 bp, Unknown
  Obtained from environmental sample
  misc_feature (1)..(609): n is a, c, g, or t
atgagcataaaaacagtagtttttgattacggaggcgttatctgttatatgcccactccggaaatgaggagcgagcttgtgcggcttagcggcttgtccgccgaagtcctgtgggatttggatcggaaataccgcggcgagtgggacaggggaacatatgacgggattgggcattaccggttcattttgtcaaaggcgggcgtctcctttaatgatgacagccttgcgcggattgtacaggctgatattgaaagctggagccatataaatcctgatactgtaaaattaatgaaggatataaaatccattgggattcgcgtggggattctttccaatataccgcatgattttcccagggacagcgtgccggtattcgccgaagcggacattgccgtttattcctgcgacctgggcataataaaaccagaagcgggaatttacgaaaaactgagggaaaaagcgggttgtttatatgaagagattgttttttttgatgataaggttgataatgtaaataaagcaagggaactcgggatgcgggcttgtttgtgggaaggcgccgaacatgcccgtaaaatggtttccggcatggcaggagcggcgatataa

SEQ ID NO: 62814 - protein, 202 aa, Unknown
  Obtained from environmental sample
  DOMAIN (3)...(187): haloacid dehalogenase-like hydrolase
  misc_feature (1)..(202): Xaa is any amino acid
MSIKTVVFDYGGVICYMPTPEMRSELVRLSGLSAEVLWDLDRKYRGEWDRGTYDGIGHYRFILSKAGVSFNDDSLARIVQADIESWSHINPDTVKLMKDIKSIGIRVGILSNIPHDFPRDSVPVFAEADIAVYSCDLGIIKPEAGIYEKLREKAGCLYEEIVFFDDKVDNVNKARELGMRACLWEGAEHARKMVSGMAGAAI

SEQ ID NO: 62815 - DNA, 1599 bp, Unknown
  Obtained from environmental sample
  misc_feature (1)..(1599): n is a, c, g, or t
gtggaagagatcaaagcagatatggaaagcccacatcccatggacaggttaatctgcggggacgtgggctacggaaaaaccgaagtggcggtgcgggcctgctttaaggcgataatgggcggcaagcaaatagcgtttctagcgcccaccacgatccttgcggaacagcattatgaaaatttccaggaaaggttcagtcagtttccggttagggtggcgatgctctcgcgctttgtggacaaaaaaagcgtccgcaagatccttgaggaattaaaaaacggggaaatcgatctgttggtcggtacccacaggatcatacaaaaagacgtggcctttaaaaacctggggttaatcgtcattgacgaggaacagcgtttcggcgtaaaggacaaggaaaggctcaaggaacttaaaaccaacgttgactgcctcacgctttcggcaacccccatccccaggacgcttcacatgagcctcctgaaaatccgcgacatgagtttgctggcgacggccccctccggcaggcagccgattgaaaccgtcattgaggaatacagcgacgagaggctggtcaaagcgatacgcaatgaagtagagaggggggggcaggttttcttcctgcataaccggatcgagaccctgcgggatacaaggataaaaatcgagcgccttgtgccggagattttggccgagaccgcgcacgggcagatggacgcgcaggatcttgaggacattatgcaccgctttgtgcacggcggctttcacgtgcttgtgtccacaacaataatcgagaacggcatagacatccccaatgttaataccattataatagatcgcgccgacaagtacggcgtgtcccagttataccagctccgcggcagggtaggccgcagcgaccgcgtcgcctacgcatacctcctttacccgcagggcggtgagattaccgaactcgccatgaaacgcctccaggtgatctccgattttacggagcttggttccggtttcaagatcgccatgaaagacatggagatacgcggcgcggggaacctccttggcagggaacagtcgggcgacatttattccgtaggatttgatctgtacctcaagctccttgacgaagcggtaaggcgacttgagaattcaagttacgaggccgagttggaaaccctgctggaactggaatactcgggctttattccggacagctatattgattcccagcaggaaaaaatggaagtgtataaaatgatcgctgccataagggacatggaagaactggagcgcgtctacgcggatttacaggatcgtttcggcccgccgcccgtcgaggccgcctctcttctggcgcttgcggagatcaggataatctgccgtgaacttgcggtgtcttctctgagggaaagggaaggggtagtaaaggtggagtttgcgaaagtttcccatgtcaaagttgacaggcttatcaggctgatgcaggagtctatgggcaaagtgaagctggatcccaaaaagcccaacgtgcttatgcttgaagccggcaatatcggcttaaaagagaagagtgaatttataagggagaagctggcggcgctggcatag

SEQ ID NO: 62816 - protein, 532 aa, Unknown
  Obtained from environmental sample
  DOMAIN (8)...(152): Type III restriction enzyme, res subunit
  misc_feature (1)..(532): Xaa is any amino acid
MEEIKADMESPHPMDRLICGDVGYGKTEVAVRACFKAIMGGKQIAFLAPTTILAEQHYENFQERFSQFPVRVAMLSRFVDKKSVRKILEELKNGEIDLLVGTHRIIQKDVAFKNLGLIVIDEEQRFGVKDKERLKELKTNVDCLTLSATPIPRTLHMSLLKIRDMSLLATAPSGRQPIETVIEEYSDERLVKAIRNEVERGGQVFFLHNRIETLRDTRIKIERLVPEILAETAHGQMDAQDLEDIMHRFVHGGFHVLVSTTIIENGIDIPNVNTIIIDRADKYGVSQLYQLRGRVGRSDRVAYAYLLYPQGGEITELAMKRLQVISDFTELGSGFKIAMKDMEIRGAGNLLGREQSGDIYSVGFDLYLKLLDEAVRRLENSSYEAELETLLELEYSGFIPDSYIDSQQEKMEVYKMIAAIRDMEELERVYADLQDRFGPPPVEAASLLALAEIRIICRELAVSSLREREGVVKVEFAKVSHVKVDRLIRLMQESMGKVKLDPKKPNVLMLEAGNIGLKEKSEFIREKLAALA

SEQ ID NO: 62817 - DNA, 417 bp, Unknown
  Obtained from environmental sample
  misc_feature (1)..(417): n is a, c, g, or t
gtgaaagccgccgtgcacaaagcggtgcataatgtcctcaagatcctgcgcgtccatctgcccgtgcgcggtctcggccaaaatctccggcacaaggcgctcgatttttatccttgtatcccgcagggtctcgatccggttatgcaggaagaaaacctgcccccccctctctacttcattgcgtatcgctttgaccagcctctcgtcgctgtattcctcaatgacggtttcaatcggctgcctgccggagggggccgtcgccagcaaactcatgtcgcggattttcaggaggctcatgtgaagcgtcctggggatgggggttgccgaaagcgtgaggcagtcaacgttggttttaagttccttgagcctttccttgtcctttacgccgaaacgctgttcctcgtcaatgacgattaa

SEQ ID NO: 62818 - protein, 138 aa, Unknown
  Obtained from environmental sample
  misc_feature (1)..(138): Xaa is any amino acid
MKAAVHKAVHNVLKILRVHLPVRGLGQNLRHKALDFYPCIPQGLDPVMQEENLPPPLYFIAYRFDQPLVAVFLNDGFNRLPAGGGRRQQTHVADFQEAHVKRPGDGGCRKREAVNVGFKFLEPFLVLYAETLFLVNDD

SEQ ID NO: 62819 - DNA, 306 bp, Unknown
  Obtained from environmental sample
  misc_feature (1)..(306): n is a, c, g, or t
gtggtcnctgaaagggactatataagcatagagtacgccggggaagaaacggtctttgtgcccattgagcaggtaaaccttgttcaacgttacatcggcaacgagggcagccctccccggctggacacacttggttccaaaagctgggaaaaccgcaagggccgcgttaaaaagtccgtggaagacatagcggaaaaacttctggccctttactccaggcgacgccagtcgcagggcttcgcttttcctaaagacaccgaatggcagaccatgttcgaggcggccttcccgtttgaagaaatctaa

SEQ ID NO: 62820 - protein, 101 aa, Unknown
  Obtained from environmental sample
  DOMAIN (3)...(72): CarD-like/TRCF domain
  misc_feature (1)..(101): Xaa is any amino acid
MVXERDYISIEYAGEETVFVPIEQVNLVQRYIGNEGSPPRLDTLGSKSWENRKGRVKKSVEDIAEKLLALYSRRRQSQGFAFPKDTEWQTMFEAAFPFEEI

SEQ ID NO: 62821 - DNA, 1485 bp, Unknown
  Obtained from environmental sample
  misc_feature (1)..(1485): n is a, c, g, or t
atgggcaagtacattctttcgttggatcagggaactacaagttctagggcgatgctttttgatcgtgagcaaaatatcacagcggtagaacaaaaggagtttacccagatttatccgcgtgaaggctgggtggaacatgatccgatggaaatactttccacccaatactccgtgatgacggacattataaccaaagcgaagataaagacaagtgatattgccgctatcggcattaccatcnagagagaaacaacaatcctntgggacaagaatacgggagatcctgtttataacgcaattgtgtggcagtgcagaagaacttcctccattgtggacgcgcttgtgaaagacgggcttggagattatataaaacagacaactggccttataccggacgcttatttttcggggaccaaaatcaagtggatacttgataatgtgcagggagcaagagaacgggcgcaaaagggagatattcttttcggcactgtagacacatggctcatctggaaattgtcgggagggaaagcgcacgttaccgattatacaaacgcaagccgcacaatgatttttgacattcacaaacttgattgggacgacaaactgcttgacgcgcttgcaataccccgcgcgatactgcctgaggtaaaaccttcgggcgtggttttcgggacggcaaacattgacgacgttgaaatccccatcgcggggaacgcgggcgatcagcaggcggcattgttcggacagtgctgttttgaaaaaggagacgtaaaatgcacttatggcacaggctgtttcctgctcatgaataccggcagcaacgcagccgtcagcgccaacgggcttttaaccaccgttgccgcgggctttgataaaaaagttcagtacgctctggaaggatcggtctttacaggcggcgcggttatccagtggcttagggatgaaatgcgtcttatcacagacagcgcggacagcgagtattttgcgtccggcgtaaaagacacgggcggtgtttaccttgttcccgcttttacaggtcttggcgcgccgtactgggatatgtacgcccgcggctgtatcgtggggataacccgcggaacaaaacgcgtccatataataagggcggcgcaggaatcgatcgcgtatcaggtaatggatcttctgcgggcgatggaaaacgatctgggaataaaattaacggaattgaaagttgacggcggagcgagcagggataaattccttatgcagtttcaggccgatatctgccgcctttcaattatacggcctgtgataaaagaaacgaccgctcttggagcggcccagcttgccggaattaccgttggcttctggaaagatcaagcggaaataaaaaaactctggcagaaacaaaccgtgtttgaatcgcaaatggacgataaaaaacgtgaagaattaatcgaaggctggcacaaagccgtaggcagaagcagaggctgggctcagtaa

SEQ ID NO: 62822 - protein, 494 aa, Unknown
  Obtained from environmental sample
  DOMAIN (251)...(476): FGGY family of carbohydrate kinases, C-terminal domain
  misc_feature (1)..(494): Xaa is any amino acid
MGKYILSLDQGTTSSRAMLFDREQNITAVEQKEFTQIYPREGWVEHDPMEILSTQYSVMTDIITKAKIKTSDIAAIGITIXRETTILWDKNTGDPVYNAIVWQCRRTSSIVDALVKDGLGDYIKQTTGLIPDAYFSGTKIKWILDNVQGARERAQKGDILFGTVDTWLIWKLSGGKAHVTDYTNASRTMIFDIHKLDWDDKLLDALAIPRAILPEVKPSGVVFGTANIDDVEIPIAGNAGDQQAALFGQCCFEKGDVKCTYGTGCFLLMNTGSNAAVSANGLLTTVAAGFDKKVQYALEGSVFTGGAVIQWLRDEMRLITDSADSEYFASGVKDTGGVYLVPAFTGLGAPYWDMYARGCIVGITRGTKRVHIIRAAQESIAYQVMDLLRAMENDLGIKLTELKVDGGASRDKFLMQFQADICRLSIIRPVIKETTALGAAQLAGITVGFWKDQAEIKKLWQKQTVFESQMDDKKREELIEGWHKAVGRSRGWAQ

SEQ ID NO: 62823 - DNA, 651 bp, Unknown
  Obtained from environmental sample
  misc_feature (1)..(651): n is a, c, g, or t
ttgacaaatatatcggcgacgcaatcatggccttctggggcgctccggaaaagcatgaggacgactgtctgcagtcggtgctggccggctcttgaaatgattgaggcgcttgccgtttttaacgcaaaccagaaaaaactgactaaaccggaattccgtatcggggtgggtatcaactttggcgaggtaaccgtgggcaatatcggcagcgagcgcaagatggattataccgtaattggggacgcggtaaatttagcgtcgcgaatggagggcctcactaaaacttatcattcggaaatattgatttcagaaagcctgtttgatgaattgcaaaaaacttccccaaatgcgggcttaaattacaggctccttgacactgtggcggtaaagggcaagaccaagggcgtgaaaatcttcacggtaaaaaaatcgctctccccggcggagcaaaaagcgtggcctttgcataatcagggaatgaaactttattattcgcgttcctttaccgaagccgcgcaaaaatttaaagaaacgcttgaagttttacccgatgattttaacgctgacaatctttataaaaggtgcgttgaatacgcttcttctccgccgcccgccgaatggcacggcgttgaagtaatgaaaactaaatag

SEQ ID NO: 62824 - protein, 216 aa, Unknown
  Obtained from environmental sample
  DOMAIN (2)...(143): Adenylate and Guanylate cyclase catalytic domain
  misc_feature (1)..(216): Xaa is any amino acid
MTNISATQSWPSGALRKSMRTTVCSRCWPALEMIEALAVFNANQKKLTKPEFRIGVGINFGEVTVGNIGSERKMDYTVIGDAVNLASRMEGLTKTYHSEILISESLFDELQKTSPNAGLNYRLLDTVAVKGKTKGVKIFTVKKSLSPAEQKAWPLHNQGMKLYYSRSFTEAAQKFKETLEVLPDDFNADNLYKRCVEYASSPPPAEWHGVEVMKTK

SEQ ID NO: 62825 - DNA, 807 bp, Unknown
  Obtained from environmental sample
  misc_feature (1)..(807): n is a, c, g, or t
atgtcgacgggccggctggaactgtccgagggggaaaccgggccgcttcttgaaatcctgcgcgcgggaaaacagggtttgcaaaatgccgttatcggaggcggggaaagggttttccagtcgttctacttcgctcctttccggtggcatataattataagcgaagaacggggcgtgttttattccgacgcgaaccgcatcgccgttcaatccctgataacccttggcgcttccatacttctcgcctcgatcctgctgataatattttccgcccaccttaccaatccccttgcccgtattgttaaaacaatggacgacattatcaattcggcagacctttcatccagggtggaagttgaataccaggatgagaccggcaatctcgcttttacatttaaccggatgataggagagttggacaaggcgtacggccagattaagcgttacgcgtttgaagcggtgctggccgggaaaaaagaggaacgcgtgcggcagatatttcagaaatatgttcccaaggatgttatcgagcgctttttcgcctctccggaaaaaatgcttgtcggggacaaccgcaatctttcgattcttttttccgatatccgcagctttaccacgatctcggagggcatggcccccgatgaccttgtgaattcgctgaaccgctatttttccgggcaggttgacattatctacaaccgcaaggggatagttgacaaatatatcggcgacgcaatcatggccttctggggcgctccggaaaagcatgaggacgactgtctgcagtcggtgctggccggctcttga

SEQ ID NO: 62826 - protein, 268 aa, Unknown
  Obtained from environmental sample
  DOMAIN (72)...(141): HAMP domain
  misc_feature (1)..(268): Xaa is any amino acid
MSTGRLELSEGETGPLLEILRAGKQGLQNAVIGGGERVFQSFYFAPFRWHIIISEERGVFYSDANRIAVQSLITLGASILLASILLIIFSAHLTNPLARIVKTMDDIINSADLSSRVEVEYQDETGNLAFTFNRMIGELDKAYGQIKRYAFEAVLAGKKEERVRQIFQKYVPKDVIERFFASPEKMLVGDNRNLSILFSDIRSFTTISEGMAPDDLVNSLNRYFSGQVDIIYNRKGIVDKYIGDAIMAFWGAPEKHEDDCLQSVLAGS

SEQ ID NO: 62827 - DNA, 759 bp, Unknown
  Obtained from environmental sample
  misc_feature (1)..(759): n is a, c, g, or t
atgagcggacacaaattggaaaacgtaatcgccgaaaggcccacgaaaactatctaccgcgacgggaataaggtcatcaaactcatgggcgagatgtaccccgcccccgacgttctatccgaggcgcacaacctcgcctccgtcggcgagaccaccctcaaagtccccaaactcgtagaggtgacgaaaatcaagggcaaatgggctatcgtgtgggactacatcgaaggcaccacgctcgaccagctcatgaagaagcacaaggcgaaggagaaagagtaccttgagcgcttcgtggacatccaactcgacatgcacagccaccacgcgacaaggcttccgctgcttatcgagaagatggagcgcaaaatcaaggcctccggcctagacgcgacagcccgctacgaacttctgtcgaggctggcgggaatgcccaagcactccaaactctgccacggcgacttcaaccccagcaacatcgtcatcacggagaaagacgaggcatacataatagactggtcccacgccgcccaaggcaacgcgtcagcggacgcggcgcacacctacctgctgttcagactcacaggcaacaaagacttggcggacaagtacctcgcgctcttctgcaaaaagagcgacaccgcgaagcagtacgttgagaagtggctgtcgattgtcgccgcgtcgcaactccccaaggcgaagccggaagagaaagattttctgatgcggtgggctaatgtggtggactttgagtga

SEQ ID NO: 62828 - protein, 252 aa, Unknown
  Obtained from environmental sample
  DOMAIN (5)...(218): Phosphotransferase enzyme family
  misc_feature (1)..(252): Xaa is any amino acid
MSGHKLENVIAERPTKTIYRDGNKVIKLMGEMYPAPDVLSEAHNLASVGETTLKVPKLVEVTKIKGKWAIVWDYIEGTTLDQLMKKHKAKEKEYLERFVDIQLDMHSHHATRLPLLIEKMERKIKASGLDATARYELLSRLAGMPKHSKLCHGDFNPSNIVITEKDEAYIIDWSHAAQGNASADAAHTYLLFRLTGNKDLADKYLALFCKKSDTAKQYVEKWLSIVAASQLPKAKPEEKDFLMRWANVVDFE

SEQ ID NO: 62829 - DNA, 2454 bp, Unknown
  Obtained from environmental sample
  misc_feature (1)..(2454): n is a, c, g, or t
atggcggtagccgaaaccggcatgggcgtagtcgaggacaaggtgattaaaaaccactacgcctcggagtacatctacaatacttacaaagacgaaaaaacctgcggtgtaatcgaggacgatccggtgtcgggcatcactcgcatagcagagccaataggccttattgcggcggttattcccacaaccaacccgacatcaacggcgattttcaaggcgctcatttgccttaaaacacgcaacgggattatcatctcgccgcacccgcgcgcaaaagcaagcacctgcgccgccgcgaaaatcgtgctggacgcagcggtcgccgcgggcgcgcccgagggaatcataggctggatagacgagcccagccttgaaatgaccaacatggtgatgaaagaggcggacactattcttgccacgggcggaccgggcatggtcaagtccgcctattcctccggcaagcccgctatcggcgtaggatcgggcaatgtgccggcaatcatcgacgacagcgcagaccttctcctcgcggtcaactcaatcatacactcaaaaacttttgacaacggaatgatatgcgcgtccgagcaatcggtcatcgccctgacaggcgtctacgataaagtgaaagccgaattcaaacgccggggctgttacttccttacgcccgaagaaaccgagaaggtacggaaaacaattatcgtcaacggatcattgaacgcgaagatcgtcggacagaaggcggcgaaaatcgctgagcttgcgggcgtaaaagttgacgggacgacgaagatcctcatcggcgaagtccagagcgtggagctttcggaagagtttgcccacgaaaaactttcaccggtgctggcgatgtaccaggcgaaaaattttgacgaggcgctggacaaggccgaccatttggtgaaagacggcggctacggccacacagccagcgttttccttaatccgcatacgcaaacaggtgcggaaaaacttgccgccttcagtgcgcgtatgaagacttgccgcatagtgctaaacacgccgtcggcgcacggcggcatcggcgatttgtacaacttccgtctgcggccttcgctcactttgggctgcggcagttggggcggcaattcagtttcggaaaatgtcggcgttaaacacctgttaaatattaaaacactggctgcaaggagggaaaatatgttgtggttccgcgctcccgaaaaagtatatataaaaaggggatgccttcctgtggcattggacgagcttaaaaccgttatgggaaaaaagagggcgttcatcgtaactgacacattcctctacgaaaacggttacaccaaaacgataaccgaaaaactggacagcatgggtattgtccacgaaactttttttgatgtcgcccccgatccgactctcgcctgcgcgaaaaaaggcacggcgcagatgagcgccttcaagcccgatgtgatcatcgccctcggcggcggctcggcaatggacgccggcaaaatcatgtgggtcctctacgaacacccggaagttgattttgaggatatggcgatgcgcttcgccgacatccgcaagcgcgtctacaccttccccaagatgggagaaaaggcctactttatcgccataccgacatccgccggaacgggcagcgaggttacgcctttcgccgtcatcaccgacgaaacgaaggggatgaagtacccgctcgccgattacgaactgctgcccaagatggcgattgtggacgcggacgtgcagatgaacgcgcccaaggggttgacaagcgcgtcaggtatcgacgcggtgactcactgcttagaagcctacgcctctatcatggcgacggactataccgacggtttggcgatacagtccctcaaggtgattttcaagtggctgcccatcgcttataatgaaggcgcggcgaatcccgttgcgcgtgagaagatggccaacgccgcgactatggctggtatggctttcgccaacgcgtttctcggcgtatgccactcgatggcgcacaaactcggggcgttccaccacctgccccacggcgtggccaacgcgctgatgataaacgaggtgctgcgctacaacgccgtcgaagttccgcccaagatggggactttcccgcagtacgaccaccccaagaccctcgcccgctacgcggaagtcgcggacgccctcggtttgggcggcaagagcgacgaggacaaacttgagcacctcatcgccgccatagagaagttgaaagatcagataggcataaagaagaccatcaaagactacaacgtcgatgagaaggacttccttgcccgccttgacgagatgagcgaaaaagccttcgacgaccagtgcaccggagcgaatccccggtatccgctgattgaggagataaaaaagatgttcctaaacgcgtactacggtaaaaaggagcgtgtataa

SEQ ID NO: 62830 - protein, 817 aa, Unknown
  Obtained from environmental sample
  DOMAIN (3)...(393): Aldehyde dehydrogenase family
  misc_feature (1)..(817): Xaa is any amino acid
MAVAETGMGVVEDKVIKNHYASEYIYNTYKDEKTCGVIEDDPVSGITRIAEPIGLIAAVIPTTNPTSTAIFKALICLKTRNGIIISPHPRAKASTCAAAKIVLDAAVAAGAPEGIIGWIDEPSLEMTNMVMKEADTILATGGPGMVKSAYSSGKPAIGVGSGNVPAIIDDSADLLLAVNSIIHSKTFDNGMICASEQSVIALTGVYDKVKAEFKRRGCYFLTPEETEKVRKTIIVNGSLNAKIVGQKAAKIAELAGVKVDGTTKILIGEVQSVELSEEFAHEKLSPVLAMYQAKNFDEALDKADHLVKDGGYGHTASVFLNPHTQTGAEKLAAFSARMKTCRIVLNTPSAHGGIGDLYNFRLRPSLTLGCGSWGGNSVSENVGVKHLLNIKTLAARRENMLWFRAPEKVYIKRGCLPVALDELKTVMGKKRAFIVTDTFLYENGYTKTITEKLDSMGIVHETFFDVAPDPTLACAKKGTAQMSAFKPDVIIALGGGSAMDAGKIMWVLYEHPEVDFEDMAMRFADIRKRVYTFPKMGEKAYFIAIPTSAGTGSEVTPFAVITDETKGMKYPLADYELLPKMAIVDADVQMNAPKGLTSASGIDAVTHCLEAYASIMATDYTDGLAIQSLKVIFKWLPIAYNEGAANPVAREKMANAATMAGMAFANAFLGVCHSMAHKLGAFHHLPHGVANALMINEVLRYNAVEVPPKMGTFPQYDHPKTLARYAEVADALGLGGKSDEDKLEHLIAAIEKLKDQIGIKKTIKDYNVDEKDFLARLDEMSEKAFDDQCTGANPRYPLIEEIKKMFLNAYYGKKERV

SEQ ID NO: 62831 - DNA, 984 bp, Unknown
  Obtained from environmental sample
  misc_feature (1)..(984): n is a, c, g, or t
atgattttgcggcctgaagggcttgaccccaaaaccgccaaagctctcttaaagaacgaagccgaaaaaaaagacagttcctccgttctggatcttgccgcttttatatcggcaatgaaagcgatgaaccttccgaatacctgcttctgcgattgtacggcaagcaacgaggtggccggtttgtacgcggagatactgcaatcttccattcctgtagtaactcccaataaacgggccaattctggttcacttgcttattataaaaccctcacgggattttccagagccaggggcattccctatctgtacgaaaccacagtctgcgccggccttccggtaatttcaacattgagggatctctttctttccggggacaaggtaaggcgtattgaggcggtgctttccggaacgctaagctatatcttcaacaatttcgacggttcaaaatcattttccgctttattgcgtgaagcaaaaaacaaaggttttaccgagcctgacccaagggatgatctaaacgccgtggacgccgcacgtaaagccgtcattctggcccgtgaatgtggtttaaacatggaattttcagcggtcgaaattgagcccattctgccccgcgcctgctttgaagcggacggggtggaagcttttttcaaagagctggaaaaatccgacgccgattttgaaaaacgccgcagtgaagccgccgccgagggaaaagtcctgcgttatgtggcggttatcgaaaacggctgcgcgaaattgtcccttcgcaaggaaaaagccggcagccccttcctcaccctgaccgacgctgacaatatagtcgttataaccaccgaccgctattccaccctcccaatggttataaaggggccccggagcgggcgcacaggttaccgccgggggggttttcgcggatatagtgcgaatagcaagaactttagtgtaaaaaatagaagcgccctgcatcccagtgcagtatag

SEQ ID NO: 62832 - protein, 327 aa, Unknown
  Obtained from environmental sample
  DOMAIN (112)...(298): Homoserine dehydrogenase
  misc_feature (1)..(327): Xaa is any amino acid
MILRPEGLDPKTAKALLKNEAEKKDSSSVLDLAAFISAMKAMNLPNTCFCDCTASNEVAGLYAEILQSSIPVVTPNKRANSGSLAYYKTLTGFSRARGIPYLYETTVCAGLPVISTLRDLFLSGDKVRRIEAVLSGTLSYIFNNFDGSKSFSALLREAKNKGFTEPDPRDDLNAVDAARKAVILARECGLNMEFSAVEIEPILPRACFEADGVEAFFKELEKSDADFEKRRSEAAAEGKVLRYVAVIENGCAKLSLRKEKAGSPFLTLTDADNIVVITTDRYSTLPMVIKGPRSGRTGYRRGGFRGYSANSKNFSVKNRSALHPSAV

SEQ ID NO: 62833 - DNA, 462 bp, Unknown
  Obtained from environmental sample
  misc_feature (1)..(462): n is a, c, g, or t
gtgcagtatttttatattcaccgaaccgctttaggctggcgttacgcgcaagcgttaccgcaaagaactaagaaagattgggctcatcgtatccgatggttgcttaatgaacaatatccgtatgttgaaaaaatagtattgataatggataatctcaacacgcataaaatttcatcgctttatgaaacttttgagccggaagaaacattccggcttgcacaacggcttgagattcattatacccccatacatggaagctggttaaatatagctgaaattgaattgtcagcgatggccgcacaatgtttaggtcaaagacgtatccccgatttaatgagcatgaatgaggaattggctgcttggtatacacagcgtaaccaatcccagaaaggtgttgattggcatttctcaaccaaagacgcgcgtatcaaacttaaaaggctttatcctttaatcatgtaa

SEQ ID NO: 62834 - protein, 153 aa, Unknown
  Obtained from environmental sample
  misc_feature (1)..(153): Xaa is any amino acid
MQYFYIHRTALGWRYAQALPQRTKKDWAHRIRWLLNEQYPYVEKIVLIMDNLNTHKISSLYETFEPEETFRLAQRLEIHYTPIHGSWLNIAEIELSAMAAQCLGQRRIPDLMSMNEELAAWYTQRNQSQKGVDWHFSTKDARIKLKRLYPLIM

SEQ ID NO: 62835 - DNA, 915 bp, Unknown
  Obtained from environmental sample
  misc_feature (1)..(915): n is a, c, g, or t
ttggtgcttggaagcggcggctcttcagtaactgtacaagctgtgctgaaaagtcagaactcgccggaagtaatagtaatttccagaacaggcaaagacaactacgaaaaccttgaaaaacaccgtaacgcgaaatggataataaacacaacgcctgtcggaatgtaccctaacaacggcgtctctcctataccggactttaaaattttcagcgaatgtcagggagtaatagacttaatctacaacccggcgcgtactgaactgttcgcgcaggcgcaggacgcggacgtttccgctttcaacggatttataatgcttgtagcgcaggcaaaaaaagcggcggagtatttcactgatacgatcatagcggatgaggaaattgaaagaatcaattcaaaaatcgcccgccaatcccttaacctcgttttgataggtatgcccggctgcggcaaaaccagcgtgggagccgccattgccaaaaagatggggcgtgaatttattgacacagatgaattgataaaacaggccgcgggcaggccgatacctgagatatttgcggataacagcggatcaaccggcggtgaagaaaaattcagagcgctggaaactgatgttctgaagaatgtatgcaaacagagcggcaaagttatcgcaacaggcggaggcgttgttacacgggaagaaaaccgccgtattatccggcaaaacagcgtggttgtttttcgggaaagagatatttcccttctgccgttgaaaggccgccctgtttcccagcgggacggtatcgaagcgcttgcggctaaacgcctgcctctctaccgcagttggagcgacttcaccgcgcagggaaacgacatcgaacaaacagccgcagatattcaaaaaatgtttgaagagaattacattacgaactga

SEQ ID NO: 62836 - protein, 304 aa, Unknown
  Obtained from environmental sample
  DOMAIN (147)...(298): Shikimate kinase
  misc_feature (1)..(304): Xaa is any amino acid
MVLGSGGSSVTVQAVLKSQNSPEVIVISRTGKDNYENLEKHRNAKWIINTTPVGMYPNNGVSPIPDFKIFSECQGVIDLIYNPARTELFAQAQDADVSAFNGFIMLVAQAKKAAEYFTDTIIADEEIERINSKIARQSLNLVLIGMPGCGKTSVGAAIAKKMGREFIDTDELIKQAAGRPIPEIFADNSGSTGGEEKFRALETDVLKNVCKQSGKVIATGGGVVTREENRRIIRQNSVVVFRERDISLLPLKGRPVSQRDGIEALAAKRLPLYRSWSDFTAQGNDIEQTAADIQKMFEENYITN

SEQ ID NO: 62837 - DNA, 438 bp, Unknown
  Obtained from environmental sample
  misc_feature (1)..(438): n is a, c, g, or t
gtgcgtacacctccagcctatcaaccaggtagtctccctggcgcctttgggagggtcgaaccctcagggatggctcatcttgaggcaggcttcccgcttagatgccttcagcggttatcctttccggacatggctacccggcgcttgcacttggcagtacaaccggtacaccagcggtccgtccgtctcggtcctctcgtactaaaaacagctcctctcaaccatccaacgcccatggcagatagggaccgaactgtctcgcgacgttctgaacccagctcacgtaccgctttaattggcgaacagccaaacccttgggacctgcttcagccccaggatgcgatgagccgacatcgaggtgccaaaccttcccgtcgatgtggactcttggggaagatcagcctgttatccccggagtaccttttatccgttaagtga

SEQ ID NO: 62838 - protein, 145 aa, Unknown
  Obtained from environmental sample
  misc_feature (1)..(145): Xaa is any amino acid
MRTPPAYQPGSLPGAFGRVEPSGMAHLEAGFPLRCLQRLSFPDMATRRLHLAVQPVHQRSVRLGPLVLKTAPLNHPTPMADRDRTVSRRSEPSSRTALIGEQPNPWDLLQPQDAMSRHRGAKPSRRCGLLGKISLLSPEYLLSVK

SEQ ID NO: 62839 - DNA, 303 bp, Unknown
  Obtained from environmental sample
  misc_feature (1)..(303): n is a, c, g, or t
gtgccaaaccttcccgtcgatgtggactcttggggaagatcagcctgttatccccggagtaccttttatccgttaagtgacggcgcttccactcgctgccgccagatcactaagacccactttcgtgcctgcttggcctgtcggcctcgcagtcaggcccccttgtgcctttacactcatacgccgatttccaaccggcgcgaggggaccatcgcgcgcctccgttactgtttgggaggcgaccgccccagtcaaactgcccgcctaccgctgtccccgctccggtttcacggcgcgggttag

SEQ ID NO: 62840 - protein, 100 aa, Unknown
  Obtained from environmental sample
  misc_feature (1)..(100): Xaa is any amino acid
MPNLPVDVDSWGRSACYPRSTFYPLSDGASTRCRQITKTHFRACLACRPRSQAPLCLYTHTPISNRREGTIARLRYCLGGDRPSQTARLPLSPLRFHGAG

SEQ ID NO: 62841 - DNA, 321 bp, Unknown
  Obtained from environmental sample
  misc_feature (1)..(321): n is a, c, g, or t
gtgacggcgcttccactcgctgccgccagatcactaagacccactttcgtgcctgcttggcctgtcggcctcgcagtcaggcccccttgtgcctttacactcatacgccgatttccaaccggcgcgaggggaccatcgcgcgcctccgttactgtttgggaggcgaccgccccagtcaaactgcccgcctaccgctgtccccgctccggtttcacggcgcgggttagaagcctagccaggaaagggtggtatttcaccgtcggctccgcgcaggctaacgcccacgcctcacagcctcccacctatcctacacatgcctag

SEQ ID NO: 62842 - protein, 106 aa, Unknown
  Obtained from environmental sample
  misc_feature (1)..(106): Xaa is any amino acid
MTALPLAAARSLRPTFVPAWPVGLAVRPPCAFTLIRRFPTGARGPSRASVTVWEATAPVKLPAYRCPRSGFTARVRSLARKGWYFTVGSAQANAHASQPPTYPTHA

SEQ ID NO: 62843 - DNA, 357 bp, Unknown
  Obtained from environmental sample
  misc_feature (1)..(357): n is a, c, g, or t
gtgacgccgcctttgaccctattgctaaaaccaaagacggccgcacttctcccgaagttacgtgcgcattttgccgagttccttaacgcgagttctctcgtgcgccttagatttctcatcccgcccacctgtgtcggtttgcggtacggtcttcctgaccttaaccagtggggattgtttctcggcgccttgattacgcccgcttcgcctctccgtagatcggctcgctgtcaccgctcgcctgaacgcgttttccccgcatccaatagctcgcggcttcgaccgggacttccgtcacccggncgggtttcacctcacgcgtcatcccttgaaatcaggaacggtaccggaatatga

SEQ ID NO: 62844 - protein, 118 aa, Unknown
  Obtained from environmental sample
  misc_feature (1)..(118): Xaa is any amino acid
MTPPLTLLLKPKTAALLPKLRAHFAEFLNASSLVRLRFLIPPTCVGLRYGLPDLNQWGLFLGALITPASPLRRSARCHRSPERVFPASNSSRLRPGLPSPGRVSPHASSLEIRNGTGI

SEQ ID NO: 62845 - DNA, 711 bp, Unknown
  Obtained from environmental sample
  misc_feature (1)..(711): n is a, c, g, or t
gtgaggccccctagtccatccagcgctctacctgcgcgaggttttggcgaggctgtccctcaaggcatttcggggagagccagctatttccaagtttgtttagtctttcgctccgagccaccggtcatccctgccttttttaacagactagggttcggccctccacccggtttcacccgggcttcagcctgccggtggctagatcacttggcttcgggtctatggcatgcaactgtgcgaacttgcgttcgccttccgcccttttcagactcggtttccctccggctccgggactcccatcccttagcctcgctgcataccataactcgcaggctcattctacaaaagcacgccgtcacccatttgctgggctccgacatgttgcgggtccacggttcagggttctctttcactcccctcgccggggttcttttcgcctntccctcacggtacttctccactatcggtcgcgccctgtgtttagccttggatcgtggtcgacccggattccggcggggtttctcgtgccccgccgtacttaggattccgctccctcgccgtcatcatttcgggtacggggctttcaccccctctggccggctttcccaaaaccgttcccctatcatgacgacaaagttgtcgcggtcctgcaaccccatccgaccactaaaatgctttaaaaagttcataataatatataaatgtcattaa

SEQ ID NO: 62846 - protein, 236 aa, Unknown
  Obtained from environmental sample
  misc_feature (1)..(236): Xaa is any amino acid
MRPPSPSSALPARGFGEAVPQGISGRASYFQVCLVFRSEPPVIPAFFNRLGFGPPPGFTRASACRWLDHLASGLWHATVRTCVRLPPFSDSVSLRLRDSHPLASLHTITRRLILQKHAVTHLLGSDMLRVHGSGFSFTPLAGVLFAXPSRYFSTIGRALCLALDRGRPGFRRGFSCPAVLRIPLPRRHHFGYGAFTPSGRLSQNRSPIMTTKLSRSCNPIRPLKCFKKFIIIYKCH

SEQ ID NO: 62847 - DNA, 348 bp, Unknown
  Obtained from environmental sample
  misc_feature (1)..(348): n is a, c, g, or t
gtggctagatcacttggcttcgggtctatggcatgcaactgtgcgaacttgcgttcgccttccgcccttttcagactcggtttccctccggctccgggactcccatcccttagcctcgctgcataccataactcgcaggctcattctacaaaagcacgccgtcacccatttgctgggctccgacatgttgcgggtccacggttcagggttctctttcactcccctcgccggggttcttttcgcctntccctcacggtacttctccactatcggtcgcgccctgtgtttagccttggatcgtggtcgacccggattccggcggggtttctcgtgccccgccgtacttag

SEQ ID NO: 62848 - protein, 115 aa, Unknown
  Obtained from environmental sample
  misc_feature (1)..(115): Xaa is any amino acid
MARSLGFGSMACNCANLRSPSALFRLGFPPAPGLPSLSLAAYHNSQAHSTKARRHPFAGLRHVAGPRFRVLFHSPRRGSFRLSLTVLLHYRSRPVFSLGSWSTRIPAGFLVPRRT

SEQ ID NO: 62849 - DNA, 1434 bp, Unknown
  Obtained from environmental sample
  misc_feature (1)..(1434): n is a, c, g, or t
gtgacgaaactgcgcatcaagcaaattattaacaacctggtttcaaacgcgtacaaatgcactgaagaaggggaaatatcaatgtcaatttccgccgaacgtcaggaagatccgtcgatggtgacgcttgttttccgcatagcggacaccgggcaggggatgaccaaggaacaactgaacaagctgttcaacgagttcacccgctttaatacggacgttaacagcaaagtggaaggcaccggtcttgggttgagcattacgaaacaacttgtcgttttaatgggcggtaaaatcgacgtggagagcgaactgggcaaaggctccgtgtttaccgtgcgcctgccacaaaaaattgacggcgacggggtattgggcaaggaaatggccgaaaaacttagaaatttccgctccgccgatttgtcgcagacagaaaagaaggcgcagatcgtatgcgagtacatgccctacggcaaagttctggtggttgacgacgtggacacgaacctgtacgtggcccaggggctgatgtccccctacggtttgaacatagaaacggcgaagagcggttttgagatgattgaaaaaattaagagcggtaccgtatacgacataatatttttagaccatttcatgccaaagatggacggcatagaggcggcgaaaataatacgggagatgggctatacgaaccccataatagcgctgaccgccaacgcgattgtcgggcaggcggaggtgtttacaaagaacgggttcgacggtttcatctccaagccgatagacatacgcgaattgaacgccacgcttaacaaactggtgcgcgacaagtacccggccgaagcggttgaggccgcgcgcctgaaagcgtctaccgccccgcaacgcacggttaagcaggttgaccccgcgtccgatcttggattaagggcgatcttcgcgcgtgacgccgaaagcgtcatggcaaggctgaagtcaatactggacaattcgttccggaggaatgacgacatcacgcaatacgtcatcgacgtgcattcgatgaagagcgcttgcgccaacatgggagaggaggaggcgtcggccttcgcgcgcaggctggaaatagcgggacaggcgaaagacatacagctgttaacgtccgaaacccccgcgttcatgaaaaaactgcgcggggtaatcgacaagctcaagccaaaggaagaggcaaacgctcctgaaaattttgagaacgatctggtgttcctgtcggaaaagatgcttattattaaaacggcgtgcgagaattatgacgacgtgacggccaactcggcgttaaaggagcttgaacagaaaaagtggtcgcgatccgttaaaaattatataaacgccatcgccatgcatttactgcacggcgattttgagaaagccgccaacatagccaacgaatatctgtag

SEQ ID NO: 62850 - protein, 477 aa, Unknown
  Obtained from environmental sample
  DOMAIN (157)...(270): Response regulator receiver domain
  misc_feature (1)..(477): Xaa is any amino acid
MTKLRIKQIINNLVSNAYKCTEEGEISMSISAERQEDPSMVTLVFRIADTGQGMTKEQLNKLFNEFTRFNTDVNSKVEGTGLGLSITKQLVVLMGGKIDVESELGKGSVFTVRLPQKIDGDGVLGKEMAEKLRNFRSADLSQTEKKAQIVCEYMPYGKVLVVDDVDTNLYVAQGLMSPYGLNIETAKSGFEMIEKIKSGTVYDIIFLDHFMPKMDGIEAAKIIREMGYTNPIIALTANAIVGQAEVFTKNGFDGFISKPIDIRELNATLNKLVRDKYPAEAVEAARLKASTAPQRTVKQVDPASDLGLRAIFARDAESVMARLKSILDNSFRRNDDITQYVIDVHSMKSACANMGEEEASAFARRLEIAGQAKDIQLLTSETPAFMKKLRGVIDKLKPKEEANAPENFENDLVFLSEKMLIIKTACENYDDVTANSALKELEQKKWSRSVKNYINAIAMHLLHGDFEKAANIANEYL

SEQ ID NO: 62851 - DNA, 1680 bp, Unknown
  Obtained from environmental sample
  misc_feature (1)..(1680): n is a, c, g, or t
atgattaaagaaattcgtcagcatgaaaaattattaaatacggtaaacaaggtggccggcattttattgtccgtcaatgatgaaaattcttttaaacaattaatgttaaatagttttgagcttataggaaactgtctggatgttgaccgcgttcaaattatacataatgagatgataaacggcgaaatgcaggggatcttaagctatgaatggctaagccaatacgccaaggataatctcgtaaacggacctatcggtacaaacttctcctacagcataagccccgggtggacacaattattcaagcgcggcgaacatataaacgccgcgctgtcagatttgccggaaatagaaggcgcttttctaaaaacatttggaataaaatcaattgttattatcccgataattctggagaataatttctggggattattcagcattgacgactgccggacagagcgtatattttcaggtgatgaaatcaatatattaagctccgcaggtttgatgatgagcaatttcatagaaaaaaattcacagtcagctaaaatacgcgaagctaacgagcgcgtaaatattatgtttaacgccatgccgttaggcgcaagttatcacgacgctaatttaaatattatggactgcaatgaggaaatggtaaaaatattcgacttatcatgcaaacaggaatttatcgacagatttcatgagctttatccagagtaccagcctgacggaagtttatcaaaaaagaaatttgtcgatcatattaatcaggcgtttacagacggctacttatgcgaggagtggatgggtcagaatctgaaaggcgatccaatactatgtgaaattacgctcgtgcgcgttaaacattatgacgattttgttttagcggcctatatgagggatttacgcgagataaaagccgcggttaccgaaatgaatgaatcaatacaggcgtttaaccttttggaaaacatgatgaacaacctcgatacgatgatttttgttactgttccccaaacaggcgaacttttatttgttaacaactgtatgagggagcattttaaggttgaaggcgaatgtgtcgggcagttttgttataaagtgttttttaatgacaaagccggaatatgcgatttttgtccctgttataaacttgacaaagatccgcatgggacggtcatgtgggaactgcataaccccaaaacaaaacgcatataccaaaatacaagccgttttatggaatggtctgacggaagaatcgtccatattcaaaattcaatcgatgttaccgagttaattatggcgaaagaacaggcaattcacgctaacaacgcaaaaagcaatttcctcgcgaagatgagccatgaaatacgcaccccgatgaacgcgattctgggcattaccgagattcaactgcaaaataaaaatattccagattacatagaggaagccctggggaaaattaacaattcgggttatttgctgcttggcatcataaacaacatactggacatgtcanagatagagtccggcaaactggaactgtcgctcgccagttacgacgtgccaagcctgataaacgacacggtccaccttaacgtcgtattgtacgacnagcaagcaatagacttaacccttgacgttgacgagaatatctcgtcaaggctgttggggtga

SEQ ID NO: 62852 - protein, 559 aa, Unknown
  Obtained from environmental sample
  DOMAIN (30)...(175): GAF domain
  misc_feature (1)..(559): Xaa is any amino acid
MIKEIRQHEKLLNTVNKVAGILLSVNDENSFKQLMLNSFELIGNCLDVDRVQIIHNEMINGEMQGILSYEWLSQYAKDNLVNGPIGTNFSYSISPGWTQLFKRGEHINAALSDLPEIEGAFLKTFGIKSIVIIPIILENNFWGLFSIDDCRTERIFSGDEINILSSAGLMMSNFIEKNSQSAKIREANERVNIMFNAMPLGASYHDANLNIMDCNEEMVKIFDLSCKQEFIDRFHELYPEYQPDGSLSKKKFVDHINQAFTDGYLCEEWMGQNLKGDPILCEITLVRVKHYDDFVLAAYMRDLREIKAAVTEMNESIQAFNLLENMMNNLDTMIFVTVPQTGELLFVNNCMREHFKVEGECVGQFCYKVFFNDKAGICDFCPCYKLDKDPHGTVMWELHNPKTKRIYQNTSRFMEWSDGRIVHIQNSIDVTELIMAKEQAIHANNAKSNFLAKMSHEIRTPMNAILGITEIQLQNKNIPDYIEEALGKINNSGYLLLGIINNILDMSXIESGKLELSLASYDVPSLINDTVHLNVVLYDXQAIDLTLDVDENISSRLLG

SEQ ID NO: 62853 - DNA, 1284 bp, Unknown
  Obtained from environmental sample
  misc_feature (1)..(1284): n is a, c, g, or t
atgggtatcggaatggttcccagcattttaaactggtgcataatttntaccgttcttgaaaacatcattcttggcgctgaaaccgtaaagtacggcgttttaagatttgaaaatgcgcgcaagcaagtgatggaattatcacgccgctacaaactgaatattgatcctgacgcccttgtctccgatattacaatcggtatgcagcaaagagtcgaaatcctgaaaatgctctaccgcgaaaacgaaattttaatttttgacgaacctacagcggtgcttactcctcaggaaattgaagaattaatgcacataatgaaaagtctggttgcggaaggcaagtcgattttatttattacgcataaactggatgaaattaaagccgtcgcggatcgctgtacggtactgcgcaagggcaagtgtatcgggacagtggatgttgcgccggtttctaaagaagaactgtcagaaatgatggtagggcgcaaggtgagtctttccgtggaaaaggctgaacaacaacccggcgaaattgttttaagaacagaaaaccttaccgtaaaaagcaaagcgcacggaaaagcgcttgtaaacaatgcaagttttgaagtccgttccggtgaaattgtctgtattgcgggaattgacgggaacggtcagcaggagcttgtttatgcaattaccggaatgttacagccggactccgggcgcgtttttcttgaaggaaaagaaattacacataacggtatacgttcaagaggcatatcgcatatacccgaagacaggcataaacacggccttgtgctggactacaatcttgcatataaccttgttctgcaggattatttttcaccgcgctttcagaaaaacggttttttaaattttgatgaaatatataaaaatgcggatgaattaatagaaaaatttgatatacgctcaggtcagggcgcgcatactattgtccgcagtatgtcaggcggcaaccagcaaaaggcgattattgcgcgggaaatattgaggaattcccgtcttcttgtcgcagttcagccgacaagaggacttgatgtcggcgcatgcgaatatattcacaatcagcttattgcggaacgtacaaagggaaaggcggtgctcttggtttcccttgagcttgatgaagtaatggatgtcagcgacagaatccttgttatttttgaaggaaaaattgtcgccgatgtcaaaccaaaagaagtaagttacaaagagcttggactttatatggcggggtctgcaaagcaggaagtagcatga

SEQ ID NO: 62854 - protein, 427 aa, Unknown
  Obtained from environmental sample
  DOMAIN (17)...(138): ABC transporter
  misc_feature (1)..(427): Xaa is any amino acid
MGIGMVPSILNWCIIXTVLENIILGAETVKYGVLRFENARKQVMELSRRYKLNIDPDALVSDITIGMQQRVEILKMLYRENEILIFDEPTAVLTPQEIEELMHIMKSLVAEGKSILFITHKLDEIKAVADRCTVLRKGKCIGTVDVAPVSKEELSEMMVGRKVSLSVEKAEQQPGEIVLRTENLTVKSKAHGKALVNNASFEVRSGEIVCIAGIDGNGQQELVYAITGMLQPDSGRVFLEGKEITHNGIRSRGISHIPEDRHKHGLVLDYNLAYNLVLQDYFSPRFQKNGFLNFDEIYKNADELIEKFDIRSGQGAHTIVRSMSGGNQQKAIIAREILRNSRLLVAVQPTRGLDVGACEYIHNQLIAERTKGKAVLLVSLELDEVMDVSDRILVIFEGKIVADVKPKEVSYKELGLYMAGSAKQEVA

SEQ ID NO: 62855 - DNA, 1119 bp, Unknown
  Obtained from environmental sample
  misc_feature (1)..(1119): n is a, c, g, or t
atgaaaattaatcttcaaaaaggaataacccttttaaacagcggtcttactccttccgttataaacgcgctttcttccgtcgccgcgattttagtcggcttgatcgccggttttataattttattgttaagcaacgcgtcgcaagccggacaggggttcggcgctattttagcgagcggtttttcaaatatgaaccagcttgggcaggttctttattttgccaccccgataattatgacgggtctttccgtcggcttttcaagcagaacgggactttttaacattggagccgcggggcaatttatcacaggcgcttatgcggctgttcttgtcggcgttaaatgcgattttcttcccgggcatttgcattggatagccgctttaatcgccgccgttcttgccggcgctctttggggcgctattcccggttttttcaaagccatattcaatgtgaacgaagtaatagcgtgtatcatgatgaattataccggcacttatttggtaaattatctcgtaacgcaaaccgtttttgattctctgcggaatcagagtatgagattagcggagacagccaatcttccaaagatgggaatgaattatattttccgcgacggctataatgtttcaagcgcaaactcaggattttttatagccattttattcgcgatattgatctatgttatccttgagaaaactactttcggttacgagcttaaagcctgcggttttaaccgcgaagccgcccgttacgccggaataaacgaaaagaaaagcattatcctaagcatgacgattgcgggcgctcttgcgggacttggcggcgcgttgttgtacatggcaggttcaggcaaaggtatcactgttgttgacgtgcttgctcaggaagggtttaacggcattcccgtcgctcttttgggactgaataatccgctgggaataattttttccggtatgttagtcgcgtatttaaacgtaggcggctttaatatgcagttgtacagtttcgctccgcaggtaatcgagataataataagcgtaataatttatttcagcgcgttcgcgcttcttgtaaaaaactttttaaactcccttaaaaaacgaatgggaggcgaaacatga

SEQ ID NO: 62856 - protein, 372 aa, Unknown
  Obtained from environmental sample
  SIGNAL (1)...(23)
  DOMAIN (66)...(352): Branched-chain amino acid transport system / permease component
  misc_feature (1)..(372): Xaa is any amino acid
MKINLQKGITLLNSGLTPSVINALSSVAAILVGLIAGFIILLLSNASQAGQGFGAILASGFSNMNQLGQVLYFATPIIMTGLSVGFSSRTGLFNIGAAGQFITGAYAAVLVGVKCDFLPGHLHWIAALIAAVLAGALWGAIPGFFKAIFNVNEVIACIMMNYTGTYLVNYLVTQTVFDSLRNQSMRLAETANLPKMGMNYIFRDGYNVSSANSGFFIAILFAILIYVILEKTTFGYELKACGFNREAARYAGINEKKSIILSMTIAGALAGLGGALLYMAGSGKGITVVDVLAQEGFNGIPVALLGLNNPLGIIFSGMLVAYLNVGGFNMQLYSFAPQVIEIIISVIIYFSAFALLVKNFLNSLKKRMGGET

SEQ ID NO: 62857 - DNA, 516 bp, Unknown
  Obtained from environmental sample
  misc_feature (1)..(516): n is a, c, g, or t
gtgcgcaattttgtcagggtcggcacttgcggcggaatggctcttcacgtaacaggaggcgatgttgttatcgccacaggagcaatccgcatggagggaacgacaaaagaatatgttccaattgagttccccgccgtcgccaatctggacattacaaacgctcttgtgggagccgcaaaaaaattggggcttaaatggcatgcgggaattgtccagtgcaaggattcattttacggtcaacacagtcccgaccgtatgccttcaggctatgagctaaaggacaagtgggaagcgtggataaaagccggatgtcttgcttcggaaatggaaagctcgacgctctatattgtaagccagatactcggcgcaagagccggctgcgtgcttaacgttgtatggaatcaggaacgtgaaaaagcaggcatgagtaaccctcattgccacgatacggaaaacgcaatcaaaacagcagtagaagcggttagaagtttaattgagcttgatacagaaaagtaa

SEQ ID NO: 62858 - protein, 171 aa, Unknown
  Obtained from environmental sample
  DOMAIN (1)...(161): Phosphorylase family
  misc_feature (1)..(171): Xaa is any amino acid
MRNFVRVGTCGGMALHVTGGDVVIATGAIRMEGTTKEYVPIEFPAVANLDITNALVGAAKKLGLKWHAGIVQCKDSFYGQHSPDRMPSGYELKDKWEAWIKAGCLASEMESSTLYIVSQILGARAGCVLNVVWNQEREKAGMSNPHCHDTENAIKTAVEAVRSLIELDTEK

SEQ ID NO: 62859 - DNA, 954 bp, Unknown
  Obtained from environmental sample
  misc_feature (1)..(954): n is a, c, g, or t
atgagtatattgtttttccttgtccagcagacaatgtttttttcaatacctcttttgatcgtagctcttggcggaatgttttccgagcgttccggtataattaatattgcgctggaaggcattatgatcatcggcgcgttttcaggcattttgtttatcaacatgatacagaaatttattcccgggcagccggttttattgatggctgtgctggtttccgcattttcgggaacagcggtttcccttcttcacgcgtatgcttcaattaaccttaatgccgatcagataatcagcggaacggcgattaatatgctggctcccgcaacggcgatttacatagctagaacaatccgcaccgtacagcagattccgtttgttaaccagttccgtattgataaagtcccgctgttaggcgacattccgtttttcggcagcctgcttttcaaaagcacgtatattactacttatttaggtttcttaattctggcggtttccgcctttgttctttacaaaacccgtttcggtctgcgccttcgctcatgcggcgaacatcctcaggcttctgattctgcgggaataaatgtttacgctatgcgctacgccggagtaatgatttcaggcgcgcttgcgggaatcggcgggcttgtgtttgttgtccctacatcaatagagtttaatcccgaagtttcaggttacggctttttggcaatagccgtgttgattttcggacagtggaagccggggcgtattcttgccgcagcgtttttcttcggtcttatgaaggcaatatcgtcatcatattcaggcatttcctttatgagcgcaataccaattccggcctatgtatacaagatgataccttacattgcgacgcttgttgttctcgctttcagctcaaaaacctcacaggctccgaaagccgaaggtataccttacgataagggacgaagataa

SEQ ID NO: 62860 - protein, 317 aa, Unknown
  Obtained from environmental sample
  DOMAIN (7)...(295): Branched-chain amino acid transport system / permease component
  misc_feature (1)..(317): Xaa is any amino acid
MSILFFLVQQTMFFSIPLLIVALGGMFSERSGIINIALEGIMIIGAFSGILFINMIQKFIPGQPVLLMAVLVSAFSGTAVSLLHAYASINLNADQIISGTAINMLAPATAIYIARTIRTVQQIPFVNQFRIDKVPLLGDIPFFGSLLFKSTYITTYLGFLILAVSAFVLYKTRFGLRLRSCGEHPQASDSAGINVYAMRYAGVMISGALAGIGGLVFVVPTSIEFNPEVSGYGFLAIAVLIFGQWKPGRILAAAFFFGLMKAISSSYSGISFMSAIPIPAYVYKMIPYIATLVVLAFSSKTSQAPKAEGIPYDKGRR

SEQ ID NO: 62861 - DNA, 330 bp, Unknown
  Obtained from environmental sample
  misc_feature (1)..(330): n is a, c, g, or t
atgattatgncgggcgcaatggcgggaattggcggagcgctgctgttccttgcaggttcgggtaagggaatcacagttgtggatacattagcgcaggaaggctttctcggcattcccgttgctcttttggggcttaacaatccgatagggataattttttcaggtttgttgatcgcctaccttagtgttggcggatttaacatgcagctttaccattttgcgccgcaggtaatagaaattattataggtgtaattatttatttcagcgcttttgctcttctggtaagtaaattcataaagtcggtaagaaaacgcatggggtcaaaatga

SEQ ID NO: 62862 - protein, 109 aa, Unknown
  Obtained from environmental sample
  SIGNAL (1)...(18)
  misc_feature (1)..(109): Xaa is any amino acid
MIMXGAMAGIGGALLFLAGSGKGITVVDTLAQEGFLGIPVALLGLNNPIGIIFSGLLIAYLSVGGFNMQLYHFAPQVIEIIIGVIIYFSAFALLVSKFIKSVRKRMGSK

SEQ ID NO: 62863 - DNA, 528 bp, Unknown
  Obtained from environmental sample
  misc_feature (1)..(528): n is a, c, g, or t
atggcggcaacaatgataaatacacgcaagacgaatactacacccgtggtaaacgctgtggcgataagcgatgaagagcttgcccagcgggtggctattgttcggcgattcagggaattgctcatacaacagcgggagcgttttcacaattatctggctgttctggaaaaacaacagaccattatcaaaaccggaagcgcggaagaactgcttgctcaggttgaactggaagaacaaatagttgccgatattttttccttacagaaggttattaatccgctggaagatatgtaccgggcaacggttcccttttcgcctgctgatgatgttcccgccctgaaagtcgcgctggaaaacctaaaaatccgtgccataagccagtttgcctataacaaggatttgctttcttcgcgtatggcggaacttcgcactgaaataaaagaacttaaaaacaacccctttgtgggagcgtcgcgcacattgtaccaaaattccgttactgcttcattgatagacatagaagggtaa

SEQ ID NO: 62864 - protein, 175 aa, Unknown
  Obtained from environmental sample
  misc_feature (1)..(175): Xaa is any amino acid
MAATMINTRKTNTTPVVNAVAISDEELAQRVAIVRRFRELLIQQRERFHNYLAVLEKQQTIIKTGSAEELLAQVELEEQIVADIFSLQKVINPLEDMYRATVPFSPADDVPALKVALENLKIRAISQFAYNKDLLSSRMAELRTEIKELKNNPFVGASRTLYQNSVTASLIDIEG

SEQ ID NO: 62865 - DNA, 588 bp, Unknown
  Obtained from environmental sample
  misc_feature (1)..(588): n is a, c, g, or t
atggaaaatgtgttaactttgctgagggaatcaggcgccatgcttgagggccatttccttttgagctcaggccgtcattcggaccggtatttccagtgcgcgaaactgctgcagtacccggacaaggcggcggcggcgcttgccagcgtggcggaaaaaatcaaatcggatatgcaagccggaaaactggagattaacgctgttgtcggtcctgctatgggggggattgttgtcgcttacgagttgggcagacaattggggcttcccgctttttttaccgaacgcgatgacacgggaacaatggtactgcgccggggctttgaagtgcagtccgggcagaaaatattaattaccgaagatgtggttactaccggaaaatcttttggagaatgcgccgccactcttgaaaatttgggggcgaaaattaccgcccttgcctgcgtagtggacagacgtcaaacaggcattgaaatcccctggctgttttaccctgcttgtagagtaaatgccgcaaactgggaagctgattcttgtgaattatgtaaaaaaggaatacccgccgtaaagccaggatcaagaaaaatatag

SEQ ID NO: 62866 - protein, 195 aa, Unknown
  Obtained from environmental sample
  DOMAIN (32)...(159): Phosphoribosyl transferase domain
  misc_feature (1)..(195): Xaa is any amino acid
MENVLTLLRESGAMLEGHFLLSSGRHSDRYFQCAKLLQYPDKAAAALASVAEKIKSDMQAGKLEINAVVGPAMGGIVVAYELGRQLGLPAFFTERDDTGTMVLRRGFEVQSGQKILITEDVVTTGKSFGECAATLENLGAKITALACVVDRRQTGIEIPWLFYPACRVNAANWEADSCELCKKGIPAVKPGSRKI

SEQ ID NO: 62867 - DNA, 750 bp, Unknown
  Obtained from environmental sample
  misc_feature (1)..(750): n is a, c, g, or t
atgaaaacatcaccgctgtttactgtcatttatgaagacgaaaccattatcgctgttaacaaagcttccggcatttcagtcggcggtgatcgctgggatgaatccaaagagcggctggataaactcgttgccgagacagcggttatgccggcgaccttgccggcggcatcaaaactttttactgttcatcgcattgaccgtgaaacatcgggactggtggtttttgcaaaggacgaggcggcccaccgccggctttcgcttgcctttgaagggcgggatgtaaaaaagcggtacgttgctgttgttcacgggcggccttcgtggcaggaaacggtctgcgatttgcctctggttcccaatggcaacaaacagcatcagaccattattgacaaatatcaggggaaaaagtccctgacccgcttcaaactcctgggcagcgcgggcaatttgagcgttcttgaagcctttcctgaaaccggcagaacccaccagatacgggttcatgcggcggcattgggctttcctgttgtatgcgattcattgtatggcaaaaataaaccggtactgctttccgctatcaagaaaaactggcgcggtgatcttttagaggaaaaaccgcttctggcgcggcttggtcttcatgccgcggaactttctttaccctcactctcacaaaccttgtacgccccgctgccgcgggacatgaccgccctgatcaaacagatgaagctttttcagctaacaatgtag

SEQ ID NO: 62868 - protein, 249 aa, Unknown
  Obtained from environmental sample
  DOMAIN (15)...(171): RNA pseudouridylate synthase
  misc_feature (1)..(249): Xaa is any amino acid
MKTSPLFTVIYEDETIIAVNKASGISVGGDRWDESKERLDKLVAETAVMPATLPAASKLFTVHRIDRETSGLVVFAKDEAAHRRLSLAFEGRDVKKRYVAVVHGRPSWQETVCDLPLVPNGNKQHQTIIDKYQGKKSLTRFKLLGSAGNLSVLEAFPETGRTHQIRVHAAALGFPVVCDSLYGKNKPVLLSAIKKNWRGDLLEEKPLLARLGLHAAELSLPSLSQTLYAPLPRDMTALIKQMKLFQLTM

SEQ ID NO: 62869 - DNA, 2187 bp, Unknown
  Obtained from environmental sample
  misc_feature (1)..(2187): n is a, c, g, or t
atgactgaaaaactgataagcaatgtcgttttgattcagcctccttttgtgcagcttaacagtccgtatcccgccccgtattaccttaaaaattttcttgagcaaaggggatttcatgtaacggttttggatcattccatcgctctttttgaaagaattttttcccgcaccggtctggagcgtatttttgcagatgcatcgcttttgtctgccagatggccgaataagaattccgcgtataagagcgaggctgaaagatttttgtccgaaagggatctgtggtgcgtttcaatagacaggctcatcgcgtttctgcgccaaaaggatcacgagtgggggcatttccttgcacttgccaacggctgccttcccggcggcaggcggactgacgcgttcattgcagaacgcggcggggatgtttcagtaaacgaagccgggatcctcgcgacaaaacttctttcggatctggcggattttatcactttcaccctggatgaaaatttcagcctcatccgttacagggcggcagctgatgcctgtttttgctctttttccgccgttcaaaaaacccttgacggttacattatggaaaacttttaccgccccatgctcgaagaggaatggaaaaagctggaaaacaccggtgttgcaaacgaccggtttttacttggcgttactattccctttcccggctgcctttcggcggcgcttgtttgcgcggaatcggctaaaaaacactttggcggagcggttagcaccatcgctggcggcgggtatgtaaacacggaattacgttttctcaattcacaggaattttcatattgcttcgatcatatttcatttgataaaggttacgcctcgcttgtctccattctggaaaacaacaaaatagatgcggcaactgaagactcctttgtaaagacaacttttcccgactattcggaggttgattttaaccgctacctttatccggtcgatgacgccaatcccatgcacaggctctggtctgacgggcattggctcaaggcttatttggcccacggctgttattggcattcctgcgctttttgtgacgttaccctggattacatcaaaaactttattccggttgatacgtctgcccttttttctcacttaaaaaaccaaacggaaaaaaccggcgtcaggggaatccatttttgcgatgaagctgcgcctgtttcatcgcttttggaatttgccctcttaaaccgtgaggccggtgttccactcaatttctggggcaatatccgttttgaaaaaagctacgatccggacacggcggcgatactcgcggcaggcggtctgctgggagtttcggcgggccttgaggttgccaccgagaagggctttaagcggctcggcaagggcatcgatcttgaaagcgcggtaagtgcgctggccgcatttaaggaagccggtgttttaactcacgcctaccttatatacggttactgggacgaggatgaacaagagctgattgactccgccgaaaccctaaggcagctctttgccgaagggcttttggattccgctttttggcacaaattcatccttacccgccactcgcgaatctacgccgaaaaagagcgcggtcttcacccgcttttaaaagtgaaagacgactgcccacaaaacgataaaactttcgctttaaatgatctttcttttgagggcgaggaaaggtttgataaatacggcgagggcctcgaaacgcttcttgccatatggatgtcaggcgaaacagaagcgcctgttcgttttgcctttcccttcaaggtgaaagccccgtcggttccgccggatcttgtcgccgtccttttggataaatacgcccgcgacagagacaaagccagggcggcaaagcctatggcagagcctaagagcggcagggttttgtttttaggcacaattccccggtgtgaggggcattcgcttttctggcgatggcggctggccgacaggaacttaactgccgccggagaagccgaagcgggaagactcgccgccctgctgggggccacttccaaaggcaggggcatggacgcaaaagagttttacgcttccatagagcaaatttcaggcgaagacagggcaagaaaaatttggaagcggctgagggagagtggattggtagtgtttaataatctaaaggatgaaagacgatga

SEQ ID NO: 62870 - protein, 728 aa, Unknown
  Obtained from environmental sample
  DOMAIN (343)...(503): Radical SAM superfamily
  misc_feature (1)..(728): Xaa is any amino acid
MTEKLISNVVLIQPPFVQLNSPYPAPYYLKNFLEQRGFHVTVLDHSIALFERIFSRTGLERIFADASLLSARWPNKNSAYKSEAERFLSERDLWCVSIDRLIAFLRQKDHEWGHFLALANGCLPGGRRTDAFIAERGGDVSVNEAGILATKLLSDLADFITFTLDENFSLIRYRAAADACFCSFSAVQKTLDGYIMENFYRPMLEEEWKKLENTGVANDRFLLGVTIPFPGCLSAALVCAESAKKHFGGAVSTIAGGGYVNTELRFLNSQEFSYCFDHISFDKGYASLVSILENNKIDAATEDSFVKTTFPDYSEVDFNRYLYPVDDANPMHRLWSDGHWLKAYLAHGCYWHSCAFCDVTLDYIKNFIPVDTSALFSHLKNQTEKTGVRGIHFCDEAAPVSSLLEFALLNREAGVPLNFWGNIRFEKSYDPDTAAILAAGGLLGVSAGLEVATEKGFKRLGKGIDLESAVSALAAFKEAGVLTHAYLIYGYWDEDEQELIDSAETLRQLFAEGLLDSAFWHKFILTRHSRIYAEKERGLHPLLKVKDDCPQNDKTFALNDLSFEGEERFDKYGEGLETLLAIWMSGETEAPVRFAFPFKVKAPSVPPDLVAVLLDKYARDRDKARAAKPMAEPKSGRVLFLGTIPRCEGHSLFWRWRLADRNLTAAGEAEAGRLAALLGATSKGRGMDAKEFYASIEQISGEDRARKIWKRLRESGLVVFNNLKDERR

SEQ ID NO: 62871 - DNA, 837 bp, Unknown
  Obtained from environmental sample
  misc_feature (1)..(837): n is a, c, g, or t
atggaagctttgctcgcccaaaaaaggcgtattcgcagcccggttggagccggaatgttttatcccgaagaaaggaaggaaatcctcgattatctgaggtcatttgacctggaagaagggcagggcggctgcgcgcaggctattattgctccccatggggcgtggagttactccggaacattggttgccaaggctttttcctcggcaatgggcagaagcggcagcattaaacgtgtggtcattctgggaccaatccatgataaaagggaaaaagggctgtttttatcgaattctcactcttttcatacccctattgggaatattcccgttgacagggaaatgtccgaagaactggaatttcacggtagtttctttgaaatcaatgatattccgcacctgggggaacactcaatagaaatcctcctgccctttgtaaaatactgctttcccgatgcgtcgattgtccctattttgatgggacaaccaaaagctcagtatatttacgatctcgcccagtccttaaaagccgtaattgcgcctgttttggacgaaacattgatagtagtttcctgcaatctttcctgtaataccgatcaaaaaacggcgcggctttccgcagaagaagttttgcgccttttctttgaaaaagattccgccgctctggcttccgctattttagagggacgcttgaacgcctgcggcggagcgctggcagccggtctttttgagagcggactgctggacgagacctgcacctgttctgtagccgacaaaatggtcagcgctgtaagcgcggaaaataacacagtcttttacagcgagctatcttatatataa

SEQ ID NO: 62872 - protein, 278 aa, Unknown
  Obtained from environmental sample
  DOMAIN (13)...(266): Protein of unknown function DUF52
  misc_feature (1)..(278): Xaa is any amino acid
MEALLAQKRRIRSPVGAGMFYPEERKEILDYLRSFDLEEGQGGCAQAIIAPHGAWSYSGTLVAKAFSSAMGRSGSIKRVVILGPIHDKREKGLFLSNSHSFHTPIGNIPVDREMSEELEFHGSFFEINDIPHLGEHSIEILLPFVKYCFPDASIVPILMGQPKAQYIYDLAQSLKAVIAPVLDETLIVVSCNLSCNTDQKTARLSAEEVLRLFFEKDSAALASAILEGRLNACGGALAAGLFESGLLDETCTCSVADKMVSAVSAENNTVFYSELSYI

SEQ ID NO: 62873 - DNA, 372 bp, Unknown
  Obtained from environmental sample
  misc_feature (1)..(372): n is a, c, g, or t
ttgggaattgagccgataatcttgaacgaactattaaacaggggacaaccgcttttagaaatattagaagagtactgtgacataaaagtggcggtaataatatttacaaatgaggatataagtaataataacagcgattccgaatatgaaaaaaaagcaagacaaaacatgatatttgaagcgggctactttcttggaaaacttggaaagaaaaatacggttgttatcgccgaagagggcgtaacgccgccttctgttttggaaggatatgcctattttacaatggacggggaagacaaatggaaagcggatatggccaagaaattaaaaagcatgaaaagatttagtattgatatgaacggtttgagttga

SEQ ID NO: 62874 - protein, 123 aa, Unknown
  Obtained from environmental sample
  misc_feature (1)..(123): Xaa is any amino acid
MGIEPIILNELLNRGQPLLEILEEYCDIKVAVIIFTNEDISNNNSDSEYEKKARQNMIFEAGYFLGKLGKKNTVVIAEEGVTPPSVLEGYAYFTMDGEDKWKADMAKKLKSMKRFSIDMNGLS

SEQ ID NO: 62875 - DNA, 1329 bp, Unknown
  Obtained from environmental sample
  misc_feature (1)..(1329): n is a, c, g, or t
atgaactttcaatactgggagccggaaattgagaagatgccacgcgctgagcttgccgcgttgcagttgcaaaaactgaaagaggaaatcggctttagtttgcgcacgccgttttataaaaaacgccttgccacagtgggcattcaaagtccggacgacatcaagaccctggatgacctaaagcgcgttccttttaccacaaaaaacgatctcagggacggcttcccttacggttttttaagcataccgagagaggaagtgataaggctgcacgcctcaagcggtacaaccggaacgccgaccacgatttattttaaccgcaacgacatcaaacactggacgaataacatggcccgctgtgtttacggaacgggctgtaacgaaagcgatgtgtttcagaacatgataacctacggtcttttcacggggggtcttggcctgcatcagggcggtgaagaagtagggatgcttgttataccggccggagcgggaaacaccgcccgccagtttagaatgatgcaggattacgggacgaccgtggttcacgcgacaccgagtttccttcttcaccttgaaacaaagatgaaagaggcgggagtttcacgggaaagcctcttcttaaaacgcgcttttgcgggagccgaaccttattccgaggatacgcggcggcgcattgaagccttattaaaaattgacgtatataattcttacggtctttcagaaatgaacggaccgggagtagcttttgaatgtcaatgtaaagacgggcttcatatctgggaagacggatacatcactgaaattgtaaatcctgacactcttgagcctgtcaaagagggagagattggagagcttgtccttacaatcctctgccgtgaagccacgcctattttacgttaccgcacaagggaccttacttctttttatactgtgccgtgcaagtgcggaagaacccaccgcagactccaccgcataacagggcgcagtgacgatatgcttatcattaacggggtaaacgttttcccaagccagattgaagaagtgattatggccatgaaggaagttggcaacaattaccttattgtcgtggaaaaagacggagctttggacaggctgaccgtaaagaccgaagtgagcgccgacactttcatggacgacacccgtcccttaaacgcgcttaaggaaaaaatcaaggataccctacaggcttcaatctcgattagtccaagggtggaactgcacgaaagcggcagtctgcctatttctgaggggaaagcggtaagggtgcaggatacaagaccgaaagacgtgtatgagtttttacgttaa

SEQ ID NO: 62876 - protein, 442 aa, Unknown
  Obtained from environmental sample
  DOMAIN (19)...(360): AMP-binding enzyme
  misc_feature (1)..(442): Xaa is any amino acid
MNFQYWEPEIEKMPRAELAALQLQKLKEEIGFSLRTPFYKKRLATVGIQSPDDIKTLDDLKRVPFTTKNDLRDGFPYGFLSIPREEVIRLHASSGTTGTPTTIYFNRNDIKHWTNNMARCVYGTGCNESDVFQNMITYGLFTGGLGLHQGGEEVGMLVIPAGAGNTARQFRMMQDYGTTVVHATPSFLLHLETKMKEAGVSRESLFLKRAFAGAEPYSEDTRRRIEALLKIDVYNSYGLSEMNGPGVAFECQCKDGLHIWEDGYITEIVNPDTLEPVKEGEIGELVLTILCREATPILRYRTRDLTSFYTVPCKCGRTHRRLHRITGRSDDMLIINGVNVFPSQIEEVIMAMKEVGNNYLIVVEKDGALDRLTVKTEVSADTFMDDTRPLNALKEKIKDTLQASISISPRVELHESGSLPISEGKAVRVQDTRPKDVYEFLR

SEQ ID NO: 62877 - DNA, 447 bp, Unknown
  Obtained from environmental sample
  misc_feature (1)..(447): n is a, c, g, or t
gtgatcgcgagagccagctctctaattcgtgtactgattgtggtgtttatcgttatttcttcgtttatcgggatcattcagtacaggggcggaatcagctttatcgcgcagttgatgggcgtttcctggggcgcgttggccggatcgttccttgcgcctttcgtgtacggactgtattggaagaaggtgagcaaactcgccgtttggtgcagttttattttcagtaccggccttttaacgctcaacattttctttagaagctcgtttcctgctcttttgcagtctccgatcaacgccggggccttcgccatgctcgccgggctaattattgtgcctttggtaagcgcgatcaccaaagcgccggataaagcctttgtggataattgcttttcctgctatgaggaaacggttacagtcaaggttcgcgacgatttgggtagcaactaa

SEQ ID NO: 62878 - protein, 148 aa, Unknown
  Obtained from environmental sample
  misc_feature (1)..(148): Xaa is any amino acid
MIARASSLIRVLIVVFIVISSFIGIIQYRGGISFIAQLMGVSWGALAGSFLAPFVYGLYWKKVSKLAVWCSFIFSTGLLTLNIFFRSSFPALLQSPINAGAFAMLAGLIIVPLVSAITKAPDKAFVDNCFSCYEETVTVKVRDDLGSN

SEQ ID NO: 62879 - DNA, 393 bp, Unknown
  Obtained from environmental sample
  misc_feature (1)..(393): n is a, c, g, or t
atgacaaacaggaaagttatgcttgataccaatgcggtactccgtttcatagctgatgacgataaggaaaaaggcgcaaaagttgcaaacctgataaataccgccgactgtattgtctcagtggaggtaattgccgaagcagtatataatttggaaaaatactatgatcatcctcggcagcttatcgctgaagtagtaaaagattttatcgggataaaggaaagttttgttttagaagaaaatgttattcgctatggctgtaatatatatgcttcaacaaggctggattttattgactgccttcttgtcgggtacgctaatgttaacggtaatcagatatttacttttgatgttgaattgaaaaagaagttagagcataaagcctatgcctaa

SEQ ID NO: 62880 - protein, 130 aa, Unknown
  Obtained from environmental sample
  DOMAIN (6)...(129): PIN domain
  misc_feature (1)..(130): Xaa is any amino acid
MTNRKVMLDTNAVLRFIADDDKEKGAKVANLINTADCIVSVEVIAEAVYNLEKYYDHPRQLIAEVVKDFIGIKESFVLEENVIRYGCNIYASTRLDFIDCLLVGYANVNGNQIFTFDVELKKKLEHKAYA

SEQ ID NO: 62881 - DNA, 765 bp, Unknown
  Obtained from environmental sample
  misc_feature (1)..(765): n is a, c, g, or t
ttggggcgcaaaggcgagaaaatcaaatttgttcggatagaacctcttgaaaatacaaaattccttcatgcggacgctgaaacagaagaaaccaaagaccatactgccagaaaaagggctgtaatatgtttcgccggagaaacccgcccccttgatacccgcatagtaaaccaggcgttatacgaagcccagcatatcatcccgcagccttcttacttgattttcgccgctttccagtttgaccctgccgccgcaaaagtaatcgatgaaaccaactggcccggcgtggtgctattgaaagtccagatgaaccccgatttaatgacaacagacctcaaaaagaaagtttctaccagtcaaagtttctggcttgtcggccagcccgatgtagaactaatacggattgaaaaaggcgcggataagggcaaatacaaagtcaaagtaaaaggctttgattattacgatataaagcagggcattgttaattcaggcaacgccgacagaatagcgatgtggatgctggacaccgattatgacggaatgtgcgttgaccccaaacaggtatttttcccgatggaaggctcaaacgaaggctggggcaaattggcaaaaacccttaaagcggaaatcaaccaggaccttatcgaaaaataccgaggcacagaatccctgccatttatcgtaaaagacaatacccttatcgccgtcaaaattgtagacgacaggggtattgagagtttgaaagtaattgtaattacaggttaa

SEQ ID NO: 62882 - protein, 254 aa, Unknown
  Obtained from environmental sample
  misc_feature (1)..(254): Xaa is any amino acid
MGRKGEKIKFVRIEPLENTKFLHADAETEETKDHTARKRAVICFAGETRPLDTRIVNQALYEAQHIIPQPSYLIFAAFQFDPAAAKVIDETNWPGVVLLKVQMNPDLMTTDLKKKVSTSQSFWLVGQPDVELIRIEKGADKGKYKVKVKGFDYYDIKQGIVNSGNADRIAMWMLDTDYDGMCVDPKQVFFPMEGSNEGWGKLAKTLKAEINQDLIEKYRGTESLPFIVKDNTLIAVKIVDDRGIESLKVIVITG

SEQ ID NO: 62883 - DNA, 810 bp, Unknown
  Obtained from environmental sample
  misc_feature (1)..(810): n is a, c, g, or t
atggctcgcgatgaaaaaacaggtgttaaatctttacctcttggttcaaaaattttccgttatgataatattgtgagtactcgaccagccggagaaggcgatgtcaaaaagtttgaatataatggtaaaacatttttccctggaactggtactttcaagacagacgaaaaaggtttaaatgtacttgctaaaaataatcgtcttggatattcggaaaacaaattaaattatatacgttattacgatgatttcccagttcagcaaataaataatatttggaccgatataggaggtactgtacaaagtcgttctgatccaaaagtttatgtagtacaaacaggagttcctgtcatccaacgttgtctccttatgaccaccgaccccggcgacttggtactcgacataacctgcggaagcggaaccaccgcctacgttgccgaacaatggggacgccgttgggtaacctgtgacacttcccgcattgccatcacccttgcaaaaaaacgcctaatgaccgcaacatttgattattacaaactggcgtaccctgaacagggagtatcaagcggctttgtgtataaaacagtcccacacatcacactcaaatccatagcgaataacgaaccgccggaacaggaaacgctctacgaccagccggaaatagaaaaaagaaaagtccgcatatcaggtccctttactgtggaagcccttcccgctccggttgtaaaaccgctcgatgatgatactcaccccgctccgtttttccatgaaaacgccgctaaaaaacaatccgactggatgcaggaataa

SEQ ID NO: 62884 - protein, 269 aa, Unknown
  Obtained from environmental sample
  DOMAIN (21)...(168): DNA methylase
  misc_feature (1)..(269): Xaa is any amino acid
MARDEKTGVKSLPLGSKIFRYDNIVSTRPAGEGDVKKFEYNGKTFFPGTGTFKTDEKGLNVLAKNNRLGYSENKLNYIRYYDDFPVQQINNIWTDIGGTVQSRSDPKVYVVQTGVPVIQRCLLMTTDPGDLVLDITCGSGTTAYVAEQWGRRWVTCDTSRIAITLAKKRLMTATFDYYKLAYPEQGVSSGFVYKTVPHITLKSIANNEPPEQETLYDQPEIEKRKVRISGPFTVEALPAPVVKPLDDDTHPAPFFHENAAKKQSDWMQE

SEQ ID NO: 62885 - DNA, 1470 bp, Unknown
  Obtained from environmental sample
  misc_feature (1)..(1470): n is a, c, g, or t
gtgatctttgtacctttgtgttctttgtgtgacctcttcttttatatttactccaataaacaaaaattgtataataaattgatgaaaacagataaagtcctgaaaatagaacgacacggttatgactttattcccgccgaatatttgcctaagggaacggatgaatactggctaaggaacgcgcagcaggcggaattgttttccaaaaaagaagacagttggcgaaaactgaaacccgcagaaattgaaatactgattcaaaacaaaaatacttgcgcaaaatgggacgactttcttgtaaccgatccttttgatccttcgctgatccgcgattcaaatttttacggtcttgtgcgcataggcgctttgcaaaatgttcttcttaaacaccatgacttttgtattccggcggggattcgttacagtacaattgtttcctgcgacatcggcgataattcagctattcaggaatgcgcttatatttgcaattacataatcgggaacaactgtatactttcaagagttgatgaattgcagacaaccaaccacgcaaagttcggcaacggcgtgataaaggacggcgaagccgaagatgtgcgcgtctggatcgatgtgatgaacgaagcgggcggacgttccattctgccgttcgacaaaatgatcgccgcggacgcctatctttgggcggcataccgcgatgataccgcgttaaccgctaaactggcggagattacgcaaaaacagtacggcggcttacggggcagttacggagttatcggttcaaacgcggtgattaaaagttgtttaattataaaagatacggcggtgggggagagcgcttacattaagggagcgaacaaacttaaaaatattacgatacagtcttccgccgaagagcctacgcagataggcgaaggcgtggaaatggtgaacggcattgtcggttacgcctgcaatgctttttacggttctaaggctgtgcgttttgtcatgggaagaaacagtaacttaaagtacggggcaaggttgatacactcggtactgggagacaattctactgtgtcatgctgcgagatacttaacaatttgattttccctgtacatgaacagcaccacaacaattcatttttaatcgccagccttgtcgaaggaatgtcgaatatggcggcggcggcgacaatcggcagtaaccacaacagccgcgccaatgacggagagataagggctaaacgcggtttttggcccggacttgccgtcagtcttaaacactcatgtgtcttcgcttcctttgtgattatcgccaagggcgaatatccgtcagaagtaaatattccgcttccattttcgcttgtaaacaacaacacgcacagaaaccgtcttgaggtatgcccgcttatttttggatacacaacctctatgctcttgagcgcaattcatggaaagccaaaaaccgcgacaagagaaaaataa

SEQ ID NO: 62886 - protein, 489 aa, Unknown
  Obtained from environmental sample
  misc_feature (1)..(489): Xaa is any amino acid
MIFVPLCSLCDLFFYIYSNKQKLYNKLMKTDKVLKIERHGYDFIPAEYLPKGTDEYWLRNAQQAELFSKKEDSWRKLKPAEIEILIQNKNTCAKWDDFLVTDPFDPSLIRDSNFYGLVRIGALQNVLLKHHDFCIPAGIRYSTIVSCDIGDNSAIQECAYICNYIIGNNCILSRVDELQTTNHAKFGNGVIKDGEAEDVRVWIDVMNEAGGRSILPFDKMIAADAYLWAAYRDDTALTAKLAEITQKQYGGLRGSYGVIGSNAVIKSCLIIKDTAVGESAYIKGANKLKNITIQSSAEEPTQIGEGVEMVNGIVGYACNAFYGSKAVRFVMGRNSNLKYGARLIHSVLGDNSTVSCCEILNNLIFPVHEQHHNNSFLIASLVEGMSNMAAAATIGSNHNSRANDGEIRAKRGFWPGLAVSLKHSCVFASFVIIAKGEYPSEVNIPLPFSLVNNNTHRNRLEVCPLIFGYTTSMLLSAIHGKPKTATREK

SEQ ID NO: 62887 - DNA, 861 bp, Unknown
  Obtained from environmental sample
  misc_feature (1)..(861): n is a, c, g, or t
atgcccgcttatttttggatacacaacctctatgctcttgagcgcaattcatggaaagccaaaaaccgcgacaagagaaaaataaaaatccaacgcattgaaaccgactaccttgcgcccgacaccgcggaagaaatcatcgccgccctgtcgctcctcggcggcttgttaggtgaagccggtttctcgcctatggacttggcgggcgaggacggaattgaagtgcgtcaaattcactgccgccaccttgaacacagcaagagagatcagatagtcataaagccgctggaagcgattgccgcttaccgccaaatgcttcgctattacgcggtaaaaactatcgcggcgtttttggattcgcggaaagatttggattttaatggcttaagtaaattgcttggcgatacttctcgtgtcaaagagtgggttaactcaggcgggcagattgttcccgctttccgcgtggacgctctccgtaaggaaataggcggcggcaagtataaaaattgggacgagattcacaaggtgtacgattcttgggacgaagaatatccgctggataaatgccgccacgcgtgggcggttctcgcgtttcttaatggaacaaacaaagctcctgacgcgtccttgttaaaaaaagagtttgccgaagttttggagatacgccattggatagaaaaacaaatttttgagagcagggcgaaggactaccgtaaccattttaaaaaagccacattccgtaatcacgcggaaatggaacaggtgcttggaaaaccggaagaatatccttttattcgtcttgtaaaagaagaaggtaacagttttaaagagatgataaacagagcaagcgcaaagttgtga

SEQ ID NO: 62888 - protein, 286 aa, Unknown
  Obtained from environmental sample
  misc_feature (1)..(286): Xaa is any amino acid
MPAYFWIHNLYALERNSWKAKNRDKRKIKIQRIETDYLAPDTAEEIIAALSLLGGLLGEAGFSPMDLAGEDGIEVRQIHCRHLEHSKRDQIVIKPLEAIAAYRQMLRYYAVKTIAAFLDSRKDLDFNGLSKLLGDTSRVKEWVNSGGQIVPAFRVDALRKEIGGGKYKNWDEIHKVYDSWDEEYPLDKCRHAWAVLAFLNGTNKAPDASLLKKEFAEVLEIRHWIEKQIFESRAKDYRNHFKKATFRNHAEMEQVLGKPEEYPFIRLVKEEGNSFKEMINRASAKL

SEQ ID NO: 62889 - DNA, 1197 bp, Unknown
  Obtained from environmental sample
  misc_feature (1)..(1197): n is a, c, g, or t
atgagcgaaaaagtcactcaaaataccgatgttataacactgataacaagcaatctcagaaagtattcaatgttcatcatgcttgccgtaatcatgataatattcataccgttgacggacgcgactaacttgaacgaacggaatattaccaacctcttttttcaatacagttatgttcttattcttgctgtcggtatggtaatggttatcatcgtacaaggcatcgatctttccgtcggttctgtctgcgcctttgtaggagctttaagcgcaatggtctacaatacaggggcgggaacatttgtaacattaatttcggcgcttttgatgggcggtattatcggggcgtatcaaggattttggacagcttacggaaatataccctcgtttattgttactctttcaggaatgcagttattccgaggacttacctatcttgttacaaaagttactcctatcggtcttcgcaatgacggttactcgcttcttgccaccggctctcttgatgaaatattgaaacttcaaaaaatcggtccctattatcccgcatcgatagtagtcgcaattatattacttacaattttatttgtttccgaattttacgcgcgaaataaaagaattaaaaatgagtttgaagtttccgggttgtcggttttcataaccaagcttgttttggtcagccttttaatacttgggcttgcggagcgttttgcccgctaccgagggcttcccgttgtcgctttaattttaggcattactatatttgtgtttcattttattttgaacaatacggttttagggcgctatatatatgcggtcggcggcaacccccgttcggcgaaactttcgggtatcaattcggaatttgtaacttttatcgtctttgttttcatgggcgtattgacgggtcttgccgctgttgtgagtacaggttacatgaacagtgccctgccccaagccggtttgaattttgaattagacgctattgccgcttgttacatcggcggtgtctctgcgggcggcggcattggttctgtaatcggcgttattgtcggcggctttgtaatgggttcgattaacaacggtatgtttttgatgagcttgggtactcattatcaatatgtcgtaagggcgttaatacttctctttgcggtattcttcgacgtttacacccgcaaaaaagccggattaagctga

SEQ ID NO: 62890 - protein, 398 aa, Unknown
  Obtained from environmental sample
  DOMAIN (48)...(385): Branched-chain amino acid transport system / permease component
  misc_feature (1)..(398): Xaa is any amino acid
MSEKVTQNTDVITLITSNLRKYSMFIMLAVIMIIFIPLTDATNLNERNITNLFFQYSYVLILAVGMVMVIIVQGIDLSVGSVCAFVGALSAMVYNTGAGTFVTLISALLMGGIIGAYQGFWTAYGNIPSFIVTLSGMQLFRGLTYLVTKVTPIGLRNDGYSLLATGSLDEILKLQKIGPYYPASIVVAIILLTILFVSEFYARNKRIKNEFEVSGLSVFITKLVLVSLLILGLAERFARYRGLPVVALILGITIFVFHFILNNTVLGRYIYAVGGNPRSAKLSGINSEFVTFIVFVFMGVLTGLAAVVSTGYMNSALPQAGLNFELDAIAACYIGGVSAGGGIGSVIGVIVGGFVMGSINNGMFLMSLGTHYQYVVRALILLFAVFFDVYTRKKAGLS

SEQ ID NO: 62891 - DNA, 342 bp, Unknown
  Obtained from environmental sample
  misc_feature (1)..(342): n is a, c, g, or t
ttgaatataagaacaccgtcgataaatcagcttgtaagaaatctgtccggcggcaaccagcagaaagtggttgtaagcaaatccttgtttgctaacccgaatattcttatagttgacgaaccgacaagaggtattgatgtcggcgctaaaaccgaaatttacggaatactgaataacatgattgccgacgggaagagtgtaataatggttacctcggaattacccgaggcgcttggaatggcggacagaatttatgttatgaacgagggagtaataaaaggggagttgccaaaagaaggggcgactcaggaaaaaataatgcacatggctttggttggataa

SEQ ID NO: 62892 - protein, 113 aa, Unknown
  Obtained from environmental sample
  DOMAIN (1)...(90): ABC transporter
  misc_feature (1)..(113): Xaa is any amino acid
MNIRTPSINQLVRNLSGGNQQKVVVSKSLFANPNILIVDEPTRGIDVGAKTEIYGILNNMIADGKSVIMVTSELPEALGMADRIYVMNEGVIKGELPKEGATQEKIMHMALVG

SEQ ID NO: 62893 - DNA, 1038 bp, Unknown
  Obtained from environmental sample
  misc_feature (1)..(1038): n is a, c, g, or t
gtgctcgcgatggtttcttatccctggtatgatccgaatatttttacggacgggctcagctcaggttataaggcgcttgcggaagatcccaacaaacctttcctgaaccgcgcaattcagtcaagctacgcgccgggttctacttttaagatcgttataagcacaggcatttattcggaaaaatcatttccgcccgaacagactattctttgtcagggagttcttaatttcggaaaccgcgactggctgtgccatgtaaaaagaccgggacacggcagattaaatcttcataacgcgcttgcgcagtcatgcaacatatattatatgaccgcgggcagagatcatcttggacccgaaagaatcgcgtcttacgcgaaagaatacggttacggcgaaataacggaaattgatcttcccggcgaaatagcgggttttattccgactccgcagtggaaggaacggcgtttccacgaaagatgggttcaaggcgacacgatgaacatgtcaataggacagggatttactttgcttaccccgatacaaatgacgaatatgatatgcatgattgtaaacgacggaaaagtttataaaccgcatatattaaaagaagtgcgcgatccggcgacgggggcggtagaaagaagcataaggccggagttgctgcacgaaagcagtttgtcgcctgaaatttttgaaatggtacgacgtgatatgagaaacgtaatcacaaacggaacggcgcaatatcctttaaatattaaatcggtgcagatcgccggaaaaaccggaaccgcggaagttggttttatcgatcgctggcattcatggtttacggcttttgcgccttatgataacaggaacgacgaaaacgctattgcgcttacagtaattgtggaagccgcgaataaatgggaatggtgggcgccttacgcgtcggcgttaattttccagggatattttaataatcagacttatgaagaagcgatacgttctctcagattccagtacttaataccgatacaggagcgcagggaatga

SEQ ID NO: 62894 - protein, 345 aa, Unknown
  Obtained from environmental sample
  DOMAIN (2)...(316): Penicillin binding protein transpeptidase domain
  misc_feature (1)..(345): Xaa is any amino acid
MLAMVSYPWYDPNIFTDGLSSGYKALAEDPNKPFLNRAIQSSYAPGSTFKIVISTGIYSEKSFPPEQTILCQGVLNFGNRDWLCHVKRPGHGRLNLHNALAQSCNIYYMTAGRDHLGPERIASYAKEYGYGEITEIDLPGEIAGFIPTPQWKERRFHERWVQGDTMNMSIGQGFTLLTPIQMTNMICMIVNDGKVYKPHILKEVRDPATGAVERSIRPELLHESSLSPEIFEMVRRDMRNVITNGTAQYPLNIKSVQIAGKTGTAEVGFIDRWHSWFTAFAPYDNRNDENAIALTVIVEAANKWEWWAPYASALIFQGYFNNQTYEEAIRSLRFQYLIPIQERRE

SEQ ID NO: 62895 - DNA, 975 bp, Unknown
  Obtained from environmental sample
  misc_feature (1)..(975): n is a, c, g, or t
ttgttaaatttccgttattattcttcttgcgcgtttccttgccgatacggacagaaacaaagacgcngttctcccngttttttaatttcctgtgttattgtttttattccaatgcttattgttataatgcagccggatctgggaacggcgcttgtttatattgcaatccttataacaatgacttttatggcgggcgtcgccatgcgttatgtgtcatttatgatattaagcatagcgttaacgggcatttttttggttcttcccctttggcagtcttatatacaaaaaaaatccattccccttcttgcgctgcttacaaatcctaaaatattgttaattgtttttatttttatgtttttaatcgcggcaatttccctttttggctatataaaatataaaagaaattatttttactggattgtttacgcgtcggcgataattgttttttctctgggcgcatcctacgcggggcggattatattaaaagaatatcagattatgcgcctgattgtttttatcgatccgaatattgatccgcgtggggccggatggaacataatacaatccgtaacggcgataggcgcgggggggcttacgggcaggggatacctgcaggggactcaaagccattaccgttttttgccagaacaaagcaccgactttattttttctattttttcggaagaagccggatttataggcggtgtagtcgtttttcttctattccttttaataatcatacgccttttaacaacaatgaaaataacgactgatcctttcgcaaaatatatctgcgccggccttgccggaatgtttggtttccattttatgatcaacgtcggtatgacaatgggaattatgcccataacgggaattccattgatatttatgtcatacggcggctccgcggtcttctcgggaatgattggaatagggattgttttaagtatttatatcagaaggcacaaccgttga

SEQ ID NO: 62896 - protein, 324 aa, Unknown
  Obtained from environmental sample
  DOMAIN (21)...(323): Cell cycle protein
  misc_feature (1)..(324): Xaa is any amino acid
MLNFRYYSSCAFPCRYGQKQRRXSPXFLISCVIVFIPMLIVIMQPDLGTALVYIAILITMTFMAGVAMRYVSFMILSIALTGIFLVLPLWQSYIQKKSIPLLALLTNPKILLIVFIFMFLIAAISLFGYIKYKRNYFYWIVYASAIIVFSLGASYAGRIILKEYQIMRLIVFIDPNIDPRGAGWNIIQSVTAIGAGGLTGRGYLQGTQSHYRFLPEQSTDFIFSIFSEEAGFIGGVVVFLLFLLIIIRLLTTMKITTDPFAKYICAGLAGMFGFHFMINVGMTMGIMPITGIPLIFMSYGGSAVFSGMIGIGIVLSIYIRRHNR

SEQ ID NO: 62897 - DNA, 912 bp, Unknown
  Obtained from environmental sample
  misc_feature (1)..(912): n is a, c, g, or t
ttgatgcgggacaggtttatcgatactgccggggaactgggcgcaaaacttttaactgttgacaaacccgcacggtacacgggcggcgaatacggaatcaagtcaaaaaaggaagcgtctttaaaaacgcttatcgcatttcccgatctttatgaaataggcatgggaaatcaggcgttaaaaattatttataaccgaatgaacggcatacaaggcgttttctgcgaccgcgctttcgcccccgcacccgactttgaaaaattgttacgcgaaatgaatattccgctctacggtcttgatacgggcatcgccctttacagccttgacctccttatgtttaccgtaggctacgaattgggtcttggcggccttcttttaatgttagatacgtcttttattcccctgcgctgtgaagagagaacggaagatcaccccgttgtattagccgggggaccggccgtttccaacacggccgctttttccccgtttgtagacgcgttctggataggggaggcagaagccggtttttttgaacttgcttccgagctggcaaagatgaaagagagcgggaagggcaggggagaacttttggaaaaaatttccgcgcatccgaatatttatgtaaaaggaaaaaaaaagacgttacgcgccattgactctgacttttgtaacgatgatgaggcggcagccgtgtttccggttccaagcatgaaaatcattcagcatcacggcagcgtggaaattatgcggggctgtcctaacggctgccgcttttgccacgccggttactggtacaggcccatgcgccagaaaaataccgagcttgtagaaaagcaggttaacgaaatgataacaaaaggcggctggcatgaaataagccttcttcccttcctcggccgatctgatcattga

SEQ ID NO: 62898 - protein, 303 aa, Unknown
  Obtained from environmental sample
  misc_feature (1)..(303): Xaa is any amino acid
MMRDRFIDTAGELGAKLLTVDKPARYTGGEYGIKSKKEASLKTLIAFPDLYEIGMGNQALKIIYNRMNGIQGVFCDRAFAPAPDFEKLLREMNIPLYGLDTGIALYSLDLLMFTVGYELGLGGLLLMLDTSFIPLRCEERTEDHPVVLAGGPAVSNTAAFSPFVDAFWIGEAEAGFFELASELAKMKESGKGRGELLEKISAHPNIYVKGKKKTLRAIDSDFCNDDEAAAVFPVPSMKIIQHHGSVEIMRGCPNGCRFCHAGYWYRPMRQKNTELVEKQVNEMITKGGWHEISLLPFLGRSDH

SEQ ID NO: 62899 - DNA, 693 bp, Unknown
  Obtained from environmental sample
  misc_feature (1)..(693): n is a, c, g, or t
atgttaacgagaaataacggcatattaattcctagcgacgctgaaagagtaaactttcgtgaaatccgcatggggaatattgcgcctaacacattataccgcagcagccatccaataaaagacaacgaagaagaaaaaattatttcgctgttggcggcgcaaaataagattaaaacaataataaatttgagcgacacaatcagcgaaattaagttaaagtcgatttttgcgccttggtacgataaactgcttaaaaataaccgtgtagcctcccttggtatggacttaaataataacagtgaaagtttcagtaaaaaattaaagaaaggcttacaatttattattaataccgaaggaccttggctgattcattgccacgccggagtagaccgcaccggttttgtttctatagtgctggaaacgcttatgggagcgaagttagccgatattatcgacgattaccttaaatcatttaacagtatgtttgattncagcatttacggcaatctaaacaaagaagatgtgcttcagcttatatccgctatgggtaattatatgcccgtgaacgatcaaaatttgcagtctatagcggaatattatctgataaaaacaataaaaatgtccaacatagagattgggcttcttaaaagcaaattatcaggaaaaaaattgaacactcttttgcctacttga

SEQ ID NO: 62900 - protein, 230 aa, Unknown
  Obtained from environmental sample
  DOMAIN (21)...(181): Tyrosine phosphatase family
  misc_feature (1)..(230): Xaa is any amino acid
MLTRNNGILIPSDAERVNFREIRMGNIAPNTLYRSSHPIKDNEEEKIISLLAAQNKIKTIINLSDTISEIKLKSIFAPWYDKLLKNNRVASLGMDLNNNSESFSKKLKKGLQFIINTEGPWLIHCHAGVDRTGFVSIVLETLMGAKLADIIDDYLKSFNSMFDXSIYGNLNKEDVLQLISAMGNYMPVNDQNLQSIAEYYLIKTIKMSNIEIGLLKSKLSGKKLNTLLPT

SEQ ID NO: 62901 - DNA, 1992 bp, Unknown
  Obtained from environmental sample
  misc_feature (1)..(1992): n is a, c, g, or t
gtgaacatttttacgaaattacgagatagtttgtttccaagccggagagaaaagataaccttgtctttcaaggaatcgttttcgctgataaaaatttacgcgtttagcaaaataaagccgcagttaaaggcggtgttgatggtaagcgtctttctggcggctgttcagtattttgtgctggatacgccgattaaaaacgcgctttccatagctgtttgcgtagcggcggcgattttagggctgtcttttttccttgaagggctttttttggggattatgccccttggtgaacaatgcggaatgaggctgccctcaaaaattggcgcggccggggttaccgttttctcaattattgtcggaataaccgcgacgctggcggaacctgccgtcgcagtccttcaacagcagggcagcgtaatcccggcgtggaacgctcctcttttgtacctacttctgaaccggggcacgtcgtggctggtagccgccattgcagtaggagtgggaatttccgtggtgttgggcgtgtaccgctttatgttcggctgggctttcaagccgccggtttttatcattattcccgttattattgccgtaagctgtatatttgacgaaaatcctattctgcgtccccttgtaaatcttgcgtgggatacgggaggcgcggctacaggcgcggttacagtgccgattattctcgctcttggtttgggcgtggcgaaaatcgggggcaaaaattccgacacatcagggcttgggcttgtaactcttgcctccgccctgcctgtggcaagcgtccttcttcttgccgccgtgctgggtcccaaagtaccgtccccttgtgacgcggcggctttcttttccgcaaatcctgatcaaagggagaaggcggtttatgtcgcggggggaagagacgaactgtataatatggcggaaaaggccgtctacgcaggcgatctttcggttgaagaattcgcgtattgttttcccgaacagcgattaggtgaagataataaggttgaaacgctgtcggtatttgcccctcaagctttcattggatacgccaaatccgctcttttttctgtactgcctctcgcgttagtgctgatcatcgctattggtttatttgcccgcgatagaatctttaacgccgatattgtcgtactcggcattttttttgccgcccttggcatgttcgcgcttaatctgggaatgacgggcggcattacagtcttaagttcagacgcgggaagttcccttaagcggacttatacggaaacgctctatgaaaacagaaccgtaatattaaagggtgtcgattcaaattcgcttattacggttccgggagaattcgggccggatacctatatctgggttcagggtaaagacgggccgacactggaaaaatttgttccccaaaggcttataggcgacttatatacccatattcctataaaagacgctatgtcctcaaaatttggaatgataggcgcttatgttgtaatacttgtcattgttttctttttgggattcttcgccatcttcgcggaacccgggctggcggttacagccgttacggtagaggagatgaccacaggtacttttaagcgttccaaattgataaaaatcgcggctatgggcgtaggcgggggcatggtgattggtttcgcccgggtattgttcagcaatatgcttccttcaggcggtatacatctttcgtggattctggctccttgttatctccttgccctgatcctgacaatattcgcgccggaagatttttcctctatagcgtgggatgtcgccggcatagcgacaggccccatcaccgttccaatcattataacttcaggacttggactaggacgcgattcattaagggctgacggcgctttcggcattgtggcgacggccagcgtatttccgattatcgtaatattaatatcgggcattgttgataaagcgagatcaaagcgcgtgttaagcaggatgtag

SEQ ID NO: 62902 - protein, 663 aa, Unknown
  Obtained from environmental sample
  DOMAIN (465)...(653): Protein of unknown function (DUF1538)
  misc_feature (1)..(663): Xaa is any amino acid
MNIFTKLRDSLFPSRREKITLSFKESFSLIKIYAFSKIKPQLKAVLMVSVFLAAVQYFVLDTPIKNALSIAVCVAAAILGLSFFLEGLFLGIMPLGEQCGMRLPSKIGAAGVTVFSIIVGITATLAEPAVAVLQQQGSVIPAWNAPLLYLLLNRGTSWLVAAIAVGVGISVVLGVYRFMFGWAFKPPVFIIIPVIIAVSCIFDENPILRPLVNLAWDTGGAATGAVTVPIILALGLGVAKIGGKNSDTSGLGLVTLASALPVASVLLLAAVLGPKVPSPCDAAAFFSANPDQREKAVYVAGGRDELYNMAEKAVYAGDLSVEEFAYCFPEQRLGEDNKVETLSVFAPQAFIGYAKSALFSVLPLALVLIIAIGLFARDRIFNADIVVLGIFFAALGMFALNLGMTGGITVLSSDAGSSLKRTYTETLYENRTVILKGVDSNSLITVPGEFGPDTYIWVQGKDGPTLEKFVPQRLIGDLYTHIPIKDAMSSKFGMIGAYVVILVIVFFLGFFAIFAEPGLAVTAVTVEEMTTGTFKRSKLIKIAAMGVGGGMVIGFARVLFSNMLPSGGIHLSWILAPCYLLALILTIFAPEDFSSIAWDVAGIATGPITVPIIITSGLGLGRDSLRADGAFGIVATASVFPIIVILISGIVDKARSKRVLSRM

SEQ ID NO: 62903 - DNA, 2007 bp, Unknown
  Obtained from environmental sample
  misc_feature (1)..(2007): n is a, c, g, or t
gtgctgggcataggaatgttagtcgataactccatcgtcatactggaaaatatctaccactaccgcgagaaaggggcaaagcttagaaccgcgtcgatcatcggcaccggcgagatggttgtcgccattaccgcgtcaacgctgacaaccctctgtgtattcctgcccctggttatgttcaagggccttctggaaatgcccggtgaactctttgccggccttgcctttactgttgtaatatcattggctatctcgctgtttacggcgattttcctggtgcctgtattgtcaagccactatctaccgctggttacgcgaaagcaacaaccgcttaaaggcagtctggcggaaattgacgcaaaattcgagcgcttttttgcctggcttgacgaaaaataccgccgggcggtggacagggtcctcaggcacaagttaattgttatcatagtgatgctggtaatatttgtcggcagcattgttcttatccccataatcggctgggaattcatgccccagcaggaagatgacaacgtacggatcacggcaacccttccggtgggaactcccctgcaggaaacagaggctgttctgaaacagttccagttgatcgttgaaagagaagtcaaaaattatgacagactggttataaacgccggcggcggcggcatgatgggtatgggcggcagcagcagcaattcaggttccatcaggatcaacctgcccaagttcaaggacaggattgaaagcgccaatgaaataaaagacattttacgaccctactttaacgatttccccggcgtcgcattcagttttggcggcggtttcggcggcggtatgatgggcggcggcggcgcgatagatattaccctccgtaccgacgatctggtgaaaggcaaggcccttggtgaaaagatcgccgaactgctcaaaaagaatatctccgatctcaccgaaccgcaggttgatctaagggacggcctcccccagattgacatcaagctggatcgcgaaaaaatgtacgcactgggcctgaatgcgtataccgtgggcaacgagatcaaggcggcggtagacggcattaccgcgacgcggtataaaagcaccggaaaagattatgatgtcattctaatccttgccgaagccgaccgaaatacaaggcccgctctaagcaatatttttgtcaacagccagatggcaggcagggttcccctttccagttttgtggaataccaggaaggaaccggccccctcacaatcagccgcgaaaaccaaagccgtatcatccatgtcagcgcgggagccaggccgggggcaaagataaacaccctgcattcgcgggtagatgagcttatcaagcgggagatccccattgaagacgacgttatcatcgaggtaggcggcgacaacgcccagatgataaagatgttcacacggttcattttaatctgcgttgtggcggttttccttgtgttcggcgttatggcgtccctatttgaatcgttccgcgatccgttcatcatcatctttacgataccgctttcgctaatcggcattgtgtcaatttatctgatcacccacacgatcttcaacgtgctgaccgcggtgggactgctggttctgttaggtgtaatcgtaaacaacggcatcgtgctggtggactacaccaacctgctgcgcaaacggggttattccctgcacgacgcctgtgttgaagccgccggcaaccgcctgcgcccgattttaatgacgacgcttacaacaatcctgggcctgttgcctatggcgttctttcccggcgaaggttcggaacttgtagcgccgattgggaaaaccgttttcggcggactttccttcggcactcttatgaccttattccttatgccaaccgtgtacgcgcttataaacaaacgctccgatgaccgcgcggcaagagcaaaagcgcgccgtgaaagaatagcctcgggacagagccgcaaaaatacaaataatgtggaggaacaaaaatga

SEQ ID NO: 62904 - protein, 668 aa, Unknown
  Obtained from environmental sample
  DOMAIN (457)...(637): Protein export membrane protein
  misc_feature (1)..(668): Xaa is any amino acid
MLGIGMLVDNSIVILENIYHYREKGAKLRTASIIGTGEMVVAITASTLTTLCVFLPLVMFKGLLEMPGELFAGLAFTVVISLAISLFTAIFLVPVLSSHYLPLVTRKQQPLKGSLAEIDAKFERFFAWLDEKYRRAVDRVLRHKLIVIIVMLVIFVGSIVLIPIIGWEFMPQQEDDNVRITATLPVGTPLQETEAVLKQFQLIVEREVKNYDRLVINAGGGGMMGMGGSSSNSGSIRINLPKFKDRIESANEIKDILRPYFNDFPGVAFSFGGGFGGGMMGGGGAIDITLRTDDLVKGKALGEKIAELLKKNISDLTEPQVDLRDGLPQIDIKLDREKMYALGLNAYTVGNEIKAAVDGITATRYKSTGKDYDVILILAEADRNTRPALSNIFVNSQMAGRVPLSSFVEYQEGTGPLTISRENQSRIIHVSAGARPGAKINTLHSRVDELIKREIPIEDDVIIEVGGDNAQMIKMFTRFILICVVAVFLVFGVMASLFESFRDPFIIIFTIPLSLIGIVSIYLITHTIFNVLTAVGLLVLLGVIVNNGIVLVDYTNLLRKRGYSLHDACVEAAGNRLRPILMTTLTTILGLLPMAFFPGEGSELVAPIGKTVFGGLSFGTLMTLFLMPTVYALINKRSDDRAARAKARRERIASGQSRKNTNNVEEQK

SEQ ID NO: 62905 - DNA, 771 bp, Unknown
  Obtained from environmental sample
  misc_feature (1)..(771): n is a, c, g, or t
atggatattcacgccggacgcagcaaggacggcattaattggaaaatagaagacaaacctctccaatttatcaagaccgatccggacttacctgattccgattataaatatgatccccgtgttgtttttattgaagatcgctattatataatttggtgtaacggttattgcggaccatgtcttggaatggcttatacatacgattttgagaaattttaccaaatggaaaaccctatgataccttacaacaggaatggggcgttgtttccgcgcaagattggaaaaaattatgccatgttcagccgtccaagcgattccggacatactccgttcggtgatatatggtattcggagagtcctgactttgttttttggggaaaacaccgccatgtaatgggtccgaacagcggctggcagagtacaaagataggcgcagggccgtgccctattgaaactaccgaaggctggctgcttttctatcacggcgtactgacaagctgcaacggttttgtctactctttcagcgccgccctgctggatattgataaaccatggaaagtgattgcgcgtcctaacccctacattataaatcctagggaaatatatgaattagcaggcgatgttcctaacgtaacatttccggtagcgtctcttgtagataaagacacgggaagggtagcgatttattatggctgcgcggataccgtaacaggtcttgttttcggcaaagttgatgaaattgttgcatgggtcaaagagaacaaaatgtaa

SEQ ID NO: 62906 - protein, 256 aa, Unknown
  Obtained from environmental sample
  DOMAIN (1)...(253): Domain of unknown function (DUF377)
  misc_feature (1)..(256): Xaa is any amino acid
MDIHAGRSKDGINWKIEDKPLQFIKTDPDLPDSDYKYDPRVVFIEDRYYIIWCNGYCGPCLGMAYTYDFEKFYQMENPMIPYNRNGALFPRKIGKNYAMFSRPSDSGHTPFGDIWYSESPDFVFWGKHRHVMGPNSGWQSTKIGAGPCPIETTEGWLLFYHGVLTSCNGFVYSFSAALLDIDKPWKVIARPNPYIINPREIYELAGDVPNVTFPVASLVDKDTGRVAIYYGCADTVTGLVFGKVDEIVAWVKENKM

SEQ ID NO: 62907 - DNA, 1758 bp, Unknown
  Obtained from environmental sample
  misc_feature (1)..(1758): n is a, c, g, or t
gtggacggcgagcttattgtcaaccccacttatgagcagattgaaaaatccactctggaaattgtggtcgccggcactaaagacggcatcactatggttgaaggcggcgcgaaagaggtaagcgaagaattgatgatcgaagcgctggaaaaagcgcataagatgatcatcgaattctgtatcttacaggaaaaattaagagaacttaccggaaagcaaaaacttccgcttaacgttcccgattattcgctggagaacaaggacgctatccgcgccgcggcttatcctaaactggaaaccgcatgtttccttcccggaaaacaggaaaggcacgacgctatcaaagctgtaaaagcagaatttgaaaccgcgcacacggcgcagcttgaagacgaaaaacagaaaaaacttttcaacgtgttattcgaggaaatgcagtacgaaatactgcgctcttcaatattaaacaaaggcaaaagggtagacgggcgcgggcttgaagacatccgcaatatcacctgcgaaataggcattttacagcggacgcacggttcggctctttttacgcgcggtgaaactcaggcgctggttgttacaacccttggaacggtttttgacgagcaaatttacgacgacatagaaggcgacaagcgggagcatttcatccttcattataactttccgcctttttcggtcggggaagtaggacgcatgggcacaggccgccgcgaaattgggcacggaaacctggcgcgccgttccctggaagccatgattccgccgaaagaggtttttccctacacggtacgggttgtctctgaaattatggaatccaacggttcttcttccatggcatcggtctgcggcgggaccctttcaatgctgcacgccggagtacccatgaaaaagccggtggcaggcattgctatggggttaataaccgaaagcaacgcccagggagcccgctatgccattctctccgatatcctgggcgaggaagaccaccttggggacatggattttaaagtcgccggtaccgaagacggaataaccggctttcagatggatattaagatcgccggcgtaaatcctgaaattatgcggaacgcgcttgaccaggcaaaacgcggacgcctgcacatcctttccattatgaataaaacaataagcaagcctttggatgaaatcagcgaatatgccccaaagattgtaaccctgcgtattgacaccgataaaattggagctttaattggccccggcggaaaaaatataaaggcgctttgcgaacagtacagcgtaaagatcaacactgaggatgacggaaccgttactatatttggaaagagttccatagacgcggaagacgcanaagcggcagtactgggtattgtcctggatcctgaggtaggtaaaatctacgaaggtactgtaaaacggattatggatttcggcgcctttgtggagattctacccggcagggaggggctggttcatatcagcaaactttcccgccagcgcatagccaatgtcaccgacgtgctgaaggaagggcaggagattcccgtcaagcttaccgagattgacaaaatgggcaggcttaacctttcgtatattgacgccatcgacccggatggagccgactcgggtggttccaacagcggctctcatggatcaggcggtcatagcggcggtcattcggaaaaccgccacgaaaacaggggatttaacaaacccggcagggatcgtccccggcattaa

SEQ ID NO: 62908 - protein, 585 aa, Unknown
  Obtained from environmental sample
  DOMAIN (403)...(460): KH domain
  misc_feature (1)..(585): Xaa is any amino acid
MDGELIVNPTYEQIEKSTLEIVVAGTKDGITMVEGGAKEVSEELMIEALEKAHKMIIEFCILQEKLRELTGKQKLPLNVPDYSLENKDAIRAAAYPKLETACFLPGKQERHDAIKAVKAEFETAHTAQLEDEKQKKLFNVLFEEMQYEILRSSILNKGKRVDGRGLEDIRNITCEIGILQRTHGSALFTRGETQALVVTTLGTVFDEQIYDDIEGDKREHFILHYNFPPFSVGEVGRMGTGRREIGHGNLARRSLEAMIPPKEVFPYTVRVVSEIMESNGSSSMASVCGGTLSMLHAGVPMKKPVAGIAMGLITESNAQGARYAILSDILGEEDHLGDMDFKVAGTEDGITGFQMDIKIAGVNPEIMRNALDQAKRGRLHILSIMNKTISKPLDEISEYAPKIVTLRIDTDKIGALIGPGGKNIKALCEQYSVKINTEDDGTVTIFGKSSIDAEDAXAAVLGIVLDPEVGKIYEGTVKRIMDFGAFVEILPGREGLVHISKLSRQRIANVTDVLKEGQEIPVKLTEIDKMGRLNLSYIDAIDPDGADSGGSNSGSHGSGGHSGGHSENRHENRGFNKPGRDRPRH

SEQ ID NO: 62909 - DNA, 507 bp, Unknown
  Obtained from environmental sample
  misc_feature (1)..(507): n is a, c, g, or t
gtggtaaagggcatgaagcgtttttcaagtcgtgaaggtgaaagtccgcgctccatgtcctttactatttaccggtatatactaagcgaagcttttttttcctttttaatcgcatttctttttttcttttttatcttttttgtcaaccagcttctgttaatggcccaggaaatcctggccaaacaggttccctttggacaggttgccctcctggttcttttttccctgccgcaggttattgccctgtccgcgcctttcgcttcccttgtcggtcttttgatgaccgtagggcggctttcaagcgacaatgaaattctggtgtttctgtcatcggggctttctttcaggaatgtgtttattccggcaataaccgtaggcgttgtcatttccattctttcttttatcgccaatgacatactgatgccgggcggttatgtgaaatttgcccagtgtacaggcgcatacttctttccaccccggcgctggaactggaggcgaactcggtaa

SEQ ID NO: 62910 - protein, 168 aa, Unknown
  Obtained from environmental sample
  misc_feature (1)..(168): Xaa is any amino acid
MVKGMKRFSSREGESPRSMSFTIYRYILSEAFFSFLIAFLFFFFIFFVNQLLLMAQEILAKQVPFGQVALLVLFSLPQVIALSAPFASLVGLLMTVGRLSSDNEILVFLSSGLSFRNVFIPAITVGVVISILSFIANDILMPGGYVKFAQCTGAYFFPPRRWNWRRTR

SEQ ID NO: 62911 - DNA, 663 bp, Unknown
  Obtained from environmental sample
  misc_feature (1)..(663): n is a, c, g, or t
gtgaactcttttgagaacaatccgcgacccgaagcggcaacacgcattaccgataattttatagcggaatcaatcggtcgccgtgagaattctttcgcaaatgattccgcccctatcgtctacggcgacatgcgctacatcggcagagttttcggtcttttcatattaatcgaatggggagataaactctacttaatcgatcagcacgccgcgcatgagcgtatcctttacaaccgtttccttgaagagactatccccaaacaggaactgctcgcgcccattcccttcacgacgcaaagcgccgaagaagatgcctttcttgaagcaaagaaggaagaactttcccgcctcggcttagacatcgttaaagacggcgacggctggaacattgaggctctgccggcgggctggaaaatgggtgacgcggagactgtaaaagaaattcttgaattgtccgccgccggagaggacattactgaaaactgggcggcaaccgtctgctgccgcgccgccataaaagacggcgactaccccgatgatgaaaccgccttttcacttggcagggcggcgcttgaactccccgacccccgctgcccacacggccgcccgatttggacagaaattaataaaaaggctctgtttagggctgttcgccgggaatag

SEQ ID NO: 62912 - protein, 220 aa, Unknown
  Obtained from environmental sample
  misc_feature (1)..(220): Xaa is any amino acid
MNSFENNPRPEAATRITDNFIAESIGRRENSFANDSAPIVYGDMRYIGRVFGLFILIEWGDKLYLIDQHAAHERILYNRFLEETIPKQELLAPIPFTTQSAEEDAFLEAKKEELSRLGLDIVKDGDGWNIEALPAGWKMGDAETVKEILELSAAGEDITENWAATVCCRAAIKDGDYPDDETAFSLGRAALELPDPRCPHGRPIWTEINKKALFRAVRRE

SEQ ID NO: 62913 - DNA, 957 bp, Unknown
  Obtained from environmental sample
  misc_feature (1)..(957): n is a, c, g, or t
atgacctaccccgatgaaaaattcataggcagccaattacgggatttaagcggcgattaccgcgatatagccagaaacctgcgttcgggaaaagaaatgtccgatgtcagaattaaaaatactaacggcagttccgcaattgtttttttcagacgtatctttaacaactggtatataggaatcacaacccccctctccaggtttaattacgatctatataattccgcccgtatactcatcatattagggctgattctcgccatggctatgtgtataatactgctgcgtttggccatagcgaaaacccgcgccgtggaaaaatccgtcagccttgaacacgccctcataaaaacaatggctgaactggtagattgccgagacgacataacaggcggccacatagacagaacacagcgcggaataaaaatactgttagacgcaattagaaaaaaaggaatttacagggaaataacaagaagctgggatatagacctgataatccggtccagccagttacacgacataggaaaaatttccatagaagacagaatattaaaaaaacccggcaggcttgatgaggatgaatttaacgaaatgaaaaagcacacaacattcggcgagcagattattttaaagattgagagcatgacaaaagaaagcgaatttcttgaatacgcaagaattctcgccgtaagccaccatgaaaaatgggacggcacaggttacccgaacgggctaaaggaaaatgaaatccccttattgggacgcatcatggcgatagccgacgtatatgacgcgcttgtttccgtaagatcatataaaaagccgtttacgcacgaagaagccgtaaaaataattatggatagcaaaggcaagcaatttgacccctgccttattgacatgtttctggaagttgccgacaatttcaaaaaaactattcccggcgaacagccctaa

SEQ ID NO: 62914 - protein, 318 aa, Unknown
  Obtained from environmental sample
  DOMAIN (130)...(267): HD domain
  misc_feature (1)..(318): Xaa is any amino acid
MTYPDEKFIGSQLRDLSGDYRDIARNLRSGKEMSDVRIKNTNGSSAIVFFRRIFNNWYIGITTPLSRFNYDLYNSARILIILGLILAMAMCIILLRLAIAKTRAVEKSVSLEHALIKTMAELVDCRDDITGGHIDRTQRGIKILLDAIRKKGIYREITRSWDIDLIIRSSQLHDIGKISIEDRILKKPGRLDEDEFNEMKKHTTFGEQIILKIESMTKESEFLEYARILAVSHHEKWDGTGYPNGLKENEIPLLGRIMAIADVYDALVSVRSYKKPFTHEEAVKIIMDSKGKQFDPCLIDMFLEVADNFKKTIPGEQP

SEQ ID NO: 62915 - DNA, 672 bp, Unknown
  Obtained from environmental sample
  misc_feature (1)..(672): n is a, c, g, or t
atgaaactatttacactgccgcgtttggtaccgcgtaacaattaccttcagttgttatttgtattcgccgcgtttgcgctcatggcaaccgcgtcatttttctttatcggacgcatattgcataaccgcctgtcaagcgaggcaaacgaaattctgttctccgccgaatcgaacgtgagagcaagcctttcggaagccgaaacaaccctcctcaattcctattacgtcatacaggatatgatagaaaagaacgccaaacgcgatgagatatttaattatcttaccatgaccaacgagtggatacgcaaacacgatcaggggctgatgacttttgacggtattttcggatatatcaacggggaattttacgacagcgtcggacttaaccccggagacgactatattccgcagatgcgcccctggtatcagatagggatacgaagcggcaactcagtcgcttataccgtgccttttaaagattggcggaacggaaataccattatgtccgccgttaggagcatagacttaaaaaacggcgatatggtgggaatcctcgtcctaattattaagattgactggctggtaaaatatgtagattcgctttcccttatgtccggcggctacgggatgctccctcaaccaaaacctgacaattatgacctaccccgatga

SEQ ID NO: 62916 - protein, 223 aa, Unknown
  Obtained from environmental sample
  SIGNAL (1)...(26)
  misc_feature (1)..(223): Xaa is any amino acid
MKLFTLPRLVPRNNYLQLLFVFAAFALMATASFFFIGRILHNRLSSEANEILFSAESNVRASLSEAETTLLNSYYVIQDMIEKNAKRDEIFNYLTMTNEWIRKHDQGLMTFDGIFGYINGEFYDSVGLNPGDDYIPQMRPWYQIGIRSGNSVAYTVPFKDWRNGNTIMSAVRSIDLKNGDMVGILVLIIKIDWLVKYVDSLSLMSGGYGMLPQPKPDNYDLPR

SEQ ID NO: 62917 - DNA, 327 bp, Unknown
  Obtained from environmental sample
  misc_feature (1)..(327): n is a, c, g, or t
ttgtggcatcctcctttttaccgcaattcggattttattatttcagccgctgccgctgccgggtacagaaccataaaaagaacaatcgatccgggcgactggctttcaaaagaggacgctgtaagatttaacgtacatcagattcctgcttcgcaaatggttgagttaatcatggacaaacagcaccttaacgctgttattccaatacggcttggccttcttcccggcggcagagacgactatctttttcggcgaatagaagtccttcttgacgcgttgattcgttcaggcgtagaagtaatccccgtatcagcactaacaagataa

SEQ ID NO: 62918 - protein, 108 aa, Unknown
  Obtained from environmental sample
  misc_feature (1)..(108): Xaa is any amino acid
MWHPPFYRNSDFIISAAAAAGYRTIKRTIDPGDWLSKEDAVRFNVHQIPASQMVELIMDKQHLNAVIPIRLGLLPGGRDDYLFRRIEVLLDALIRSGVEVIPVSALTR

SEQ ID NO: 62919 - DNA, 369 bp, Unknown
  Obtained from environmental sample
  misc_feature (1)..(369): n is a, c, g, or t
atgctgccgcaggaaacccgtaataatttcttttacgcctgtgcgttaataaaagaaaaatttcctgtccccagacgttttcgaagcgctttaccttctcagatagcggaactttcaggattgcttacaaacaataaaggtgaaagaccgctttcctatcttacgcgccctaattttctttcagcttatatgcattattttttcccttggaatatttaccgtctttgtattttgctgcaaagtataaacttaaacctttctgcaggtaattctgttacagatcttggaagcggacctttgacattcgcgtcagcgctttggatagcgcaccctgatttacgaagtgttcctcttgaaattactgtatag

SEQ ID NO: 62920 - protein, 122 aa, Unknown
  Obtained from environmental sample
  misc_feature (1)..(122): Xaa is any amino acid
MLPQETRNNFFYACALIKEKFPVPRRFRSALPSQIAELSGLLTNNKGERPLSYLTRPNFLSAYMHYFFPWNIYRLCILLQSINLNLSAGNSVTDLGSGPLTFASALWIAHPDLRSVPLEITV

SEQ ID NO: 62921 - DNA, 675 bp, Unknown
  Obtained from environmental sample
  misc_feature (1)..(675): n is a, c, g, or t
atggaaaataaacttatacgcgatgatattgatataaggcgtatttcatataaaggaaatctatcctctcttgtatgcgctgtaaatttttttaatgaaatatacgggtctttacctcattccgatacggaagggctcaaaaatatcgcggataatgcagcgaagttaatggtcaatatggcattaaaagacggttctatattaacggtagaacccggagtcccacagtcagggcggtttgtttccctcctgcgtgctgcgtttatgagaacaggcatgcaaccgctttcaccttgcacacatgcatcggcttgtccttttaccggtaacaaaaaacgatggtgccactttgcctatgaatcttttgacgcgccgaatgaattacaacagctttcggcggcggcagaccttccaaaggaacggcttgtctttagttatctgctgactgcggcaaagaaaaataatacagaaaataaattatgcgtaatatcagatgcttttaaacttcctcaaaatcgcttcggccgttacggatgctgttccgaaggacttgttcttttggcgggagaaagaaaacgaattgaagatattttctgcggaagtcttgttacgatgacaactgattttaaagggcgcgacgggaaaagcggtgcgctgataatggaggtaaaatga

SEQ ID NO: 62922 - protein, 224 aa, Unknown
  Obtained from environmental sample
  misc_feature (1)..(224): Xaa is any amino acid
MENKLIRDDIDIRRISYKGNLSSLVCAVNFFNEIYGSLPHSDTEGLKNIADNAAKLMVNMALKDGSILTVEPGVPQSGRFVSLLRAAFMRTGMQPLSPCTHASACPFTGNKKRWCHFAYESFDAPNELQQLSAAADLPKERLVFSYLLTAAKKNNTENKLCVISDAFKLPQNRFGRYGCCSEGLVLLAGERKRIEDIFCGSLVTMTTDFKGRDGKSGALIMEVK

SEQ ID NO: 62923 - DNA, 879 bp, Unknown
  Obtained from environmental sample
  misc_feature (1)..(879): n is a, c, g, or t
atgattcctgcggttttttcaagcatgcatgttcatacgcttttctgcgacgggaatgatgatgtggaaacaatgtgccgtgccgcatacgaaaaaaagatgtacgcaatcggttttagcgagcatgctcctataacaaaaaaaacaggtattaaaagcgactggaatttaagtgatgagcgcattgatgaatatatatcggaagtactggaagcaaaacaacgctggtacaggaaactccctgtttttcttggactggaagttgattatattaaaggcttaagatccgcaatagacagtgacataaaagcgattaatcccgattatttaattagcagtgtacactatatcattccttcaaacggcgcacagccgtttacagttgacggcccgcctgaagaatttttgaaaggactagatgaaggcttcggcggcgatgcgcaggcgctgatgaacgcctattatgacgcaatggcggaaatgatcgctattggcggttttgaaattatgggacatgcggatctgattaaaaagaattgttgtgataagaactactggccgcaggaaaacgaaatttgtcgccagatagaaattgcgcgctccgccgccgaagctgaaataacggtagaagtaaataccggcggcattaacaggggaaaaataaacgatgtttacccgtcaaaacaatttttgtgttttctgcgtgataataatgttcctttaataataacagctgatgcccactgcgcaaatgatattaacggaaattatgataaagctgtacaggcgctgatttgcgctgatattaaggaacatgtgatttttttgggaaaaagcaataaaaaggccgtatggaaaaaagaaaaaatatcgtattaa

SEQ ID NO: 62924 - protein, 292 aa, Unknown
  Obtained from environmental sample
  DOMAIN (7)...(251): PHP domain
  misc_feature (1)..(292): Xaa is any amino acid
MIPAVFSSMHVHTLFCDGNDDVETMCRAAYEKKMYAIGFSEHAPITKKTGIKSDWNLSDERIDEYISEVLEAKQRWYRKLPVFLGLEVDYIKGLRSAIDSDIKAINPDYLISSVHYIIPSNGAQPFTVDGPPEEFLKGLDEGFGGDAQALMNAYYDAMAEMIAIGGFEIMGHADLIKKNCCDKNYWPQENEICRQIEIARSAAEAEITVEVNTGGINRGKINDVYPSKQFLCFLRDNNVPLIITADAHCANDINGNYDKAVQALICADIKEHVIFLGKSNKKAVWKKEKISY

SEQ ID NO: 62925 - DNA, 684 bp, Unknown
  Obtained from environmental sample
  misc_feature (1)..(684): n is a, c, g, or t
atgagcggctctaaaccaaagtgggacaaaattttttcctctcttgaaaaatggcgcgaagaaattattaccgtaaaaggagcggaagatccttccgtaacaaccgtagcggagccagtatcggtgcgatccgtgggccgtgttggtttctaccattttaagtttgcgtacaaaagacgaagtaacccttgccgcgtcaaaacgtcttctgaaaaagccggcaatcccaacgcnttaagcgcgataaaagaagaaaaactcgcgaaattaatctatcccgtcggtttttaccgtaataaagcgtcttcgttgaagaaaatcgcttctattttaattacccaatacgacggcgaagtgccttcgtcgaaagaagctttacttgcccttcccggggttggcagaaaaacggccaatcttgtgcttacggaggcttttaatcttgatggtttatgtgtggatatacatgttcaccgtatttccaaccgttgcggttggttagaaagcaagaatcctgaggaaacagaaatgatattaagagtaattttaccgctccactattggaagcgtattaattatttactcgttctttacggacagaaactatgccgccctgtaagtccattttgctcacaatgcgtaataaaaaaacactgttcacgtaacggtgtgggtaagtcaaggtaa

SEQ ID NO: 62926 - protein, 227 aa, Unknown
  Obtained from environmental sample
  DOMAIN (114)...(143): Helix-hairpin-helix motif
  misc_feature (1)..(227): Xaa is any amino acid
MSGSKPKWDKIFSSLEKWREEIITVKGAEDPSVTTVAEPVSVRSVGRVGFYHFKFAYKRRSNPCRVKTSSEKAGNPNALSAIKEEKLAKLIYPVGFYRNKASSLKKIASILITQYDGEVPSSKEALLALPGVGRKTANLVLTEAFNLDGLCVDIHVHRISNRCGWLESKNPEETEMILRVILPLHYWKRINYLLVLYGQKLCRPVSPFCSQCVIKKHCSRNGVGKSR

SEQ ID NO: 62927 - DNA, 477 bp, Unknown
  Obtained from environmental sample
  misc_feature (1)..(477): n is a, c, g, or t
atgataaaaacaggtcttggatacgatatacaccgcttaataaaagggcgccgttttcttcttggcggcgttgaaattcctttttcaaaaggagaggacggccactcggatggagacgcgcttgcccatgcggtatgtgacgctcttcttggcgccgccgctcttggtgacattggcgaattgttttcgcccctcgatcccgcgtttaaaaaggccgattccagggaacttttgcgtaatgtttttgcgcgcgtaaaaaaatacggctggaaactagtcaaccttgattgcgtaataatctgtgaaaaaccaaaagtgcttcctttccgtgacattatccgaaactcgcttgctaatacgctggaagttccccttgactgcgtctttgttaaaggaaaaactgcggaaggcctgggttccgtaggcaagggcagggcagtcgaagttttagcccaatgtctgcttgagaaaatttaa

SEQ ID NO: 62928 - protein, 158 aa, Unknown
  Obtained from environmental sample
  DOMAIN (2)...(158): YgbB family
  misc_feature (1)..(158): Xaa is any amino acid
MIKTGLGYDIHRLIKGRRFLLGGVEIPFSKGEDGHSDGDALAHAVCDALLGAAALGDIGELFSPLDPAFKKADSRELLRNVFARVKKYGWKLVNLDCVIICEKPKVLPFRDIIRNSLANTLEVPLDCVFVKGKTAEGLGSVGKGRAVEVLAQCLLEKI

SEQ ID NO: 62929 - DNA, 543 bp, Unknown
  Obtained from environmental sample
  misc_feature (1)..(543): n is a, c, g, or t
atggatgaagccggatataaaggcggcattggaatgcccgttcttgttattcgcataacaccgggtcgcgatgccgagcgcgtcggttctttaatggcaaacgcatggaaagaaaaattgggtataaatgtgcgcgtagaagtcattccttacaataagtattttcaatccatgaaagaagacggatacaccgttggttccataacatggattggtgattttgccgatccatacgctttcttgcagatgttcaagcgcgattcaactttaaatgacgcgcgtttggatgacgctgattatgaagaattaatagaacgctccatgatagaagaaggaaaaatccgtttggaaactttgtctaaggcggaaaaacttttattggacaggggggtagtgcttcccatctttttcaatcccgcgttgaatattgttgataagggcgaattggacggatggtatcctaacgcattggacattcatccgtttaaatacatggcttttaaggcattccgccccctgcccggcgtcgctcttataaaatga

SEQ ID NO: 62930 - protein, 180 aa, Unknown
  Obtained from environmental sample
  misc_feature (1)..(180): Xaa is any amino acid
MDEAGYKGGIGMPVLVIRITPGRDAERVGSLMANAWKEKLGINVRVEVIPYNKYFQSMKEDGYTVGSITWIGDFADPYAFLQMFKRDSTLNDARLDDADYEELIERSMIEEGKIRLETLSKAEKLLLDRGVVLPIFFNPALNIVDKGELDGWYPNALDIHPFKYMAFKAFRPLPGVALIK

SEQ ID NO: 62931 - DNA, 660 bp, Unknown
  Obtained from environmental sample
  misc_feature (1)..(660): n is a, c, g, or t
atgcagtactgcagggcctggaaagcttttttgggctcggtaatcacaggcgtaagaagatgcgggatatcgttgtatagctttaattccacgatcttggggtcaatcaggataagcctgcattcagccgggggcttttggtacaagagcgtcaggatcatggtatttacgcacacggattttccagagcctgtggctcccgctattaacaggtgcggcatttgtacgagatcaaccgtaaccgcttctccggtaatgtcctttcccagcacgatgggaacttccgccttttttctgcccaggtttatttccccttcaatgatctccctgaacgaaacgatgtttcgtttggcgtttggcacctctatccccacggcgtgcttgccgggaatgggcgcaacgatgcgcacggattgcgcggccagtcgcagggcaatgttgtccgccaggctttctatcctggtcagccttatgcccggcgcggggaggatctcgaacatcgtaattacaggccccttgcgaatacctgtaacttcaacctgtatattgaattccttgaatgtttctttcagggtaactgccgcgctgcgggtttcctcatcgataatccagtattcaccgtcggggtattgttttaatatgccttcaaccggaacgtag

SEQ ID NO: 62932 - protein, 219 aa, Unknown
  Obtained from environmental sample
  misc_feature (1)..(219): Xaa is any amino acid
MQYCRAWKAFLGSVITGVRRCGISLYSFNSTILGSIRISLHSAGGFWYKSVRIMVFTHTDFPEPVAPAINRCGICTRSTVTASPVMSFPSTMGTSAFFLPRFISPSMISLNETMFRLAFGTSIPTACLPGMGATMRTDCAASRRAMLSARLSILVSLMPGAGRISNIVITGPLRIPVTSTCILNSLNVSFRVTAALRVSSSIIQYSPSGYCFNMPSTGT

SEQ ID NO: 62933 - DNA, 462 bp, Unknown
  Obtained from environmental sample
  misc_feature (1)..(462): n is a, c, g, or t
atgccccacgagggaaacagcgggcagaggaatggtgtaagaagcgaacggcggcctgtaatggggcgcatagcctttcaagatttgaggcgttccgaaaggaagcagacttacaccgcggtcttaagattgcaaagaaggaggaactttatggacaagggagaagtgtataccgcaaggactgcgaacttggatgagaaagaaaaccggaaaccggcatccctgcaatgggaagcgatagactggctgaaggttgaaatgttcatcaataaagcacaagcccgaattgcaaaggcgacggccaatggaaacatgaaactggtacgggaactgcaacgtatgctcgcgcactcttattatgcaaaactctgggcaatacggaaggtaaccagtaccgccgggaaaagaactgcgggaatagacaacgagaagtggatacgccggcaaactcggccaatctga

SEQ ID NO: 62934 - protein, 153 aa, Unknown
  Obtained from environmental sample
  misc_feature (1)..(153): Xaa is any amino acid
MPHEGNSGQRNGVRSERRPVMGRIAFQDLRRSERKQTYTAVLRLQRRRNFMDKGEVYTARTANLDEKENRKPASLQWEAIDWLKVEMFINKAQARIAKATANGNMKLVRELQRMLAHSYYAKLWAIRKVTSTAGKRTAGIDNEKWIRRQTRPI

SEQ ID NO: 62935 - DNA, 525 bp, Unknown
  Obtained from environmental sample
  misc_feature (1)..(525): n is a, c, g, or t
gtggcatggcttaaggatatggcggaatccgggaaaaagactgctgcctttgaacgggagatagagaaatatctgtcggtaagaaaaggcaagacggcatgtgtacagatcagggaagacgtgatagaacgggaacttgaaatgtcaggatggcttgtcatcctggggaacgggaaattaacggcgcagaaggcgcatgacatctaccggaagaaagacgtggtggagaaagcgtttatgaaatacaaaaatcttcttgacctgcggcggctgcgtgttcacagtgacgagaggatgaggaataaattgtttgcggcctttttagcgttgacgcttgttttgtacatacacaaggtaatgaaagaaaaagacctgtaccgcaagatgacgatggagaaaatgtttataaccttgtcgaaactgagaaaagtgacaataaacggttatgagattcttcgtccaacaacaaaagaacagagggatattttttccgccttttctatccctcagcctcttgtaggttaa

SEQ ID NO: 62936 - protein, 174 aa, Unknown
  Obtained from environmental sample
  misc_feature (1)..(174): Xaa is any amino acid
MAWLKDMAESGKKTAAFEREIEKYLSVRKGKTACVQIREDVIERELEMSGWLVILGNGKLTAQKAHDIYRKKDVVEKAFMKYKNLLDLRRLRVHSDERMRNKLFAAFLALTLVLYIHKVMKEKDLYRKMTMEKMFITLSKLRKVTINGYEILRPTTKEQRDIFSAFSIPQPLVG

SEQ ID NO: 62937 - DNA, 444 bp, Unknown
  Obtained from environmental sample
  misc_feature (1)..(444): n is a, c, g, or t
atggacaataaaaaactccttgtattttctgattcacatggtaatgtcaggaatttaaatgccctcttaaactgggcgaaagctcgcataccgccaaatgacactattctcgcggcggcgttccttggcgacggtatttcagacttggagtattcggcggatgagtcaggtttttataccgattggaaacttgttatgggaaataacgattttggaatttttatgccggaaactttaacatttgactttgccgaacatcatttttttatgtgccacggacaccggttcaatttatacagcgggtataattttttggtaaaagcggcaaaaaacgcgggagcggatgtcgtgttatacggtcacactcacattccctattgtaaaatagtaaatggcgttatgtttatcaacccagggagcgtaggacnggccgcgaagcaataa

SEQ ID NO: 62938 - protein, 147 aa, Unknown
  Obtained from environmental sample
  DOMAIN (4)...(125): Calcineurin-like phosphoesterase
  misc_feature (1)..(147): Xaa is any amino acid
MDNKKLLVFSDSHGNVRNLNALLNWAKARIPPNDTILAAAFLGDGISDLEYSADESGFYTDWKLVMGNNDFGIFMPETLTFDFAEHHFFMCHGHRFNLYSGYNFLVKAAKNAGADVVLYGHTHIPYCKIVNGVMFINPGSVGXAAKQ

SEQ ID NO: 62939 - DNA, 648 bp, Unknown
  Obtained from environmental sample
  misc_feature (1)..(648): n is a, c, g, or t
atggctatggatttggccgcatttcagcgtttttcccgtacatttaaacaaggagaaattatattctccgagtttgagcttggcgatacattttatcttatccagtccggcagagtgcagcttgtaaaacttgtcggcgatatcgaaagaactttggatattcttcaaccttccgaaatgttcggcgaaatggcaattttggaaaactctccccgctcggcgacagccatcgcccttgatgaattaaaagttttggaatttaactctcagaattttgaaatcctgctccttggaaatccgcagattgcgttaaaacttcttaaaatgttctgcaaacgcatatacgattccaaacggcgctttatgatccttactctgccggagccacaggtaaaaatagcggacgtatttcttatgttagatgaaactcagcctgatattgataaaaccagcgaacgtcgtgagtttaaaaccacagttgaaggagtagcccactgggcgggaatgagcgtcaacgaagctagagatatacttggacattttgtaaaccagcggcgcgtagaaattttcccggatcgtataacagtaaaaaacattaacgacttttcccgctttgtcagttccagacgcaactcacgcggcgcctaa

SEQ ID NO: 62940 - protein, 215 aa, Unknown
  Obtained from environmental sample
  DOMAIN (12)...(101): Cyclic nucleotide-binding domain
  misc_feature (1)..(215): Xaa is any amino acid
MAMDLAAFQRFSRTFKQGEIIFSEFELGDTFYLIQSGRVQLVKLVGDIERTLDILQPSEMFGEMAILENSPRSATAIALDELKVLEFNSQNFEILLLGNPQIALKLLKMFCKRIYDSKRRFMILTLPEPQVKIADVFLMLDETQPDIDKTSERREFKTTVEGVAHWAGMSVNEARDILGHFVNQRRVEIFPDRITVKNINDFSRFVSSRRNSRGA

SEQ ID NO: 62941 - DNA, 999 bp, Unknown
  Obtained from environmental sample
  misc_feature (1)..(999): n is a, c, g, or t
atgccaaaaccagcgcaattccgttcaggttctcttatatactttaaaggcgatcccgcggataaaatttatattctgcaatccggaaaggtgagtctggtttatcaggacattgaaacaggagctgacgtaaaagactctgtgcagcccggcgaattcttcggtgtaaaatcggcgttagggcgttatacacgcgaagaaaacgccatggctctttcagataccagcgtaatgatatttacagttcccgaatttgaagccgtcgctatggctaattccagaataataatgaaaatgttaaaagttttttccaaccaaatgaggcgcgttcataaacaagtatccaaagttatggcaaaggaagaacagtcgcccgcggacggtctttttaacattggcgaattttatttaaagaacaaacgtttttctcacgcaaaacatattttcagccgttatctgacattttatccttcgggaaaaaacgctattcaggcggcaaaaaatcttgaaatagcggaaaacgcccttacccgttacggcgacggcaagggacccggcgtctctgtcagcgtcgccgctcctgccgcgcaaacagccgcgaccgcgtcgcagaaagatttggataaagcaaacaagtcgtattatgacgctatcggacttgtttcgcagggaaaatatcaagaagcgtttatgacttttaaagtaattgtagacagtaaagtcgatcaggaatggacggcaaaagcgtcttttgaaatcgggcgctgtttattccttatgaacaaatacgaagacagcattaaattttatacaaatatgctgactcagttcccgaaacatcccgaattaatcgaaactatgtttatcatgggtcagtgtaacgaaaaggtcggcagaaaagatcaggcggtggcgttctacaaaaaaattatttcaatgggcggagacgagtccactatcgaaaaagtaaagcgggcgttaagcgccttaggagcgtaa

SEQ ID NO: 62942 - protein, 332 aa, Unknown
  Obtained from environmental sample
  DOMAIN (247)...(280): Tetratricopeptide repeat
  misc_feature (1)..(332): Xaa is any amino acid
MPKPAQFRSGSLIYFKGDPADKIYILQSGKVSLVYQDIETGADVKDSVQPGEFFGVKSALGRYTREENAMALSDTSVMIFTVPEFEAVAMANSRIIMKMLKVFSNQMRRVHKQVSKVMAKEEQSPADGLFNIGEFYLKNKRFSHAKHIFSRYLTFYPSGKNAIQAAKNLEIAENALTRYGDGKGPGVSVSVAAPAAQTAATASQKDLDKANKSYYDAIGLVSQGKYQEAFMTFKVIVDSKVDQEWTAKASFEIGRCLFLMNKYEDSIKFYTNMLTQFPKHPELIETMFIMGQCNEKVGRKDQAVAFYKKIISMGGDESTIEKVKRALSALGA

SEQ ID NO: 62943 - DNA, 690 bp, Unknown
  Obtained from environmental sample
  misc_feature (1)..(690): n is a, c, g, or t
atgcacggtattgaaaaactggaaaaattaaacgcgcttgatgaccactgcctttttattcactgtatcgctctcagcgacgaggatataaaaaaagccgcaaaagcgggagtaagcgtttcgtggtgcgggttctcaaatatgttcatgtttaatacgacggcaaaagtacggaaaatgatcaaagcgggtattaacgtaacaatcgggacggattcatcggctacaggttccgctaatcttcttgcggaaattaaatacgacagggaattgtatcaaaaactttacggggaagaccttcccgcgcaaaaaatcttcgagatggtaacaattaactcggcaaaagcgttcagaatgaacgacaaaaccggctctctggaagaaggcaagttaggcgacattttagttttaaaagcaaaaaataacgatccttatgaaaaccttgtttccgccggcatgaaggatatagaattgcttgtgcttgcgggaaacccgatatacggcgaactgcgtttccttgatattttcaacggcgctctgcccgaaggctacacaaaaataaaagtcggtaacagagatatgtttgtaaagggcgatcccgcggggctttacaacgaagcaagaagaaaaatcggttttaagaaggtacttgattatctgccgtttgagccggcacaggaaggagcataa

SEQ ID NO: 62944 - protein, 229 aa, Unknown
  Obtained from environmental sample
  misc_feature (1)..(229): Xaa is any amino acid
MHGIEKLEKLNALDDHCLFIHCIALSDEDIKKAAKAGVSVSWCGFSNMFMFNTTAKVRKMIKAGINVTIGTDSSATGSANLLAEIKYDRELYQKLYGEDLPAQKIFEMVTINSAKAFRMNDKTGSLEEGKLGDILVLKAKNNDPYENLVSAGMKDIELLVLAGNPIYGELRFLDIFNGALPEGYTKIKVGNRDMFVKGDPAGLYNEARRKIGFKKVLDYLPFEPAQEGA

SEQ ID NO: 62945 - DNA, 771 bp, Unknown
  Obtained from environmental sample
  misc_feature (1)..(771): n is a, c, g, or t
atgacagatcggccgagagagcgtgattccggccagatgcgtgttccgcgtcaatacaggattgacggcgcttatgtgttttccagcggaaaaaatatgggtgtattcaaggcggtcggcttcccggaggatgtcgggcgcttttacaagctcgaggaatacgaaggctggtgctttaccgcccacggacgctatccgaccaacacgccgggctggtggggcggcgctcatccatttgcgcttcttgattacacggtggtacacaacggcgaaatatcctcttacgacgccaatcggcgctcaatcgaaatgtacggctataagtgctcgcttcagaccgacacggaagttatcacctatatcattgattacttgcacagaaaacaaaagctttcctataaagaaatcgcttcggttatcgcggctccgttctggtcaactatcgggcggatgaaacctgacgatctggagacccatgagtacctgcgtatcatgttcagcgggcaactgataaccggcccgttctctattcttgtgggctttgacggcggactgatggcgttaaacgacaggctaaagctccgaagcatggtggtcggcgaaaaggacgagctggtttacatcgcgagcgaagaagcggctatccgcgtaatcgaaccgaaccttgacacaatctgggcgcccaggggcggtcagcctgtgatcatctttatgaatgggcgtgttccggattccggaccagcaatatacagaggtgaagaatggcattga

SEQ ID NO: 62946 - protein, 256 aa, Unknown
  Obtained from environmental sample
  DOMAIN (11)...(212): Glutamine amidotransferases class-II
  misc_feature (1)..(256): Xaa is any amino acid
MTDRPRERDSGQMRVPRQYRIDGAYVFSSGKNMGVFKAVGFPEDVGRFYKLEEYEGWCFTAHGRYPTNTPGWWGGAHPFALLDYTVVHNGEISSYDANRRSIEMYGYKCSLQTDTEVITYIIDYLHRKQKLSYKEIASVIAAPFWSTIGRMKPDDLETHEYLRIMFSGQLITGPFSILVGFDGGLMALNDRLKLRSMVVGEKDELVYIASEEAAIRVIEPNLDTIWAPRGGQPVIIFMNGRVPDSGPAIYRGEEWH

SEQ ID NO: 62947 - DNA, 1569 bp, Unknown
  Obtained from environmental sample
  misc_feature (1)..(1569): n is a, c, g, or t
atggcattgaatcttatatatccggaatatgaagttataaggaatggcgacaggtgtattacctgccgcgcctgtgaacgacagtgcgccaatgaggcacacgaatatctggcagaattggacaaaatggccaccaacgaatcaaaatgcgtaaactgccaccgttgcgttacgctctgtcccacccgcgccctgaaggttgtaaaaagcggcaacacatacaagcataattcaaactggaacgccaagaccatcgatgaaatctacaagcaggcggattcaggcggcgtgcttttgtcaagcatgggcaatcctgaggattatccggtatactttgataaaataattattaacgcttcgcaggtaacaaacccgtccatagaccctttacgcgagccgatggaaacaaagatatttctgggcgcaaggccaaaaacaattgagcgcgacgcanacggccggattaggaacaatctgtcgccgcagctaaaactttccatgccggtaatgttctcggcgatgagttacggttccataagctacaacgcgcacgaaagtttggcgcgggcatcggaagaacttggcatattttacaacacaggcgaaggcggcctgcatcaggatttttaccgttacggaaaaaacaccgttgtacaggtcgcatcgggacgtttcggcgtccatcctgattacctgaacgcgggcgcggcaatcgagattaaaattggccagggcgccaaaccgggtataggcgggcatttacccggcatgaaaatcgtaggcgacatttcccgtacaagaatgattccggaaggcaccgacgctatttctcccgcgccgcaccacgacatatattcaatagaagatttgcgccagcttgtttattctttaaaggaagctacgaattatcaaaagccggtaatcgtcaagattgccgcggttcataacgttaccgccatcgccagcggcatagcaagaagcggcgcggacatgatagccatcgacggctttcgcggcggaacaggcgccgcgccgacacgcatacgcgaccatgtcggtattcccatagagcttgcgcttgcgggcgttgacaaacgcctcagggacgaggggattcgcgacagcgtatccatcatcgcaggcggcagtattcgttccagcgccgacattgtaaaggctgtcgcgttaggcgcggactgcgtatacgttgccacggcggcgcttatagggctcggctgtcacctttgcaggagctgtcataccggcaaatgcaactggggcattgcgacgcaggtccctgagcttaccaaacggctgaatcccgacctcgggtacaaacgcctcatcaatctgttatccgcatggcagcatgaaatcatggagatgatgggcggcatgggcatcaatcaattgagggccttaaaggaaaccggctcatgctgcgcggtgtggggcttaacgaaaaagagcttgatatcctgggaattaaacacgcaggggaatgacagtggaaggaaacgtaaaaaaaataatcagcgggaaagtgcgggaagtttacgaaatttctaa

SEQ ID NO: 62948 - protein, 522 aa, Unknown
  Obtained from environmental sample
  DOMAIN (43)...(66): 4Fe-4S binding domain
  misc_feature (1)..(522): Xaa is any amino acid
MALNLIYPEYEVIRNGDRCITCRACERQCANEAHEYLAELDKMATNESKCVNCHRCVTLCPTRALKVVKSGNTYKHNSNWNAKTIDEIYKQADSGGVLLSSMGNPEDYPVYFDKIIINASQVTNPSIDPLREPMETKIFLGARPKTIERDAXGRIRNNLSPQLKLSMPVMFSAMSYGSISYNAHESLARASEELGIFYNTGEGGLHQDFYRYGKNTVVQVASGRFGVHPDYLNAGAAIEIKIGQGAKPGIGGHLPGMKIVGDISRTRMIPEGTDAISPAPHHDIYSIEDLRQLVYSLKEATNYQKPVIVKIAAVHNVTAIASGIARSGADMIAIDGFRGGTGAAPTRIRDHVGIPIELALAGVDKRLRDEGIRDSVSIIAGGSIRSSADIVKAVALGADCVYVATAALIGLGCHLCRSCHTGKCNWGIATQVPELTKRLNPDLGYKRLINLLSAWQHEIMEMMGGMGINQLRALKETGSCCAVWGLTKKSLISWELNTQGNDSGRKRKKNNQRESAGSLRNF

SEQ ID NO: 62949 - DNA, 1329 bp, Unknown
  Obtained from environmental sample
  misc_feature (1)..(1329): n is a, c, g, or t
atggcgaaataccgaacaacggatgcagcagccgggcagggattatttttatcagtacatttaaaagagcaattaataccggacagttttgaatatatgctcaacgaaataatcgggacaaaaatagacctgagagtatttgacaagaagtataagaacgacatggtcggagcgagcgcggtaccgccgtcggtattgttgaaactgataatctacggataccataacggctgtataagctcgcggaagatatacgagttaaacaggaataatataatagcgaaggcgttaaccggggacatggacatccattggacaacgatagcggaattcatatccggaaacaaagaagaggtgaaagaaatattcgtgcaggtgctgatgtattgcaacgagctgggattgataggagggaaggatttcgcgcaggacgggctgcgtctgccgtcaaacgcgtcgatagacatgagcgggacggaaaagcagctgaagaaacggcttgccacctgccagaagatggcggcgaagcacatagagaggcacgcgaggagggacgcgcaaggggcaagcgacgaggggacggaagagcgctttgacaagcggcagaaaaagttaaacgggcagatagaaaagataaaaaaatttctggagaagatgaagaagaaagaagggcgggacgggcaagaaatccagtcgaatgtgacggacaatgaaagcgcgatgatacacagcgcgaaagggtttatccagggatacatagggatagcgatatcggaccagaaaagccaggtaataacaagcgcgcaggcgttcggcaacgcgaatgagacggaatatatgcctgaaatgcttgaccggaacgcggagaacttggaagcggcaggggtcaagaaggaagagggagaaaaaataacggtgagggcggacgcaaattatttcagcgaagaaaacctgaaggcgtgcgaggaacggggagtggatgcggtaataccggacagccaggcgaaaaggcggctggggcctgacggggagaaacggtatgatgctgacgatttcacctatgatgaaaaagaagacagttatacatgcccgcagggaaagacgcttgaatataaaaggacgacggagcagaagggggttgaggggaaagtgtaccaggcgagccttacggactgtaagaactgccccgccttttcaaagtgttcacggagcggggaggagcaaagcgagcaaacgcaagggaaagcgctgaggatagttaacagcaacgggccggggagcttatgccaggagatgaggaagaggtttgaagtgtcgagtgtcagataa

SEQ ID NO: 62950 - protein, 442 aa, Unknown
  Obtained from environmental sample
  misc_feature (1)..(442): Xaa is any amino acid
MAKYRTTDAAAGQGLFLSVHLKEQLIPDSFEYMLNEIIGTKIDLRVFDKKYKNDMVGASAVPPSVLLKLIIYGYHNGCISSRKIYELNRNNIIAKALTGDMDIHWTTIAEFISGNKEEVKEIFVQVLMYCNELGLIGGKDFAQDGLRLPSNASIDMSGTEKQLKKRLATCQKMAAKHIERHARRDAQGASDEGTEERFDKRQKKLNGQIEKIKKFLEKMKKKEGRDGQEIQSNVTDNESAMIHSAKGFIQGYIGIAISDQKSQVITSAQAFGNANETEYMPEMLDRNAENLEAAGVKKEEGEKITVRADANYFSEENLKACEERGVDAVIPDSQAKRRLGPDGEKRYDADDFTYDEKEDSYTCPQGKTLEYKRTTEQKGVEGKVYQASLTDCKNCPAFSKCSRSGEEQSEQTQGKALRIVNSNGPGSLCQEMRKRFEVSSVR

SEQ ID NO: 62951 - DNA, 810 bp, Unknown
  Obtained from environmental sample
  misc_feature (1)..(810): n is a, c, g, or t
atgaccgcggaatttacctatgcccaccgctgttccgaccgggctctgaattttcttgaggagaataaagataattcgtttttcctcgcggtttcctacgacgagccccacgggccctgcctctgccccgctccttacaataccatgtatgacggttttcaatttgacgataacccggcttatgccgatgatttacatgacaagccccttctccagcggctctgggccggcaatatgctccatcaatcttctgaggagctgcgcaaacctaaaagaggtgttgccttatacctgggatgcaacagttttgttgacgccgaaataggccgcgtgctcaacaagataaatgaaattacgcctcacgcgctggttatctttacttccgatcacggggatatgatgggagcccaccgtcttaactccaaaggccctgccgcgtacagagaaatcgcgaacatacctctcataattaaaggcggcgaaaaaggcaaagtcattgacgctccttcttcccacatagacataactcctacggttatggattatatggggcttcccataccgaagatccttgaagggaaaagtatgcttcccctgatttatgatacaacacaggcagtcaacgaaacggtctttctcgaatttacccgctacgaagttgatcatgatggattcggcggcttacagatgatgcgggccgcggtcagcaggcgctataaactggtaattaacctcctggatacagacgaattctacgatatggaaaaagacccttacgaagttgtgaatcagattaacaatgaagaatga

SEQ ID NO: 62952 - protein, 269 aa, Unknown
  Obtained from environmental sample
  DOMAIN (2)...(263): Sulfatase
  misc_feature (1)..(269): Xaa is any amino acid
MTAEFTYAHRCSDRALNFLEENKDNSFFLAVSYDEPHGPCLCPAPYNTMYDGFQFDDNPAYADDLHDKPLLQRLWAGNMLHQSSEELRKPKRGVALYLGCNSFVDAEIGRVLNKINEITPHALVIFTSDHGDMMGAHRLNSKGPAAYREIANIPLIIKGGEKGKVIDAPSSHIDITPTVMDYMGLPIPKILEGKSMLPLIYDTTQAVNETVFLEFTRYEVDHDGFGGLQMMRAAVSRRYKLVINLLDTDEFYDMEKDPYEVVNQINNEE

SEQ ID NO: 62953 - DNA, 1125 bp, Unknown
  Obtained from environmental sample
  misc_feature (1)..(1125): n is a, c, g, or t
ttgcttggcaaggtaacagaagaaagcatgaggtaccgcggcgaaaatttttataaggacaataattgcaccgtactggctgattccgtcgcggataagattgatacagtgacgaagaacgtggtattaaaatttggcaaaaaaataccctacgacaagctgcttgtcgcgacgggctcttcgccgtttgtaccgcccttccaggggcttgactcggtatggaataaatttacttttatgagccttgacgacgcgctgaaactggacgcagcgttggaacacgccaccgaacttgcggggcagggtcccgcttcggcagcggacaagcgcgtgctgattgtaggcgcggggcttattggcctgaaatgcgccgagggtattcaggagcgcgtaaagcacatcacggtgcttgacctggctccgaggattttatccagcattctcgacgatgaaggcgcgaagctggttcaaagccatctggaaagcaagggcatcgagttcaggctttccgccaacatcaaaagcataaagtttagtaccgctaccttggagaatggcgaaacgataaacttcgatattctcattcttgcggtcggagtgcggccaaacaccgcgcttctgaacggcattgcgaagatagaccggggcatcgtcgtaaacgaaaaatcggaaacatcagcccctgatatttacgctgctggcgactgcacgcaaacgcttgacatatcaagcggacaaaacaaaatcatggcgctcttgcctaacgcttacatgcagggcgaatgcgcgggaataaatatggcgggcggtgacaagagcttcgataaggcaatccccatgaacgcaatcgggtttttcggcctgcacatgatcactgccggcagttatgcgggaaatgttcacgccgagaacggcaaaggcaattacaggcgtttgttttacagcgacaacaaacttaacggttacatccttgtcggcaacgtggagaaggccgggatttatacaagccttatccgcgaacgaacgccgcttgacacaatcgacttcggcctcgtatgcgaaaaaccggggctaatggcgttcaggaaagaagaaagaatggtaaaactgggaggtgcttcataa

SEQ ID NO: 62954 - protein, 374 aa, Unknown
  Obtained from environmental sample
  DOMAIN (1)...(241): Pyridine nucleotide-disulphide oxidoreductase
  misc_feature (1)..(374): Xaa is any amino acid
MLGKVTEESMRYRGENFYKDNNCTVLADSVADKIDTVTKNVVLKFGKKIPYDKLLVATGSSPFVPPFQGLDSVWNKFTFMSLDDALKLDAALEHATELAGQGPASAADKRVLIVGAGLIGLKCAEGIQERVKHITVLDLAPRILSSILDDEGAKLVQSHLESKGIEFRLSANIKSIKFSTATLENGETINFDILILAVGVRPNTALLNGIAKIDRGIVVNEKSETSAPDIYAAGDCTQTLDISSGQNKIMALLPNAYMQGECAGINMAGGDKSFDKAIPMNAIGFFGLHMITAGSYAGNVHAENGKGNYRRLFYSDNKLNGYILVGNVEKAGIYTSLIRERTPLDTIDFGLVCEKPGLMAFRKEERMVKLGGAS

SEQ ID NO: 62955 - DNA, 432 bp, Unknown
  Obtained from environmental sample
  misc_feature (1)..(432): n is a, c, g, or t
gtgaaaagggtttatgtaaacgaaaaatggtgcctgggctgtcatttgtgcgaatactactgcgctttcgcgggaacgacagaaagcgacatggcacgggcgctgaaaggcataaagatacgcccaagaattcatatagaaaagaaggacgacatcagtttcgcagtgtcctgtcgccattgcgaagagccgtattgcgtcaagggctgcattaccggcgctttaaccattgcagacggcgtaatcacgattaacaaggataaatgcgtaagctgttttacctgcattatgagttgcccttacggcgctgtctcgccgtccgaggacggcgcggtacagaaatgcgagctgtgcgtaagcaccgccgccgggacgccggcctgcgtaaagggctgcccaaacaacgctattgtttttgaagagagaggataa

SEQ ID NO: 62956 - protein, 143 aa, Unknown
  Obtained from environmental sample
  DOMAIN (82)...(105): 4Fe-4S binding domain
  misc_feature (1)..(143): Xaa is any amino acid
MKRVYVNEKWCLGCHLCEYYCAFAGTTESDMARALKGIKIRPRIHIEKKDDISFAVSCRHCEEPYCVKGCITGALTIADGVITINKDKCVSCFTCIMSCPYGAVSPSEDGAVQKCELCVSTAAGTPACVKGCPNNAIVFEERG

SEQ ID NO: 62957 - DNA, 627 bp, Unknown
  Obtained from environmental sample
  misc_feature (1)..(627): n is a, c, g, or t
atgcctgagtatttccaaaaggacgagtttgaagggcgcacggttttggtgaagaagctaaaaatgctgccttttgaatttatcgtcaggggatatatgttcggcaatatgtgggaggcttattccaaaggcgaaaaattctgcggccaaataatcgagggcgattataaactggccgaaaaacttgccgtcccgatctttactccttccacgaaagcgagaatcgggcatgacgagtatatctctgttcaacacgtaaaggacgtgattggcgcggaactggtcggcaggatagaaacagtttgcctgaagctttacaacacctgctacaactacgcttacaacaagaacataattatcgccgatacgaaatttgaattcggccttgacgcgcacaacagcctcgttgtcgcggacgaattgcttacgccggattcaagcagattctggagccttccggattataaggcgggggtttctccaaaaagttacgacaagcaattggtaagggactggctcacagaaaacaaaataaacggtgagatgcaatttgacaatataagtgatgatgttttgcagaaaacatcggagatctacgcggagtgcctgagaaaaataaccggataa

SEQ ID NO: 62958 - protein, 208 aa, Unknown
  Obtained from environmental sample
  DOMAIN (1)...(191): SAICAR synthetase
  misc_feature (1)..(208): Xaa is any amino acid
MPEYFQKDEFEGRTVLVKKLKMLPFEFIVRGYMFGNMWEAYSKGEKFCGQIIEGDYKLAEKLAVPIFTPSTKARIGHDEYISVQHVKDVIGAELVGRIETVCLKLYNTCYNYAYNKNIIIADTKFEFGLDAHNSLVVADELLTPDSSRFWSLPDYKAGVSPKSYDKQLVRDWLTENKINGEMQFDNISDDVLQKTSEIYAECLRKITG

SEQ ID NO: 62959 - DNA, 681 bp, Unknown
  Obtained from environmental sample
  misc_feature (1)..(681): n is a, c, g, or t
atgaaatctgtcaaagcgttcgcgctgatagcagcgttaattgtaattgtcgtgtttgtaggctgcaaatcatcagccaaggcggcgcccggtattaaactggattccacggccaaggttgaaacagttgagcataagggaacagctttcggcgtaaaagaaataccgcaatggctgtcggagtttgttcagcgtaacggaacccgctccgtcgaggcgctccccgattataagggcaagtatgtaattataggccaggccagcggttccggattacagcaggttgaaacatgggccaaaaactttgacgcccagcagcagattggcgccaccatcgaaacccgcgtggcatcggtgtttaaggcccatgaaaacctgctccccggcgatgccgacgcgaaacgcaaatacgacaacgcgattaacactctggtaagggcgacatacaccggggccaggcaggaagccgactggtggctgcaccagaagatcaccgagaagggcaaacaggctgaaacaaggtatacttcgtacgttttatacaccattgacagatccgttttggatcaacagataagggaccagattataaaaatcaagaacggcgaaagcccggaactgaacgcggcttttgacgccgttacagctcagttgctcgagagaggcctggattgggaataa

SEQ ID NO: 62960 - protein, 226 aa, Unknown
  Obtained from environmental sample
  SIGNAL (1)...(26)
  misc_feature (1)..(226): Xaa is any amino acid
MKSVKAFALIAALIVIVVFVGCKSSAKAAPGIKLDSTAKVETVEHKGTAFGVKEIPQWLSEFVQRNGTRSVEALPDYKGKYVIIGQASGSGLQQVETWAKNFDAQQQIGATIETRVASVFKAHENLLPGDADAKRKYDNAINTLVRATYTGARQEADWWLHQKITEKGKQAETRYTSYVLYTIDRSVLDQQIRDQIIKIKNGESPELNAAFDAVTAQLLERGLDWE

SEQ ID NO: 62961 - DNA, 1227 bp, Unknown
  Obtained from environmental sample
  misc_feature (1)..(1227): n is a, c, g, or t
atggacaaagaagagattatagaattaatcagagcaggctcatttgatattttaaaattgaaacctctgattatcgatatgaatacggcggacatcgccgagatctccgaagaattggacaaagaaaataaaatcagattattcaggattctgccaaaagcaatagcgtcggaagtttttgcctacatggacagcgatcaacagcagattgttgttgaggcgcttaccgatactgaaataggcgaaatcatgaacaaacttttcatggacgacgccgtagactttatcgaagaaatgccggcaaatatagtaaagcgcgtattaaaaaacgttccacctgaaaaacgaaaactaatcaataattttttacagtatccggatgattccgcaggcagtcttatgacaacagaatatgtcgatctgcgtgaagacgagacagtacacaaagcgtttgacactatccgcagtacaggtcttaacaaagagacaatttacaactgttatgtgatacgcaaagatcgtgttcttgtaggttctatttccgcaaaaacccttatgcttgccaaaccccggcagcgtataggtagcttaatggacactaaccttgtttacgcgcacacaaccgacgaccaagaagccgtcgccgaacaatttaaaaaatactcgctgttggcaatgcccgttgttgacaaagagcagaggcttgtgggcattataactgtagacgacattgtagacgttatcgtagaggaaagcacggaagacatcgaaaagatgaacgcccttgccccgtctgacgatccgtatcttaaaacaggcgttctccgtcttgccagaaaccgtatcctctggctcttggtgttgatgctttccgcaaccattacaggcataatcatttccaattttgaagcggggcttgccgctttaccaattcttgtcgcttttatcccaatgctcatggacacaggcggcaacgccggctctcaatcttcgactcttatcattcgcggtatggcgataggtgaaatcaccccaaaagatattatccgaattgtatggaaggaagtgcgcgtaggattattatgcggactagcccttggaacaataaattttatacgcatttatttaatgaacgggcaaaatcttatgttatgcgttacagttacgctgtccgtatgttgtacaattataatagcgaaaacagtaggctgcctcgtgccgatctga

SEQ ID NO: 62962 - protein, 408 aa, Unknown
  Obtained from environmental sample
  DOMAIN (315)...(408): Divalent cation transporter
  misc_feature (1)..(408): Xaa is any amino acid
MDKEEIIELIRAGSFDILKLKPLIIDMNTADIAEISEELDKENKIRLFRILPKAIASEVFAYMDSDQQQIVVEALTDTEIGEIMNKLFMDDAVDFIEEMPANIVKRVLKNVPPEKRKLINNFLQYPDDSAGSLMTTEYVDLREDETVHKAFDTIRSTGLNKETIYNCYVIRKDRVLVGSISAKTLMLAKPRQRIGSLMDTNLVYAHTTDDQEAVAEQFKKYSLLAMPVVDKEQRLVGIITVDDIVDVIVEESTEDIEKMNALAPSDDPYLKTGVLRLARNRILWLLVLMLSATITGIIISNFEAGLAALPILVAFIPMLMDTGGNAGSQSSTLIIRGMAIGEITPKDIIRIVWKEVRVGLLCGLALGTINFIRIYLMNGQNLMLCVTVTLSVCCTIIIAKTVGCLVPI

SEQ ID NO: 62963 - DNA, 852 bp, Unknown
  Obtained from environmental sample
  misc_feature (1)..(852): n is a, c, g, or t
atgctgccaacattaataaaatacattctcacacagtccccgcagtctcaggaagtggagatttcgggctgggtcaggacgaagagggatatgaaaaatcttgtctttgtggaaataaacgacggttcttgctttgccggtattcaatgtacttttgacaggggagcgggaattgacgagcggacggaagcctctctcgcctctctttctacgggcgcttccgttaaaatcggcgggaagctgataccttcgcccgcttccgggcaggcggtggaaattgcggctgtgtctttgcatgtttttggagacgccccgcctgaagctgtcggcgatacgcaggcttatccgcttcaaaaaaagcggcactctttggaatttctccgtgagattgcgcaccttcgcccgcgtaccaatacttttggagcagtagcccgtcttagaagccgattggcgttcgctattcacaagtattttcaggagagggattttcattaccttcatacgccgattatcacggcgggagattgcgaaggcgcgggagcgatgtttcaggtaacgacgctcgatcttgaagccgctgccaaacaatttgcggggaaagcgaataacggacaaacggaagcgatagattactccaaagattttttcagcaagaaaacatttttaacggtttcaggtcagcttgaaggggagacctacgcgacggcagtctcacgcatttatactttcggtcccactttccgcgcggagaactcaaacacagtccgccaccttgcagaattctggatggtagagcctgaagtcgctttcgccgaattaaaagacgatatggagttagcggaagatttttga

SEQ ID NO: 62964 - protein, 283 aa, Unknown
  Obtained from environmental sample
  DOMAIN (123)...(283): tRNA synthetases class II (D, K and N)
  misc_feature (1)..(283): Xaa is any amino acid
MLPTLIKYILTQSPQSQEVEISGWVRTKRDMKNLVFVEINDGSCFAGIQCTFDRGAGIDERTEASLASLSTGASVKIGGKLIPSPASGQAVEIAAVSLHVFGDAPPEAVGDTQAYPLQKKRHSLEFLREIAHLRPRTNTFGAVARLRSRLAFAIHKYFQERDFHYLHTPIITAGDCEGAGAMFQVTTLDLEAAAKQFAGKANNGQTEAIDYSKDFFSKKTFLTVSGQLEGETYATAVSRIYTFGPTFRAENSNTVRHLAEFWMVEPEVAFAELKDDMELAEDF

SEQ ID NO: 62965 - DNA, 813 bp, Unknown
  Obtained from environmental sample
  misc_feature (1)..(813): n is a, c, g, or t
atgggagggagcatgaaaactccgttatcatactacggaggcaagcaacagcttgccaaaataattctggggcttattccgccccatcgtgtttattgcgagccttttcttggaggggccacaatatttttcgctaaagcgccttcaaaagttgagatcgtcaacgataccaacggtgagattattaacttttatgaagtgttaaaacgtgattttacggctcttgaaaaagaggtaactataagcctccacagccgtaaacagcatactcacgcatgggtgatctaccagaacccggaattatttgatcgggtcaaaagagcgtgggcgatctggatgctcgctaattcttcctatggtcacatgcttgacggcgggttcggctatgacaaagttagcggcggaacgacaaaaaaactggcaaacaagaggctcaattttaccgaggactatgctatacggctccagaacgcccaaatagaatgttgcgatgcgctcaagattatcaggagcagggacacggctgactcttttttttattgcgatccaccctatgtaggatcggatcaggggcattacgatgggtacacccaagaagattttgattgcttgctgaaccttttggctggtatcaagggaaaattccttttgagttctttccgaaatgaaacgctggacaagtttgtaaagcggaagggctggcatactttcgaggtgtcgatggtatgctcgatgaccaataaaaccggaaaaacaagaaaaaaggtcgagatttttaccgctaactacccaattaaagccccggacaaatag

SEQ ID NO: 62966 - protein, 270 aa, Unknown
  Obtained from environmental sample
  DOMAIN (11)...(243): D12 class N6 adenine-specific DNA methyltransferase
  misc_feature (1)..(270): Xaa is any amino acid
MGGSMKTPLSYYGGKQQLAKIILGLIPPHRVYCEPFLGGATIFFAKAPSKVEIVNDTNGEIINFYEVLKRDFTALEKEVTISLHSRKQHTHAWVIYQNPELFDRVKRAWAIWMLANSSYGHMLDGGFGYDKVSGGTTKKLANKRLNFTEDYAIRLQNAQIECCDALKIIRSRDTADSFFYCDPPYVGSDQGHYDGYTQEDFDCLLNLLAGIKGKFLLSSFRNETLDKFVKRKGWHTFEVSMVCSMTNKTGKTRKKVEIFTANYPIKAPDK

SEQ ID NO: 62967 - DNA, 1377 bp, Unknown
  Obtained from environmental sample
  misc_feature (1)..(1377): n is a, c, g, or t
atggcggggaagcagacatttaacatggaagatgaatttgcggggctgaattgcaactcaagccgccttgaaaagcggtttataaggacaatggaaacactgtccaaacagccggacaaatcaatatggtcctgcagcgaaaaccgggcggaggctaaagccatataccggatgcttggcaacgagaacctggatcgcggagaaatattgcgggcgcatcgggaggctaccataaggcgcatggtacagtcaggagggaccattctggcagtacaagataccacaagcctgaactacaacacccacgagaaaatggaagggatagggtatataagcgaaaagacgctgggagtaaatatccacagctgccttgcgcttacagccgaaggattagtgcttggggtattggaacaaacgtcgtacaaccgcactcaggcaaaggacgacagccgcagccacgacagcaaaaagacacggccattgggagagaaagagagctaccgatgggttcagaccctttgggaaagcaccagcgacctgcctgacggaatgcatgttgttaccgtatgcgacagggaaggggacatgtatgcgctgtttgacgaagcggatcggtggggccaggcatttctcatacggatagcgcagaaccgaacaaccgcagaaaaccataaaatattggacaaaatccgggaaaaaaagtgcatgggcaaggtaaaaacaaacattccacgcgattcccgcaagggccttgcggaacgcgaggcggtattgcagatacggtatggcggctttgaaataaaacgcccgcagatcctcaataagaataaaaagttcagagacacgcaggaagcaaacataatatatgtcagggaagagcaacaggacaaagccgtagagcctttggaatggtttttgatgacgaatgaaccggtcaagagtgtcgaagacgcatacgaaaaagccgtatggtatatgcagcggtggaagatagagcagtttcactatgtgctgaaatccggctgtacggttgagaagctgcaagaaaggagcatggaaaaaacaacgatgctagtcctgatgtattccataatagcttcggcaattatgaatataacgtatgtcgcgcgaatacacccgctgcttccctgtacgacattttttgaggaagacgaatggaaggtattgtattgcactgcaaacaggacaaagaaagtacctaaaaagccgtatacgattgccgaagcggtagcctacttaagccggctgggaggcccaaaccgggctcccagcgacggccctcccggcgtcaaaacaatttggattgggcttgataaatttaacaccttgcttgcatacaaggaatggatgccttaa

SEQ ID NO: 62968 - protein, 458 aa, Unknown
  Obtained from environmental sample
  misc_feature (1)..(458): Xaa is any amino acid
MAGKQTFNMEDEFAGLNCNSSRLEKRFIRTMETLSKQPDKSIWSCSENRAEAKAIYRMLGNENLDRGEILRAHREATIRRMVQSGGTILAVQDTTSLNYNTHEKMEGIGYISEKTLGVNIHSCLALTAEGLVLGVLEQTSYNRTQAKDDSRSHDSKKTRPLGEKESYRWVQTLWESTSDLPDGMHVVTVCDREGDMYALFDEADRWGQAFLIRIAQNRTTAENHKILDKIREKKCMGKVKTNIPRDSRKGLAEREAVLQIRYGGFEIKRPQILNKNKKFRDTQEANIIYVREEQQDKAVEPLEWFLMTNEPVKSVEDAYEKAVWYMQRWKIEQFHYVLKSGCTVEKLQERSMEKTTMLVLMYSIIASAIMNITYVARIHPLLPCTTFFEEDEWKVLYCTANRTKKVPKKPYTIAEAVAYLSRLGGPNRAPSDGPPGVKTIWIGLDKFNTLLAYKEWMP

SEQ ID NO: 62969 - DNA, 2535 bp, Unknown
  Obtained from environmental sample
  misc_feature (1)..(2535): n is a, c, g, or t
ttggaacggaagcgcggcggggatgtcggaaaaatcaaacgctgggcggcgcataaggctaaagcgtcattcactccgtattatgtttttgaaaagggtaataacggcggtttcatcatcgtttccgcagacgacatcgcggcgccgattctcggcgagaccgatagaggagtttttgataaggacagtatgccgccggcgttggtttggcttttgggaacgtacgagaggcagattgaggaggctgtaaaaagcggcggggcgcaggacagcggaactaaggcgctttgggaacaggcggcgcaaaattccggcgccgcattgctacgttcaagcgccgctgcggcgacacgctatccacagcagttgctttccaccgcatgggggcagggcgagccgtataatttgaagactcctcttgacggagacaaaaggagcgaggccggctgtgtcgcggtaactatggcacaaattatgaagtattggcgataccctgattccggggcaggcgagagtaaggcgtatagcacgagcacaaaagagataaacgttccatccgtgaattttaagatcccctacaattacgccgatatgcttgatgattatcctaccgcaagcagcggaaccgcttatcagagagaggcggtttcaacactgatatatcacatcggggtaagcgtcggaacggattacacgcagaccgaaagcaccgcatattcgtacgaagcggagacggcgctggtcaggaattttaaatacgacaaaagtatccgctatatcgagtcaatcgagtcggtgcagagttgggtttcggataactctttagaaaacgattggaaagaccttatactcggacaaatagagaataactccccggtatattacagcgggtacgatacgacaaacggcattctaaacggccacgcttttgttatagacgggtacgacgaccgtatcgataaatttcatataaactgggggtggggcggaaaatacgacgggtttttcgcgttgaccgcgctgaacccgggcacacaacaattttacaacaaccataccatgatgataaacataatgccgagaacaaacgacaatcctccatcgcaaataaaggtgacggattttaacgtatcggtaactcctattacgataagcgcgagaattacggcaaaactgaattacggaaacgactacactgggttgattggatttgccgttacgtacggcgactccgtcggtatggttttggattcggcaaatcttggaatatacaacgcgcacgactatagttcttcaacatatacgatcaattacctaaaccgcatcattaccaagaggctcggcgccgatacgccggtcggcgacgttacgttacgcccggtagcaaaacaactctccgaagacgcgtggacaccggtaggcgaaacgcgtcaaaaaatatccattcctcaaccgatcaatataatagacgagtgggattgcggggagattccgcggacggttacggctattctgagcgaagacgggacgcttaccatatacggatcgggaagtatggcatactacgggctttatttaggtagcaggtctaacgcgccgtggttcgattccagcggtctcattacgaaagtgatcattgcggaaagcgtgactaatatcggaggcgccgcgtttgcctactgtaaaaatctgacgtccgttaccatcggcaatagcgtgacggatatcgaaccgtatgcgtttttaggatgcgccaatttgacgtccgtcaccataggcagtagcgtgacggatattggagagtatgcgtttttcagatgcgctaatctgacatcggtcacaattccaaacagcgtgacttacattggggcgggcgcgtttgccgaatgtacaaatatgacgtccgtcaccataggaaaaagcgtgaaatctattggttacggagcgtttgaatattgtaacaacatgacatcggtaataagtttaaatcctataccgccgagtgtagaacaaaactacgcgttctttttctacggtgcggataactcgtcggtttgcctacacgtcccgcagggcagtatagacgcatacgcatcctccaattgctggaacgaattcagttgtatcaatccgctcccgccgaccgctgttctcacccacgaccgcgtagttccagccgtcgattcttatgttagggcggcggtaatagcgccggtatcattattaaccgccgagttcacggcgggccctaatccggcgggtaaatcttccggcgtgatcaatttcttccgtaacggcagccgcgtggcatcggcggcattgtcaatttacgacgcgacgggcaacgcggtcagaaagatcggtatcaatgacaatgcggcaatcggcggcaataacagacgccgtttaggttcgtgggacttgacggacaggaaaggccgcccggtgcctgccgggatgtatttggtcaagggtgtactgaagacatccggcggtaagatagagaaggtgtcgttggccgtgggggtgaggtaa

SEQ ID NO: 62970 - protein, 844 aa, Unknown
  Obtained from environmental sample
  DOMAIN (1)...(360): Peptidase C10 family
  misc_feature (1)..(844): Xaa is any amino acid
MERKRGGDVGKIKRWAAHKAKASFTPYYVFEKGNNGGFIIVSADDIAAPILGETDRGVFDKDSMPPALVWLLGTYERQIEEAVKSGGAQDSGTKALWEQAAQNSGAALLRSSAAAATRYPQQLLSTAWGQGEPYNLKTPLDGDKRSEAGCVAVTMAQIMKYWRYPDSGAGESKAYSTSTKEINVPSVNFKIPYNYADMLDDYPTASSGTAYQREAVSTLIYHIGVSVGTDYTQTESTAYSYEAETALVRNFKYDKSIRYIESIESVQSWVSDNSLENDWKDLILGQIENNSPVYYSGYDTTNGILNGHAFVIDGYDDRIDKFHINWGWGGKYDGFFALTALNPGTQQFYNNHTMMINIMPRTNDNPPSQIKVTDFNVSVTPITISARITAKLNYGNDYTGLIGFAVTYGDSVGMVLDSANLGIYNAHDYSSSTYTINYLNRIITKRLGADTPVGDVTLRPVAKQLSEDAWTPVGETRQKISIPQPINIIDEWDCGEIPRTVTAILSEDGTLTIYGSGSMAYYGLYLGSRSNAPWFDSSGLITKVIIAESVTNIGGAAFAYCKNLTSVTIGNSVTDIEPYAFLGCANLTSVTIGSSVTDIGEYAFFRCANLTSVTIPNSVTYIGAGAFAECTNMTSVTIGKSVKSIGYGAFEYCNNMTSVISLNPIPPSVEQNYAFFFYGADNSSVCLHVPQGSIDAYASSNCWNEFSCINPLPPTAVLTHDRVVPAVDSYVRAAVIAPVSLLTAEFTAGPNPAGKSSGVINFFRNGSRVASAALSIYDATGNAVRKIGINDNAAIGGNNRRRLGSWDLTDRKGRPVPAGMYLVKGVLKTSGGKIEKVSLAVGVR

SEQ ID NO: 62971 - DNA, 375 bp, Unknown
  Obtained from environmental sample
  misc_feature (1)..(375): n is a, c, g, or t
atgaaaaaatacaatggcgataaacaaatgacatctgtttggcagatcggtttatgtatcggggaagaacgtttaaaaggtgaagacggaaaaaaggcgcattcgactcaaaaaccggaagagcttcttaaaagggtgatcctgtctacgacgaagcagggggatgttgtactcgaccctttttttggaacgggtacgaccggcgctgtcgcaaagaaattaaaacgcaattatataggaatagagagagaaccggaatacataaaacttgcgaaaaacagaattgctcacattaaagaatattttaaagaagcagactgggtagaagaagaaaaagaaaaacaaataggagttccttatgaaaacaaaacataa

SEQ ID NO: 62972 - protein, 124 aa, Unknown
  Obtained from environmental sample
  DOMAIN (4)...(93): DNA methylase
  misc_feature (1)..(124): Xaa is any amino acid
MKKYNGDKQMTSVWQIGLCIGEERLKGEDGKKAHSTQKPEELLKRVILSTTKQGDVVLDPFFGTGTTGAVAKKLKRNYIGIEREPEYIKLAKNRIAHIKEYFKEADWVEEEKEKQIGVPYENKT

SEQ ID NO: 62973 - DNA, 2871 bp, Unknown
  Obtained from environmental sample
  misc_feature (1)..(2871): n is a, c, g, or t
atgaaaacaaaacataatttgctgttcaatatcgcccaaaccacggtcttcaccattttactgtcggtttttcttaccgcctgttcaaactgtcaggattccgccatgtggggagaccttggcaaaccctccgatccggttccggttaaggaaaacctcagaaccggggttctgcccagcggcctacgctattatatccttgaaaattccatgccggaaaaccgcgcgtatcttacgctggcggtgaaagccggctccgtgcttgaggaagacgacgagcaggggcttgcccattttgtcgagcatatggcgtttaacggtacggagcgtttccccgaatcaaaactggtaagttaccttcgctcgctgggaatgcgtttcggcccggaggtaaacgcctatacttcctttgaccagaccgtgtacggcattgaagtgccggttgaaaccgacgagcagaagacaaggcgtattcccgaaacggcgcttgccgttattgatgactggacgcgggcggtaactttttctcccgcggatgtggacgatgaacgccctgttataatggaagaataccgcacgcggcttggcgcctgggagaggctcaggcagaaatggcttccggcgttgttcaggggatcgccttatgcaaaccgtatgcccatagggctgccggaaattatcgaagaggcgccggcgtcccggctggagggcttttacaggaagtggtacaaggcggataacatggccctgatcctcgtgggcgattttgacggggaggcgcttgaagcgtcgttaaccggtcatttcttgatagagaaaccggcggagcctgtgaaccggcctttttacgatctgcccctgccaaaaaaagggaacctggaaatccttacccttaccgactccgaactgaccgcctcttatataaacctttattttaaacgcggcccgcaggcgagacgggacgatctctcgtattaccgcggtgaaatcattgactacctcatcgacacaatgctgggattgcgttttgaagaggcgcttctgaaacctgaaacccctcatgtaagcgttaatgcgggaaccgcgagttacgcggcgtcttcgcggttttatgttttaatgtcccagacgaaaacgggcagcgccgaggcgagccttgaggatctgctgaaaataaaagaaactatgctccgttacggctttacagattcggagatagcgacagcggcggaaatcctggtttccgatctgcagaaaatggttcaggaaaaggacaggcagcattcacaaaagtacgttaactcgctgaccgattattatcttaaaggcggcaattacgccgatattgaatgggagcttaatgcggtcaagcggatgctgccgcatatcaaagcaaaagatattaacgctgttatcaaagactatttcgcgtcagacgacattcaggtgtttatctttgcgccggattctgaacaggacagcctgccggatgaggcgcgaatcaaacagatgataatggaaagcataaaaatgaacattgccgcgccaaagtcaaaggccgtcgaaggcgggcttttgctgtcctcgcccgaacgcggcgcgatagtttcggaatcaaccgacgcggatacaggcgcgatcatctgggaattaagcaacggcgcgcgtgttatccttaaatcgaccaaaaataagaacgacgagattattatgcacgcaatggctctcggcggaacaagcagtgttcctctggaagacgacgtatccgcaagcctcgccatagaaatgacgcangtttccggcctgggtccctggccgcgccccgatttgacaataaaactcgccggaaaacaggtatccctttcgcagttcgtttacagttattaccgtggtttcagggggttcctccattccggcgatctaaaaacattttttgaaatgctttacctgacttttacagaccagcgcatagacggcgaggcggtagaggccatgatggatcagtataagacctcgctcgccctcagaagggaagacccgcatgcggttttttccgatgagatcagcaggacgatctatagcgggaacccgcattttaagcccctggaacttgacgatcttcccaaagcaaataatgacgccgctcttgcctttatccgcaagggtcaaaaccccgccgattatacttttatattcacggggaatctggaattaaaaacgatgcgggaatatgtcgaaagttatctcgcttcaatcccgcggggtgaaagctggaatgcctggacggatcttgatgttacgcgtccgggaaaagttgaaaatatcgtttacaaaggaaaggaagaaaaaagcacagtttacatggcatggttttccaaagccgcctttagcgacgaacttagcgccgcatcccaggtgttaaacgaatatcttgatataaaacttgatgatgagatccgtgaaaaactcggaggcgtctattcgatttcttccggcgcgtacgcctcgccggttccccagggcgagctttccatgcaggtatattttagctgcgatccaaagcgggtaaaggaactgcaaaccgccgttatcgtgatattgaatcagacagcggatggcgttatagaccgcgacacttttacgaaagccgtggaggcccccaagaaagagtgggaagtctcgattcagagtaactcctacatcgcccagagctacgccaattcgtcggtattgctgaaccttccgctgtcgcggctggacaggcggccaaaattgttcgatgccgtaacccaggccgacattcagagggtatgcgcccagcttttacaaagcaacggtccggcgattgtggtattactgccggaaaagtaa

SEQ ID NO: 62974 - protein, 956 aa, Unknown
  Obtained from environmental sample
  SIGNAL (1)...(27)
  DOMAIN (229)...(413): Peptidase M16 inactive domain
  misc_feature (1)..(956): Xaa is any amino acid
MKTKHNLLFNIAQTTVFTILLSVFLTACSNCQDSAMWGDLGKPSDPVPVKENLRTGVLPSGLRYYILENSMPENRAYLTLAVKAGSVLEEDDEQGLAHFVEHMAFNGTERFPESKLVSYLRSLGMRFGPEVNAYTSFDQTVYGIEVPVETDEQKTRRIPETALAVIDDWTRAVTFSPADVDDERPVIMEEYRTRLGAWERLRQKWLPALFRGSPYANRMPIGLPEIIEEAPASRLEGFYRKWYKADNMALILVGDFDGEALEASLTGHFLIEKPAEPVNRPFYDLPLPKKGNLEILTLTDSELTASYINLYFKRGPQARRDDLSYYRGEIIDYLIDTMLGLRFEEALLKPETPHVSVNAGTASYAASSRFYVLMSQTKTGSAEASLEDLLKIKETMLRYGFTDSEIATAAEILVSDLQKMVQEKDRQHSQKYVNSLTDYYLKGGNYADIEWELNAVKRMLPHIKAKDINAVIKDYFASDDIQVFIFAPDSEQDSLPDEARIKQMIMESIKMNIAAPKSKAVEGGLLLSSPERGAIVSESTDADTGAIIWELSNGARVILKSTKNKNDEIIMHAMALGGTSSVPLEDDVSASLAIEMTXVSGLGPWPRPDLTIKLAGKQVSLSQFVYSYYRGFRGFLHSGDLKTFFEMLYLTFTDQRIDGEAVEAMMDQYKTSLALRREDPHAVFSDEISRTIYSGNPHFKPLELDDLPKANNDAALAFIRKGQNPADYTFIFTGNLELKTMREYVESYLASIPRGESWNAWTDLDVTRPGKVENIVYKGKEEKSTVYMAWFSKAAFSDELSAASQVLNEYLDIKLDDEIREKLGGVYSISSGAYASPVPQGELSMQVYFSCDPKRVKELQTAVIVILNQTADGVIDRDTFTKAVEAPKKEWEVSIQSNSYIAQSYANSSVLLNLPLSRLDRRPKLFDAVTQADIQRVCAQLLQSNGPAIVVLLPEK

SEQ ID NO: 62975 - DNA, 765 bp, Unknown
  Obtained from environmental sample
  misc_feature (1)..(765): n is a, c, g, or t
atggcggctgtgcgcgcgaaaggaaagaccatactcaccaacgcggccagcgaaccgcacgtgcaggacctctgcagaatgcttgtttcaatgggcgcgcaaatagaaggcataggctcaaacatactgactatcaacggtgtaaaaaaactttccggctgcgattatacaataggagcggactacatggaggtcggttcctttatagggcttgccgccgtcaccggaggagaccttcacattgaggggactaaacctcaggatctgcgccccacaaaaatagcctttggcaaactgggcatttcatgggcgcatgaggggacaaccgtccatgtccccccaaaacagccaatggaggttaactgcgatattggcggcatgatccccaagatagacgacgcgccctggcccggctttcctcccgatcttaccagcattatgaccgttgttgccacgcaggtaaaaggaacggtgttaatccacgaaaaaatgtttgaatcgaggatgttctttgtggacaagctcataggcatgggggcgcggatagtgttatgcgatccccaccgggccgtggtttccggccctgcgaagcttcacggctccgagcttatcagccccgatgtccgcgccggcatggctatgctcatagccgccctctgcgcggaagggaggagcgttatacgcaacgtctaccagattgagcgcggctacgagcgcctggtggaaaggctttccaccctcggcgcgttacttttccggcagtaa

SEQ ID NO: 62976 - protein, 254 aa, Unknown
  Obtained from environmental sample
  DOMAIN (1)...(244): EPSP synthase (3-phosphoshikimate 1-carboxyvinyltransferase)
  misc_feature (1)..(254): Xaa is any amino acid
MAAVRAKGKTILTNAASEPHVQDLCRMLVSMGAQIEGIGSNILTINGVKKLSGCDYTIGADYMEVGSFIGLAAVTGGDLHIEGTKPQDLRPTKIAFGKLGISWAHEGTTVHVPPKQPMEVNCDIGGMIPKIDDAPWPGFPPDLTSIMTVVATQVKGTVLIHEKMFESRMFFVDKLIGMGARIVLCDPHRAVVSGPAKLHGSELISPDVRAGMAMLIAALCAEGRSVIRNVYQIERGYERLVERLSTLGALLFRQ

SEQ ID NO: 62977 - DNA, 447 bp, Unknown
  Obtained from environmental sample
  misc_feature (1)..(447): n is a, c, g, or t
gtgatcgcggtcttggagagtatatatcggcggtatgttacacgacatgggaaaatcgttttttccaacgtacatcccgaactgttagacaatataaaaagtttctgtaacgaaaaaaatcttcccgtatctacgtttgaagatatttcagcgggcatgaaccacgcggaacttggcgcgcttatcgccaaaaaatggaatttcccggataggttaataacggcaatccggtatcatcacgatcccgagtccgcgccttttgactgcaaagatttggttgacactatttatcttgcaaatatgttttgcgaatatgaaaacaataacatcagttttgatcagcttgattcaggtccgcttgaaaatttcggattcaaaaatcaaaaacaaattgacgcgttaattgaacggctttccgccggatttatgaaagaaaggcagctctga

SEQ ID NO: 62978 - protein, 148 aa, Unknown
  Obtained from environmental sample
  misc_feature (1)..(148): Xaa is any amino acid
MIAVLESIYRRYVTRHGKIVFSNVHPELLDNIKSFCNEKNLPVSTFEDISAGMNHAELGALIAKKWNFPDRLITAIRYHHDPESAPFDCKDLVDTIYLANMFCEYENNNISFDQLDSGPLENFGFKNQKQIDALIERLSAGFMKERQL

SEQ ID NO: 62979 - DNA, 441 bp, Unknown
  Obtained from environmental sample
  misc_feature (1)..(441): n is a, c, g, or t
atgtctttaagccgaacctgcgtcccattgataaaatattcgctttctccggagcggtacagcctgcgcttgatttcgatttccggcatatccatcggcagaagccccgtttcgtttgcgatggcgagggtaacttccgccacgttgaggggctttctggcttccgttccgccgaagataacatcttccattttctcggcgcgaagcgattttatcgcgtgttcgcccaagacccatttgattgaatcaactacgttggattttccgcagccgttcggacccaagagcgcggtgataccgtcgttgaattctatttctgtgcgatcagcaaaagatttgaagccgaggatcgtaagccgcttaagaaacataaatcagagctgcctttctttcataaatccggcggaaagccgttcaattaacgcgtcaatttgtttttga

SEQ ID NO: 62980 - protein, 146 aa, Unknown
  Obtained from environmental sample
  misc_feature (1)..(146): Xaa is any amino acid
MSLSRTCVPLIKYSLSPERYSLRLISISGISIGRSPVSFAMARVTSATLRGFLASVPPKITSSIFSARSDFIACSPKTHLIESTTLDFPQPFGPKSAVIPSLNSISVRSAKDLKPRIVSRLRNINQSCLSFINPAESRSINASICF

SEQ ID NO: 62981 - DNA, 1323 bp, Unknown
  Obtained from environmental sample
  misc_feature (1)..(1323): n is a, c, g, or t
atgtttcttaagcggcttacgatcctcggcttcaaatcttttgctgatcgcacagaaatagaattcaacgacggtatcaccgcgctcttgggtccgaacggctgcggaaaatccaacgtagttgattcaatcaaatgggtcttgggcgaacacgcgataaaatcgcttcgcgccgagaaaatggaagatgttatcttcggcggaacggaagccagaaagcccctcaacgtggcggaagttaccctcgccatcgcaaacgaaacggggcttctgccgatggatatgccggaaatcgaaatcaagcgcaggctgtaccgctccggagaaagcgaatattttatcaatgggacgcaggttcggcttaaagacatacgcgaactttttttgggacaccggcgtaggcagaccgcctactcggtaatggaacagggaaaaatcgatcagatactttcttcaaaaccggaagaacggcgttatttgtttgaagaagcggcgggcattacccggtacagggaacggggagcggaggcggagaggaatcttgccaaaaccgaggaaaatgtgcgtcaggttgatttgatactgaacgaagtaaaacgcgcccatgacagtttaaaaatgcaatcggagaaaacgcttaaattccgcacgctccgcgatgaaatttttaactatgaattggatattcaacttttacgtttaaagcaatttaagtatggaagagacgaaaaaaacgaaactctaagacgcaggactcaagaccgcgacaggatacgcgcggaaatggaagcggaaaacacggcattggaagcgcacatggacgaagtaaactccatggaagcgcggcttgtggaacttcaaaaaaatatttacggtcttgcgctggaaaaaaacgccagagaaaacgaagtgcgcctgttcaacgaacagcgcggcgagaataaaattaaaatcggtcaaaatgaagaacgcgaaaaacaggctgttcaaaaaataacggaactaaacgccgatgccgagggacaggacgcggttgttcaagaccttagaaaacaatgcgaaagcatagatgaaaatatccgctcctttgaagaaaatatccagcttgccgcgaggcgcatcagtgaaaacgacaatgaatcgcacagggcggaaaatgaaattcacggcatagaaaaagaactcaccgaccttgaaaaagaccttgcaaaaataacggacgacattgtagcggaattggacgccggtcttaaaaagcgggctattccgcggcggaacgcaaaaacgcggaagaagctttacgcgaaacgcttgaccgcttaa

SEQ ID NO: 62982 - protein, 440 aa, Unknown
  Obtained from environmental sample
  DOMAIN (2)...(400): RecF/RecN/SMC N terminal domain
  misc_feature (1)..(440): Xaa is any amino acid
MFLKRLTILGFKSFADRTEIEFNDGITALLGPNGCGKSNVVDSIKWVLGEHAIKSLRAEKMEDVIFGGTEARKPLNVAEVTLAIANETGLLPMDMPEIEIKRRLYRSGESEYFINGTQVRLKDIRELFLGHRRRQTAYSVMEQGKIDQILSSKPEERRYLFEEAAGITRYRERGAEAERNLAKTEENVRQVDLILNEVKRAHDSLKMQSEKTLKFRTLRDEIFNYELDIQLLRLKQFKYGRDEKNETLRRRTQDRDRIRAEMEAENTALEAHMDEVNSMEARLVELQKNIYGLALEKNARENEVRLFNEQRGENKIKIGQNEEREKQAVQKITELNADAEGQDAVVQDLRKQCESIDENIRSFEENIQLAARRISENDNESHRAENEIHGIEKELTDLEKDLAKITDDIVAELDAGLKKRAIPRRNAKTRKKLYAKRLTA

SEQ ID NO: 62983 - DNA, 654 bp, Unknown
  Obtained from environmental sample
  misc_feature (1)..(654): n is a, c, g, or t
ttggctcctcagggaattatcacaaaaaaacgctcgttggattcacagataaggaacgcgaaagacggtattgaagaaagacgccagcgcattaaaaaattgcgcgatgacaatgtcaaccttatggcaaaaattgacgaataccgcgcaactctggaaaacttgaaagtgaaccgcgcgcaaatgaacgtccgcgcacaatccgccgaagatcaagcgcgtcttataaggcgcgaattgtccggacaggaagggcttttaaaaaacatacgcgatgaactttccctgtaccgcaaaagattggaagaaattaacgagcgtatcacgtcggctcaaactgaaattgccggaattgaggaaaaaacaaaagcgtattcctccgatttggaaaaattggaaaacgatattcgcaaaagaaacgataatgtcgccagtaaaaaggaaacgattaacaagcggactttggaactttccaaagtgcaggaatcactggaaaaaattcatttggaacttgtccagtccgacatggaaataaaaaacattcaggaaaatttcagggagactcattccagagatttaatggaatttgaagagcgcattttcagcattacaaccgctccagctttntgcgcgaacagcctcggccgaatctga

SEQ ID NO: 62984 - protein, 217 aa, Unknown
  Obtained from environmental sample
  misc_feature (1)..(217): Xaa is any amino acid
MAPQGIITKKRSLDSQIRNAKDGIEERRQRIKKLRDDNVNLMAKIDEYRATLENLKVNRAQMNVRAQSAEDQARLIRRELSGQEGLLKNIRDELSLYRKRLEEINERITSAQTEIAGIEEKTKAYSSDLEKLENDIRKRNDNVASKKETINKRTLELSKVQESLEKIHLELVQSDMEIKNIQENFRETHSRDLMEFEERIFSITTAPAXCANSLGRI

SEQ ID NO: 62985 - DNA, 438 bp, Unknown
  Obtained from environmental sample
  misc_feature (1)..(438): n is a, c, g, or t
atggaaaagttaaaagatggtgatttaataatagcgagtgaattatcgaggcttggaagatcaatgtatatgattatgcggatactggaatactgcatgaaaaacggaattaaagtaattacagtaaaagacaattatgagttagttgacaatattcagtccaaggttttagcgtttgcgttttcaattgccgcggaaattgaaagggatatgatctcacgtcgcacaaaagaagcgttatcccgttgtaagttaaacggaattaaattagggcgtaaaccgggtaaagctgtcaaggtaaaattaacagggcatgaagaagaaatacgagatatgcttcgtaaaggaaaaaacaatgttgaaataggtaaatggttcggcgtacataaaaaaactgtaaggatatttatccgtgagcggttatctcaattagagtaa

SEQ ID NO: 62986 - protein, 145 aa, Unknown
  Obtained from environmental sample
  misc_feature (1)..(145): Xaa is any amino acid
MEKLKDGDLIIASELSRLGRSMYMIMRILEYCMKNGIKVITVKDNYELVDNIQSKVLAFAFSIAAEIERDMISRRTKEALSRCKLNGIKLGRKPGKAVKVKLTGHEEEIRDMLRKGKNNVEIGKWFGVHKKTVRIFIRERLSQLE

SEQ ID NO: 62987 - DNA, 819 bp, Unknown
  Obtained from environmental sample
  misc_feature (1)..(819): n is a, c, g, or t
ttgatgatggcgaaccagttcatctcaacgggcggtattgactatgccagggagcttttggaaaaatcacttggaagccaaaaagcgattgacattatcaaccgcttaacgtcgagcctccaggtgcgcccattcgattttatccgcagaactgaccccgcgcaccttttgaactttatccaacaggaacacccgcagacaatcgcccttattttggcgtacttggaaccgaacaaggcttccattattctgcaaaacctgccgcatgaggtacagagtgatgtggcgcggcgtatcgccacaatggacagaacaagccctgaagtgttacgcgaagttgaacgcgtacttgagaagaaactttcatcgttgtcaagtgaagactacaccgcggcgggcggcgttgagagcatcgtagaaatattgaaccttgttgaccgcgcctctgaaaagcagattatcgaagcgttggaagacgaagatccggaactcgcggaagagatcaagaagaggatgttcgtattcgaagacatcgttatgctcgacgaccgcgccattcaaaaggttatgcgcgaagtcgattcacaggaactcgcgaaagcgcttaaatcggttgactcggaagttcaggataagatattcaagaatatgtcaaaacgcgccgcaagcatgctcaaggaagatatggagtacatggggccggtacgcttgaaagacgttgaagaagcgcaacaaaagatagtgtcaattatccgccaccttgaggataccggtgaaatcgtcgtcgcccgcgccggtgaggatgagttagttgtataa

SEQ ID NO: 62988 - protein, 272 aa, Unknown; identical to SEQ ID NO: 49780
  Obtained from environmental sample
  DOMAIN (154)...(263): FliG C-terminal domain
  misc_feature (1)..(272): Xaa is any amino acid

SEQ ID NO: 62989 - DNA, 645 bp, Unknown
  Obtained from environmental sample
  misc_feature (1)..(645): n is a, c, g, or t
gtgctggcgcgggagctgtgcctggaagaattaaagtcgatcagggccgacacaaatgttgagatggaagttttcgtacacggcgcgttatgcgtcagcgcttcgggcctctgccttttttcaagcttcctgggcggcaagtccgccaacagggggatgtgcacccaggcctgccgccgcctgtacaaccatagtcaggagagcggctattatttcagcccctctgaccttcagcttctggagcagcttcccgatcttgccgccgccgggataaacgcgctaaaaatcgaaggccgcatgaaaagcgcggattatgtcggcgcggttacaagcgcctaccggctcgtacttgacgcgatcgccgagggcgatgaagaagaaattttgcggagtatcgcaagggggcaggaaattctacgcggcgactttgcaaggagtaaaactaaattttactttttttcaacaacccagtccccactccctactccccattccccaattgactggctgaaccctgagcaggacggcggaaccggcattgcccttggcgttatacgcaaaatccgcggcggcggtaacagcgcgagactgtctgaaaataatattttaccacagagttacacggaattacacggaggaggataa

SEQ ID NO: 62990 - protein, 214 aa, Unknown
  Obtained from environmental sample
  DOMAIN (2)...(157): Peptidase family U32
  misc_feature (1)..(214): Xaa is any amino acid
MLARELCLEELKSIRADTNVEMEVFVHGALCVSASGLCLFSSFLGGKSANRGMCTQACRRLYNHSQESGYYFSPSDLQLLEQLPDLAAAGINALKIEGRMKSADYVGAVTSAYRLVLDAIAEGDEEEILRSIARGQEILRGDFARSKTKFYFFSTTQSPLPTPHSPIDWLNPEQDGGTGIALGVIRKIRGGGNSARLSENNILPQSYTELHGGG

SEQ ID NO: 62991 - DNA, 843 bp, Unknown
  Obtained from environmental sample
  misc_feature (1)..(843): n is a, c, g, or t
atggctaccctgaaaggcaagcgtttttatgacggtctgatctttcatcgagttattcaaaaggctancggagacggacaggattttatgatacagggaggcgacccgcagggaaacggcaggggcggtcccggttatgatttcccggacgaaatagttccggctttaaagcacgacaaacccggtactttaagcatggcaaacgcgggtcccggaacgaacggcagtcagttttttatcacgatagttcccactcctcatttggacgggaaacatacggtttttggttatgtcgttcaggggcagaatatagtaaatacgacaaagcagggcgaccgtattcaaaaaattaccataatacgcaacggaacggacgctaacgcgtttaaagccgatcaggaaaattttgacagattgcttgcgcaaatgaaatcggcggaagagggcaaactgcaggggcaaagacaaagagatattgccaaaataaaagccgattttcctggcgcccagcaaacaaagtcgggcatttattacattattcaaaagcagggaacaggcgaaaagccggctcgcggtaagacggtgagggttcattatacgggcaaactgcttaacgggactgtttttgacgattccaacatgagaggtcagccattggaatttgccgcaggaaccggcagggttattcccggttgggatgagactatccttgacatgaaagtcggcgagaaacggcttgtcgttattccgccagagcttgcctacggagacagggcggttggcggcgtaattccggcaaacagctttttggtttttgaaatggaactggtaggtattcgttga

SEQ ID NO: 62992 - protein, 280 aa, Unknown
  Obtained from environmental sample
  DOMAIN (1)...(125): Cyclophilin type peptidyl-prolyl cis-trans isomerase/CLD
  misc_feature (1)..(280): Xaa is any amino acid
MATLKGKRFYDGLIFHRVIQKAXGDGQDFMIQGGDPQGNGRGGPGYDFPDEIVPALKHDKPGTLSMANAGPGTNGSQFFITIVPTPHLDGKHTVFGYVVQGQNIVNTTKQGDRIQKITIIRNGTDANAFKADQENFDRLLAQMKSAEEGKLQGQRQRDIAKIKADFPGAQQTKSGIYYIIQKQGTGEKPARGKTVRVHYTGKLLNGTVFDDSNMRGQPLEFAAGTGRVIPGWDETILDMKVGEKRLVVIPPELAYGDRAVGGVIPANSFLVFEMELVGIR

SEQ ID NO: 62993 - DNA, 1047 bp, Unknown
  Obtained from environmental sample
  misc_feature (1)..(1047): n is a, c, g, or t
gtgtttattatgcgtttctttactcggcggggatggacgctgttgttgacggcggcggtcattattggggcgattagtatatcttacggcgccgaccggccgttagaattggtgggagattggattcttttgaaaggatacaacaagagcagtcattggaccgacggtgtgaatacgaattttccgcaaaccggtataacgctgtatgccgacggaacaggcgtgtgggacgggaatgacaggggtcttaggtggaaaaccgaaaataatcgtattacatttcaaagaggctaccttgatatgaccgccggttataatgtttcgggttatgagctcattcttacgtatgaagtcaacgaatccatgtatggcagtaatctcgttaaaaaaaacgcgttattcgtaaagaaagacaaattggccgagtacagaaaaatgaaagatcaggaagaggaactaaaaaataaaaaagaacctatttattttacggatccaagggacggtcaaacgtatcgaaccgtaaagataggcggcaagacgtggatggcgcagaatctgaattactggcctaaacccggtaagtccaactgctatgacaaaaatatttccaattgcgctaaatatggcagactgtatgactggaagacggcgaaaaccgcttgtccggccggttggagtctgcccaccgataaggatttgggcaaattgataggcgccgccggcggttgggatgatgccggaaggaggctgaaagcgaaaagcgggtggaatgacgataacggtaaaagcggtaacggcgtagatgtctacggcttttcggctctgcccggcggcgcggccggcggcaaaaatttctatgatgccggcaacgagggttactggtgggtattgccggtagatgaagagggtaaccttagcgagtactcgttcaatatccttaatatcttgcaaaatggcaccataaacgtaataagttccgagtccgattactttatttgcggaggagccaacgacattggtcgctctattcgttgcgtccaagattag

SEQ ID NO: 62994 - protein, 348 aa, Unknown
  Obtained from environmental sample
  SIGNAL (1)...(26)
  misc_feature (1)..(348): Xaa is any amino acid
MFIMRFFTRRGWTLLLTAAVIIGAISISYGADRPLELVGDWILLKGYNKSSHWTDGVNTNFPQTGITLYADGTGVWDGNDRGLRWKTENNRITFQRGYLDMTAGYNVSGYELILTYEVNESMYGSNLVKKNALFVKKDKLAEYRKMKDQEEELKNKKEPIYFTDPRDGQTYRTVKIGGKTWMAQNLNYWPKPGKSNCYDKNISNCAKYGRLYDWKTAKTACPAGWSLPTDKDLGKLIGAAGGWDDAGRRLKAKSGWNDDNGKSGNGVDVYGFSALPGGAAGGKNFYDAGNEGYWWVLPVDEEGNLSEYSFNILNILQNGTINVISSESDYFICGGANDIGRSIRCVQD

SEQ ID NO: 62995 - DNA, 750 bp, Unknown
  Obtained from environmental sample
  misc_feature (1)..(750): n is a, c, g, or t
atgaatttgtttactcggccgggacgggggctgttgttggcggcggtagtaatcggagcggtctgcgtatccagcgccgttgcgcaaggaaatcccggatcaggcacgttcacagacagcagagacggtcaaatatataaggccgtacggataggcggcaagacatggatggcgcagaatctgaattatcggccgcaacccggcagatccggctgttatgacaaagatattgccaattgcaacaaatacggcagattgtacgactggaagacggcaatgatcgcttgtccgatgggctggcatttgcctacggttcaggagtgggataatctgatgatggcggtgggcggtaaacgggcggaggagtgtgatgatgtagaaggatgcggttgcgctactatttgggctaatacaagcgttaaactgaaagcacgtagcgggtgggctaatgaaaactattcaagcgattcggacggtgaggacggtgaaggcggttcggttcgtatagtcggtacggacaattacggatttgcggcattaccaggcggcatgcgcagtcccgatggcacatttacctccgccggccaacacggcatgtggtggacagccacagaaggtacaggtagttggtgggtggcgccggatgaagatagcgacaacgcggactatcgaggcatgtactatgacagcgtgagcgagggcaacatcgacaagggttacagtttttccgtacgttgtgttcaaaattaa

SEQ ID NO: 62996 - protein, 249 aa, Unknown
  Obtained from environmental sample
  SIGNAL (1)...(26)
  misc_feature (1)..(249): Xaa is any amino acid
MNLFTRPGRGLLLAAVVIGAVCVSSAVAQGNPGSGTFTDSRDGQIYKAVRIGGKTWMAQNLNYRPQPGRSGCYDKDIANCNKYGRLYDWKTAMIACPMGWHLPTVQEWDNLMMAVGGKRAEECDDVEGCGCATIWANTSVKLKARSGWANENYSSDSDGEDGEGGSVRIVGTDNYGFAALPGGMRSPDGTFTSAGQHGMWWTATEGTGSWWVAPDEDSDNADYRGMYYDSVSEGNIDKGYSFSVRCVQN

SEQ ID NO: 62997 - DNA, 882 bp, Unknown
  Obtained from environmental sample
  misc_feature (1)..(882): n is a, c, g, or t
atggcgagattcggcattccaaaagcaatagaactgcgtggaaacgccgatgactatcattggcgaggtagagcttattttgagagaagtagtccttttgtatttatacatattcacgattttgattgcgaagaagccgcaattcaagatttcacaaaagcaatagaactacgtggaaacgccgatgattattcttggcgtggaaacgtttattattcaaacaacaaatatgaagccgccatagaagacttcacaaaagcaatggaactgaactatcatagaaacgccgatgattactataatcgcggagaagcttacaggtggatagacaatcaagaagctgccattaaagacttaacaaaagttatagaattgagagacaaagaataccccgatgattacgatatgcgtggcagagcatactttcaaaatggcgactatgccgccgccatagaagatttcacaaaagcaataaaattaaaaagtagaacaaatcgtcacgcttactcttttcgagcaacagcccactttgaaaatggcgactatgccgccgccattaaagacttcacaaaagttatcaaattaagagatgtagaaaattccgatgattactattggcgaggcagagctcactttcaatttggcaactacgctaccgccatagaagacttcacaaaagcaataacattgcgacataaaaaaaatgccgatgaccgttattggcgtggcttttctcacaaaatgaacggcagcaattactacgcaatgaaagacttaacaaaagcattgaaaataaaacccgattttgaagatgcgaaaaaactaataagagaaattaaatccacattaccagaaccaccattccccgtgccattgccctag

SEQ ID NO: 62998 - protein, 293 aa, Unknown
  Obtained from environmental sample
  DOMAIN (201)...(234): Tetratricopeptide repeat
  misc_feature (1)..(293): Xaa is any amino acid
MARFGIPKAIELRGNADDYHWRGRAYFERSSPFVFIHIHDFDCEEAAIQDFTKAIELRGNADDYSWRGNVYYSNNKYEAAIEDFTKAMELNYHRNADDYYNRGEAYRWIDNQEAAIKDLTKVIELRDKEYPDDYDMRGRAYFQNGDYAAAIEDFTKAIKLKSRTNRHAYSFRATAHFENGDYAAAIKDFTKVIKLRDVENSDDYYWRGRAHFQFGNYATAIEDFTKAITLRHKKNADDRYWRGFSHKMNGSNYYAMKDLTKALKIKPDFEDAKKLIREIKSTLPEPPFPVPLP

SEQ ID NO: 62999 - DNA, 645 bp, Unknown
  Obtained from environmental sample
  misc_feature (1)..(645): n is a, c, g, or t
atgcttcgctttgatatgagcgagtatatggaaaaacacagtgttgcaaggctcataggtgccccccctgggtatgtgggctacgatgagggcggtcagctaacggaggcagtccgtacgcatccttatgccgtgttgctttttgacgaggtagaaaaagctcaccccgatgttttcaacgccttgctgcaagtgttagacgaagggcatttaacagacggcaaaggcagaaaggtgaatttcaaaaacaccctgattttgatgacatcaaatttaccggagaaagacttgaaaacatttttccgcccagagtttttaaatcgtttggataacactttggtattcaaatctttggaaaagagcgagctaatccaaattgcacagattaaattgaacgctcttgcaaagcggttaaatgcgcagagaatagaggtcgtttttgagagtgctgttgcagaagccattgcagaaaacgcttgcgattcacaatatggagcaagaccaattcagcggtatattcaaaagcatttggaatctttcctttcaaaagaaatcattgcaggaaagataaaagcggatagccgaattacggttgattttaaggggggagaatggaagatatgtgagtctccagcaactgaatag

SEQ ID NO: 63000 - protein, 214 aa, Unknown
  Obtained from environmental sample
  DOMAIN (1)...(112): ATPase family associated with various cellular activities (AAA)
  misc_feature (1)..(214): Xaa is any amino acid
MLRFDMSEYMEKHSVARLIGAPPGYVGYDEGGQLTEAVRTHPYAVLLFDEVEKAHPDVFNALLQVLDEGHLTDGKGRKVNFKNTLILMTSNLPEKDLKTFFRPEFLNRLDNTLVFKSLEKSELIQIAQIKLNALAKRLNAQRIEVVFESAVAEAIAENACDSQYGARPIQRYIQKHLESFLSKEIIAGKIKADSRITVDFKGGEWKICESPATE

SEQ ID NO: 63001 - DNA, 864 bp, Unknown
  Obtained from environmental sample
  misc_feature (1)..(864): n is a, c, g, or t
ttgcagcaaatgttgatttgnctgtgtttaaaaaatgccgttgcaaacaatggcgttgtgcgtgganttgcggcaaaaggctgcgtggatttcactcgcaagcaaatagacgatttaaccgagtttgtcgggcgctatggctcaaagggtttggtgtggatgagagttaaggataaccacgaagtagaaacacaggttgcaaaattctttacaaaagagcagctagaggctcttcgcaatgctattcaaggcaaaaccggagatatgcttttctttatcgcaggttcagaaaaaattgctgcaactgcaatggggcatttgcgtttggaaattgctcgcataaaaggtttaatggatccaaagctgcgcaaattcgcttggataaccgagttcccaatgtttgaatacagcgaaacagaaaaacgctatatgtctatgcaccacccattcacaagccctctccccgaacacttggatatgatgctcggcggcaacctcaaagactgcaatgcgcaggcttatgatttggtgttgaacggagtggaaataggcggcggctctgtgcgtattcataaccccgaagttcaagaaaaggtgtttcgtttattaggtctttcagaagaacaggttaagcagaagtttggattttttgtggatgcttttaaattcggtgctcccccgcacggcgggcttgctcttggcttggatagagttgttgcaactttagaaggtcaagattccattcgcgattttattgccttcccaaagaacacaagcgcaagttcgccaatggatcaaagcccaagcgaagtggatcctattcagttgctggagactcacatatcttccattctccccccttaa

SEQ ID NO: 63002 - protein, 287 aa, Unknown
  Obtained from environmental sample
  DOMAIN (4)...(259): tRNA synthetases class II (D, K and N)
  misc_feature (1)..(287): Xaa is any amino acid
MQQMLIXLCLKNAVANNGVVRGXAAKGCVDFTRKQIDDLTEFVGRYGSKGLVWMRVKDNHEVETQVAKFFTKEQLEALRNAIQGKTGDMLFFIAGSEKIAATAMGHLRLEIARIKGLMDPKLRKFAWITEFPMFEYSETEKRYMSMHHPFTSPLPEHLDMMLGGNLKDCNAQAYDLVLNGVEIGGGSVRIHNPEVQEKVFRLLGLSEEQVKQKFGFFVDAFKFGAPPHGGLALGLDRVVATLEGQDSIRDFIAFPKNTSASSPMDQSPSEVDPIQLLETHISSILPP

SEQ ID NO: 63003 - DNA, 696 bp, Unknown
  Obtained from environmental sample
  misc_feature (1)..(696): n is a, c, g, or t
atgacagatcggacgagtcgcttcctccctgtcggccaggatacccatgtggttgtttccgcggactgggcttcgccttctttccagggttcttttcttcccgcaacttcaaacattacagacagcggttttgacgcaacatgggatattagttaccttagccgcgatattcccctgtactggaaagcctatgacagcgaccgggaacggctggactattccgcttcattctttggggttaattttttccgcgccattgatacctatgcgttgaattacagagccgtgaggtatgcgataatttttttggttgttccgtttttaaccctctttttgcttgaggtcttcaccaaaaaacgtatacaccctgtgccatacctgctttcgggaattgccaatattattttttatctgttgctgctttccctttccgaacagatgcaattctaccaggcctaccttatcgcggcaggggccgttattgtggtgctgaccctttattcccgctccctcctattctcctggaataaaggctggtatatggggctggtcgggctcctctcctatgtgcttctttatgcggtcctgaatgccgaatcctacgccttgctcatcggttccgtcggagcctttgtggtagtagccctggtaatgttcctgacccggaaattagactggtacggttctgacgaatga

SEQ ID NO: 63004 - protein, 231 aa, Unknown
  Obtained from environmental sample
  DOMAIN (2)...(231): Inner membrane protein CreD
  misc_feature (1)..(231): Xaa is any amino acid
MTDRTSRFLPVGQDTHVVVSADWASPSFQGSFLPATSNITDSGFDATWDISYLSRDIPLYWKAYDSDRERLDYSASFFGVNFFRAIDTYALNYRAVRYAIIFLVVPFLTLFLLEVFTKKRIHPVPYLLSGIANIIFYLLLLSLSEQMQFYQAYLIAAGAVIVVLTLYSRSLLFSWNKGWYMGLVGLLSYVLLYAVLNAESYALLIGSVGAFVVVALVMFLTRKLDWYGSDE

SEQ ID NO: 63005 - DNA, 1215 bp, Unknown
  Obtained from environmental sample
  misc_feature (1)..(1215): n is a, c, g, or t
ttgatggccgagctcgacggcgttgtgtcagctaacggaaagtccgcggttgaattttcgctcacgattttcatttccgttcttgtgattgcctgcccatgcgcgctcggtcttgcgacgccgacggcgataatggttgggacaggaaagggagccgaaaacggcatattgataaagggcggagccgcactggaaaccgcacacaagctgaacgtcgtcgtactggacaaaacgggaactttaaccgagggaagaccggagcttacggacataattttagcaaacggagattcagacgataataattcttcgcgtaactctgattatcttctgctgctcgccgcttcggtcgaaaacggaagcgagcatccgctgggacgcgccgttgtgcgcgaggcggaaaagcgggggcttgctcttattcaggcgggcgatttcagggcgattcccggtttcggcgttgaggctgtaatcggcgcaaacggcagtggcgaggactccgcgattgtcagcatcggcaaccgtaaattcatggacgagcgcggcgttattttgggcacgctcgaaagcgaggcggatcgtcttgccgccgagggaaaaactccggtgtttgtttccattacgggaaaaaacgcgggagtcatggcttttgcggacatgataaaaaagaacagcaaggccgccgtaaaaaaactgaaagaatcgggaattgacgttgttatgataacaggcgacaacaaaagaaccgccgccgcgatagcgaaagaagccggaattgagaacgtgctgtcggaagtgccgccggagggaaaagccgccgaagtaaagaagctgcaaaatgaaaacggcaggcgttttgtagcaatggttggggatgggataaacgacgctccggcattagcgcaagccgacatcggaatcgctataggaagcgggacagacgtggcaatggagtcggcggacattgtgcttatgcgttccgacttgattgacgttcccacggctatcaatttaagcaagcggacgatccgcaacatcaaacaaaatctgttttgggcttttggttacaatgtgttgggtattcccattgccgccggtgtgctgtatctctttggaggcccgcttctcaacccggttttcgccgccgccgccatgagtttaagttccgtatcggtgctgaccaacgcgctgagattaaaaagatttaaggcgtaa

SEQ ID NO: 63006 - protein, 404 aa, Unknown
  Obtained from environmental sample
  DOMAIN (70)...(313): haloacid dehalogenase-like hydrolase
  misc_feature (1)..(404): Xaa is any amino acid
MMAELDGVVSANGKSAVEFSLTIFISVLVIACPCALGLATPTAIMVGTGKGAENGILIKGGAALETAHKLNVVVLDKTGTLTEGRPELTDIILANGDSDDNNSSRNSDYLLLLAASVENGSEHPLGRAVVREAEKRGLALIQAGDFRAIPGFGVEAVIGANGSGEDSAIVSIGNRKFMDERGVILGTLESEADRLAAEGKTPVFVSITGKNAGVMAFADMIKKNSKAAVKKLKESGIDVVMITGDNKRTAAAIAKEAGIENVLSEVPPEGKAAEVKKLQNENGRRFVAMVGDGINDAPALAQADIGIAIGSGTDVAMESADIVLMRSDLIDVPTAINLSKRTIRNIKQNLFWAFGYNVLGIPIAAGVLYLFGGPLLNPVFAAAAMSLSSVSVLTNALRLKRFKA

SEQ ID NO: 63007 - DNA, 477 bp, Unknown
  Obtained from environmental sample
  misc_feature (1)..(477): n is a, c, g, or t
ttgagacgtagccggaaagtttcaatccacgcactcgcgcggagtgcgaccttggaatacgattatattaattttgaaacaccagtttcaatccacgcactcgcgcggagtgcgacgcgaaaaaagggcttccgtcgagaaggcagaaaagtttcaatccacgcactcgcgcggagtgcgacaagcggcggcctttccagccccgccggatatattgtttcaatccacgcactcgcgcggagtgcgacgggaactggcgttcacgatgcgctactacaccgggtttcaatccacgcactcgcgcggagtgcgacatctgtcattaatgaccgtggaattcatagacgaagtttcaatccacgcactcgcgcggagtgcgactttgtgattttattaattattccttccggcgtatgtttcaatccacgcactcgcgcggagtgcgacttgtttcgttggtatcaagcgttccagtaa

SEQ ID NO: 63008 - protein, 158 aa, Unknown
  Obtained from environmental sample
  misc_feature (1)..(158): Xaa is any amino acid
MRRSRKVSIHALARSATLEYDYINFETPVSIHALARSATRKKGFRREGRKVSIHALARSATSGGLSSPAGYIVSIHALARSATGTGVHDALLHRVSIHALARSATSVINDRGIHRRSFNPRTRAECDFVILLIIPSGVCFNPRTRAECDLFRWYQAFQ

SEQ ID NO: 63009 - DNA, 885 bp, Unknown
  Obtained from environmental sample
  misc_feature (1)..(885): n is a, c, g, or t
atggacttacaggagcttttaaagagccatgttgattcaaaagcggcaattaccatagcctgtacaggcgttagccgtgaaaacgcgggcggtttgggcattttaaaggtcgataagaacaaccaaatcacagaatttcttgaaaaacccggtccttcaagggatatttctgattttagagccccgaaagaactgcttaccgacaaaaacaaggacgattgctacctggcttctatgggaatttatgtttttaacgccaaagcgatggaagattgccttgccaatgaacttacagacttcgggaaagagataattccgggagctatcagcaaacttaaggtaaacgcgtatctttttgacggttactgggaagatatcggaaccattaagaacttttacgataccaatttggaattaacctctgtaaaaccaagtttcgatttttatgacgaacacaaaccgatttatacccacatgcgcaatcttccgccgtcaaaaatgaacttttccaacatgaaccagtcaattgccgccgagggttgtatcattaccaacgcaaatatcaccaactcaattgtcggtattcgtacgcttatcgaaacaggggcaagccttaacggcgttgtttgtatgggagccgacttctatgagacagaaaagcaaaaaatacataacgccgaggcaagaattcccaatgtgggaataggcaggggcgcgattatcaaaggcgcgattatcgataaaaatgtctgcgtaggcgaagaatgcagaatcggcgttgacgacatcaaacgcacagacggcaattacgggcattattatattgtggacggtattattgtcattcctaagaatactattctgtatccgggtactgttatttaa

SEQ ID NO: 63010 - protein, 294 aa, Unknown
  Obtained from environmental sample
  misc_feature (1)..(294): Xaa is any amino acid
MDLQELLKSHVDSKAAITIACTGVSRENAGGLGILKVDKNNQITEFLEKPGPSRDISDFRAPKELLTDKNKDDCYLASMGIYVFNAKAMEDCLANELTDFGKEIIPGAISKLKVNAYLFDGYWEDIGTIKNFYDTNLELTSVKPSFDFYDEHKPIYTHMRNLPPSKMNFSNMNQSIAAEGCIITNANITNSIVGIRTLIETGASLNGVVCMGADFYETEKQKIHNAEARIPNVGIGRGAIIKGAIIDKNVCVGEECRIGVDDIKRTDGNYGHYYIVDGIIVIPKNTILYPGTVI

SEQ ID NO: 63011 - DNA, 960 bp, Unknown
  Obtained from environmental sample
  misc_feature (1)..(960): n is a, c, g, or t
atgagaacatattccgcgcagtgcggaaacttgccagccaaaaacagggtatctaatcacatggataaaaaattttcatcccttcatacccataccgtattctgcgacggcaaagacgatgtggaaacgatgtgccgggcggcttatgaaaaaaagctcgcgtccgtcgggttcagcagtcatgcccctgtcggtaaaaccggactaaaaacaacctggcacatgaaagacgagaagttagaggaatatattaacgagattaaagccgcccgccttcgctgggagggaaaactccccgtctaccttggacttgagatagattacatcaagggattgcgctcgccattggacaaagacattaaggacttaaacctggattacgccataggcgccgtgcattacctgaaaccgccccacggagacttgtttaccgttgacggccatcttgaggaactggaaaacggcatactggacggttttgacggcgatggggaagcaatgttatgcgcctacttaaacaatgttttagaaatggtcactatgggcggatttgacattgtagcccatcttgatctggttaagaaacattacaattcgaaaggaagctccgctttttgggagaagcagggccactggtttgaaatggaaaacgcggattacaaccggcgggtggaagaaatagcccgcgccatttcttttaccgaccttgtggttgaagtaaacaccggagggtttaaccgcggctacattacagacacatacccctcgcttgcgtttttacgcctgctgcgcagatacaatgttccggttatgatcagtgccgacgcccatcgcgccgttgatcttgacggtcattaccgggaagcacggcaaattttgctggatgcgggctataccagccatgttctatttgaaggcagaaaagacgggaagccaatctggactgaacggccactttaa

SEQ ID NO: 63012 - protein, 319 aa, Unknown
  Obtained from environmental sample
  DOMAIN (26)...(280): PHP domain
  misc_feature (1)..(319): Xaa is any amino acid
MRTYSAQCGNLPAKNRVSNHMDKKFSSLHTHTVFCDGKDDVETMCRAAYEKKLASVGFSSHAPVGKTGLKTTWHMKDEKLEEYINEIKAARLRWEGKLPVYLGLEIDYIKGLRSPLDKDIKDLNLDYAIGAVHYLKPPHGDLFTVDGHLEELENGILDGFDGDGEAMLCAYLNNVLEMVTMGGFDIVAHLDLVKKHYNSKGSSAFWEKQGHWFEMENADYNRRVEEIARAISFTDLVVEVNTGGFNRGYITDTYPSLAFLRLLRRYNVPVMISADAHRAVDLDGHYREARQILLDAGYTSHVLFEGRKDGKPIWTERPL

SEQ ID NO: 63013 - DNA, 480 bp, Unknown
  Obtained from environmental sample
  misc_feature (1)..(480): n is a, c, g, or t
atgagaaaacagcttgtgcgttgtaccattaacggcaaggccacggaaaccatggtggacatccgcgcgtcgctgacagacatgctgcgtaatgaataccgcctgaccagcgtcaaaaaaggctgcgaggtgggcgaatgcggggcctgcaatgtgatcatcaacggggaatgtttcaattcctgcatttacctcgcaatctgggctgaaggcaaggagattaccaccaccgaggggcttttaagcgccgacggggaactctccgcgctccagcaggcgttcatcgacgagggcgctgtgcagtgcggcttttgcacgccgggctttttgatgagcgccacggaaatcatacgctcggggaaaaactacagcgacgcggaactgcggaaactgctgtccgggcatttatgccgctgtacgggctatgagaacatattccgcgcagtgcggaaacttgccagccaaaaacagggtatctaa

SEQ ID NO: 63014 - protein, 159 aa, Unknown
  Obtained from environmental sample
  DOMAIN (76)...(151): [2Fe-2S] binding domain
  misc_feature (1)..(159): Xaa is any amino acid
MRKQLVRCTINGKATETMVDIRASLTDMLRNEYRLTSVKKGCEVGECGACNVIINGECFNSCIYLAIWAEGKEITTTEGLLSADGELSALQQAFIDEGAVQCGFCTPGFLMSATEIIRSGKNYSDAELRKLLSGHLCRCTGYENIFRAVRKLASQKQGI

SEQ ID NO: 63015 - DNA, 882 bp, Unknown
  Obtained from environmental sample
  misc_feature (1)..(882): n is a, c, g, or t
atgtatgatgtagaagaaatatacgaggctgaaagcccctctcacgcggttgaattgctgcaacagcatcctgacgcgaaaattatcgcgggaggcagcgacgtgttaatcgaaatccgcgagggcaggcttgcgggccgtactttgattagtattcagaaacttgattgtctgagaggagtttcaatcgactctgggggcgctatacgcattggcccgctgacgagcttttcacatgtagcgcaagacccgatcatacagaaaaacatccctgcgcttgcggaagcggtgctgaccatcggcggaccgcagcttcgcaatatcggcactataggcgggaacgtctgtaacggggttacgtccgcggacagcgcctcaacactgacggcctatgacgtggtaatggaataccttggccccgagggcctgaggcttgttcccatttccaaacattatgtaagcgccggcaagacctcccttgcccatgacgagattctgcaggctattcttgttccaaaggaaagttatgacaactgttttggcaattatatcaaatacgccatgagggaagccctggacatagcgaccctggggtgttcggcgaatgtccggctttcaaaagacggtaaaactattgacaggctccgcctggcttatggcgtcgcggggccagtccccatgcgcgttccctccgcggaacaggccgcggccggaaaaccggcaaacgccgaaaccgcagccgccatcgccaaactggtgttaaacgacattaatccccgctcaagctggcgggccagcaaggaattccgcctgcatctggcggaagagcttgccaaacgggcgattatcgaatcgttaaaacgcgcgggggtatcgttatga

SEQ ID NO: 63016 - protein, 293 aa, Unknown
  Obtained from environmental sample
  DOMAIN (182)...(290): CO dehydrogenase flavoprotein C-terminal domain
  misc_feature (1)..(293): Xaa is any amino acid
MYDVEEIYEAESPSHAVELLQQHPDAKIIAGGSDVLIEIREGRLAGRTLISIQKLDCLRGVSIDSGGAIRIGPLTSFSHVAQDPIIQKNIPALAEAVLTIGGPQLRNIGTIGGNVCNGVTSADSASTLTAYDVVMEYLGPEGLRLVPISKHYVSAGKTSLAHDEILQAILVPKESYDNCFGNYIKYAMREALDIATLGCSANVRLSKDGKTIDRLRLAYGVAGPVPMRVPSAEQAAAGKPANAETAAAIAKLVLNDINPRSSWRASKEFRLHLAEELAKRAIIESLKRAGVSL

SEQ ID NO: 63017 - DNA, 1578 bp, Unknown
  Obtained from environmental sample
  misc_feature (1)..(1578): n is a, c, g, or t
atggtaagcgcctaccgttcagtgatggttcatcccgcgcgttattacataggcctgcgccgtccgtccggcggttttgcgcggaaagggcaggaattatcctacgattacattaccgtaaataccgcgggtgaaaaaacagcgaataacgggcttttcctgcaaaccggggaaaacgcgggacagatcaaggtagaacttatccgggaagaatggcggcgcgtccaacagcggggagtgaacggttatatttatgacgaatattcaccggaacaggtaatcgacaacgttcaaaatatagcaattagaaacggcggcggctcgatcaagataaccccaggcggcgcggggtatcatattctgcgggtttccgcgcaggacagggaaggcagaacggcccttacggaatttggtttttatgtcaccggttcgggcggctactggaacatgagcaaccccagcgaattaaggcttacgccggatcaggaaatgtataatcccggcgacacggcgaaggttctgctgcaaagcacgcttcccgaaggccggtatttaatcacggtggagcgggaaggcatattcaccgaggaagtccgtcattttaccgagccggtttcggtgattgacattcccattgcgcgtaactatgtgccggtggtttatgtggcggtttcgtcttattcggtgcgttccggccctcccacccatgaatacggcagccccgacctggacaaacccaaaggttatttcggcgtaacgccgctccatgtaaatccgcgcgcgcgggcgttttctgttaaggtagaaagcaacaagaaaacctaccgtcccggcgaggaagttaccatgaccctgaccgcgagcaaggacggcaaacccctgtccaacgcggagcttaccctgatggcggtagaccgtggcgtattggacctaataaattaccatgtgccggacccgatacattatttttataatgaagaccgcttccccctcatggtagcgggcggcgattcccgcgcgtggcttatggatcctgtaacctacagcgtcaaaaacctcgccggcggtgacgcggaaggcgacagcaaaattgaggaacgcaaggattttaaccccaccgctgtatttgagcctatgctgataactgatgattcaggcaaggttacctgcaaattcaaactccccgataaccttaccacatatcgcgtaacggtctttggggtacggggcgatattttcgcccttaaagaaagcgagattgccgcccagaacaaaataaacgtgcgggaagttctgccccggcgcacgcgggaaagggataccgccgaagcgggggtgcttattaccaatctcgattcaacgtcccataccctgactgtcaggcttgatataggcccgcccctgcccaatgacgattcaagcggaataaaaaaaattaccgggcaggcttttgttgacggaattttcgagcgacgcataacggtaaaaagcggcgagaacgccgtggtgtattttgacgtggcggcggtaaaggaaggaaatgttacgcttaactataccgtcaattcgcctgtctaa

SEQ ID NO: 63018 - protein, 525 aa, Unknown
  Obtained from environmental sample
  DOMAIN (152)...(314): Alpha-2-macroglobulin family N-terminal region
  misc_feature (1)..(525): Xaa is any amino acid
MVSAYRSVMVHPARYYIGLRRPSGGFARKGQELSYDYITVNTAGEKTANNGLFLQTGENAGQIKVELIREEWRRVQQRGVNGYIYDEYSPEQVIDNVQNIAIRNGGGSIKITPGGAGYHILRVSAQDREGRTALTEFGFYVTGSGGYWNMSNPSELRLTPDQEMYNPGDTAKVLLQSTLPEGRYLITVEREGIFTEEVRHFTEPVSVIDIPIARNYVPVVYVAVSSYSVRSGPPTHEYGSPDLDKPKGYFGVTPLHVNPRARAFSVKVESNKKTYRPGEEVTMTLTASKDGKPLSNAELTLMAVDRGVLDLINYHVPDPIHYFYNEDRFPLMVAGGDSRAWLMDPVTYSVKNLAGGDAEGDSKIEERKDFNPTAVFEPMLITDDSGKVTCKFKLPDNLTTYRVTVFGVRGDIFALKESEIAAQNKINVREVLPRRTRERDTAEAGVLITNLDSTSHTLTVRLDIGPPLPNDDSSGIKKITGQAFVDGIFERRITVKSGENAVVYFDVAAVKEGNVTLNYTVNSPV

SEQ ID NO: 63019 - DNA, 2991 bp, Unknown
  Obtained from environmental sample
  misc_feature (1)..(2991): n is a, c, g, or t
atgtcgaaactaatctgtaccagcgcaatagacggagccgtctcctttgtcgcccaggccattaacatggtggaggaggctgtaaaacaaaaaggccttgactgtcccgtctctttccctgacaccaactattatttgcctgttatttattcctttacgggcaggcaaatgaaaacagtagcggatttgcgggatattcttgaggaagccaaatcgctcctgcctgcccggcccgccgaaaacacctggctgccgtacctaggcaacacccttgatgcaggtgtggcggcgctctatgcctgcgaggtaatagaagcctgcaaatatttaatcggccccagcccggtggacgggatctggcttggcgcggctaacgatgtcatcatgcgtgagcggggaattgagttcgttgacggtacggcccccggcttcgcggctatcaccggcgctgcaccggacaacgccacggcggtgaagatcgccagggagcttcagcagaaaaacctttacgttttcatgggcggctgtacgaacggcgttcagttcgccgagcagttggccgccgaaggcgtacagctcggctgggaaacccgcctcgtgcctttcgggcgggacgtttccgcgctgatctacgcccttggctttgccaaccgcgccgcgctttccttcggcggagtcaagccgggaaatttcgaggcgaatctaaaatacaacaagaacaggatcttcgcctttgttatcgccctgggcgaggtaacgccggacaagtacgctgtggcggcgggggccatcaactacggattccccgtaatatccgacacagatatacctgaaattttaccaaccggcgtatgcacctacgagcacgtggtctccaaagtccctcatgacaagatcgtggaaaaagcactggaggtacgcggctgcaagatcaagatagtggacgtgcctattccagtggcttacggcccggcttttgagggggagagaattcgcaaggaagatacccacgcggagttcggcggacaaaaaaccctcgccttcgagtacgttaccagcgcggaatatgatgaaataacagacggtgaaatccaaatcatcggcccggacatagacacgataaaacccggagggcttcttccccttggcatttgggtggaagtcgccggacgcaaaatgcagtccgactttgagccaatactggaacgccaagttcatcatttgatcaacggcgcggaagggatttggcatatgggccagcgggacatagtctggacacgggtttccaaaagcggttttgcaaagggcctaaggctgaggcactacggcgagattctgcacgcgcggcttttggccgattaccccgccatcgtggacaaggtgcgcgtaacgcttatcaccgatcaggccgaagtggagaagcggctcgcaatcgcccggaaagtatacgatgagcgcaaccgccgtctggaagccatgaccgacgaatcggtggaaaccttctattcctgcctcctctgccagagcttcgctcccaaccatgtctgcgtaattacgccggaacggctgggtctttgcggcgcgtacaactggctggacggcaaggcggcctacgaaattgacgaaaccggtcccaaccagcctctcaagaaaggcgagtgccttgacccggtaagagggatatggtcgggcgtgaacgaatatgtttacacgaacagccacaagactatcgattctttctgcgcctactccattatggacaggccaatgacgagctgcggctgttttgaggctatttgcgcctatgtgcctgagtgtaacggcgttatgattgtcaaccgtgagtatttgggagagactcccgtaggaatgactttctccactttggccggttccgttggcggcggccagcagacaccgggcttcttcggctgcggtaaggtgttcctgaccagccgaaagttcctttcggcggaagggggctttgcccgtgtcgtgtggatgcccaaagagctaaaggatctgctacgcgacgatttattaaaacgctttgacgagaaaggcctgacgggttttttcattgatcaaatcgccgatgagaccatcgccgttgccgccgaagatgtgcgagtgttcatggagaaggtcaaacatccggcgctgaaaatggaagatatggctcaatatgctcagagtacggagagtgaagctgtttccgcttttgcggatgcgaaagcgggcgcgaaagcggacgccgcgcctacaaaaaccgcaaccgccggcgcggctgaggaaagcgtaccgatagccggaaatgtggatatcgcggccattaccgagcaggtaaaggcgcagataaaatctgacctgaccaaagagatcatcaccagcataatcgacatactgagtgagcgtttcctcgggcaggctgccgcaaaacctgaagctccggaatctaaagcagagcctttagcaaagcctgtaatatccgcttctacccgaatatccgaaataaagagcttcgcgcttccggctgaaagctcaagttccgccacatacgcggtaaagcttggtaatttaaaaggcgagggtggtacacgcggcagaacttgcgttgtaggcggcgcaaactgcatgccctttcacttttgggaaggccggatgcccaacaggccgttagtcgcaatggaagtttacgacagcataagcgagaagtaccctgatcttttgcgggaagcctataaaggccttttggacaaaccggcagatatggcgaaggcttgcgtgaaacagtacggggccgatctcatcagtgtaaggcttgatggtatccatcccgatcgggaaaaccgaagcgcggcccaaagcgtggaacatgtcaaatccatattggcggctgtggatgtaccgctgatcattaccggtattaaccactacgataaaaacaacgaagtaatgaaggccatgcccaggctgcctcggccgatctga

SEQ ID NO: 63020 - protein, 996 aa, Unknown
  Obtained from environmental sample
  SIGNAL (1)...(20)
  DOMAIN (315)...(727): CO dehydrogenase/acetyl-CoA synthase complex beta subunit
  misc_feature (1)..(996): Xaa is any amino acid
MSKLICTSAIDGAVSFVAQAINMVEEAVKQKGLDCPVSFPDTNYYLPVIYSFTGRQMKTVADLRDILEEAKSLLPARPAENTWLPYLGNTLDAGVAALYACEVIEACKYLIGPSPVDGIWLGAANDVIMRERGIEFVDGTAPGFAAITGAAPDNATAVKIARELQQKNLYVFMGGCTNGVQFAEQLAAEGVQLGWETRLVPFGRDVSALIYALGFANRAALSFGGVKPGNFEANLKYNKNRIFAFVIALGEVTPDKYAVAAGAINYGFPVISDTDIPEILPTGVCTYEHVVSKVPHDKIVEKALEVRGCKIKIVDVPIPVAYGPAFEGERIRKEDTHAEFGGQKTLAFEYVTSAEYDEITDGEIQIIGPDIDTIKPGGLLPLGIWVEVAGRKMQSDFEPILERQVHHLINGAEGIWHMGQRDIVWTRVSKSGFAKGLRLRHYGEILHARLLADYPAIVDKVRVTLITDQAEVEKRLAIARKVYDERNRRLEAMTDESVETFYSCLLCQSFAPNHVCVITPERLGLCGAYNWLDGKAAYEIDETGPNQPLKKGECLDPVRGIWSGVNEYVYTNSHKTIDSFCAYSIMDRPMTSCGCFEAICAYVPECNGVMIVNREYLGETPVGMTFSTLAGSVGGGQQTPGFFGCGKVFLTSRKFLSAEGGFARVVWMPKELKDLLRDDLLKRFDEKGLTGFFIDQIADETIAVAAEDVRVFMEKVKHPALKMEDMAQYAQSTESEAVSAFADAKAGAKADAAPTKTATAGAAEESVPIAGNVDIAAITEQVKAQIKSDLTKEIITSIIDILSERFLGQAAAKPEAPESKAEPLAKPVISASTRISEIKSFALPAESSSSATYAVKLGNLKGEGGTRGRTCVVGGANCMPFHFWEGRMPNRPLVAMEVYDSISEKYPDLLREAYKGLLDKPADMAKACVKQYGADLISVRLDGIHPDRENRSAAQSVEHVKSILAAVDVPLIITGINHYDKNNEVMKAMPRLPRPI

SEQ ID NO: 63021 - DNA, 564 bp, Unknown
  Obtained from environmental sample
  misc_feature (1)..(564): n is a, c, g, or t
gtgcttaccgccgaattgataaaacagaacgtattggtgcttcaaacgggctgctcggccattgccagcgccaaggctgggatgctcaaacctgaagtagccttgagcaaggccgggccggggctgcgggaggtctgcgaggctgtcggtatcccgcctgtgctgcaccttggaagctgcgtggacaacagccggatactggaagccgccaccgaatcgatccttgagggcggccttggggaagatatgggaggttttcccgctgtgggcgtcgcgcctgaatggatgagcgaaaaagccattgctatcgcctgttactttgtggcaagcggagttccggtagtcctgggaaatccattttatgtttccggctcccaggctgtaagcgactatctccacggcagtgtgcaggaggaattcggcgccagattctactgcatagaagatccgttacaggccgccgagcgcattgtggaaatattgaatcaagccagagatgcccttggaatcaataaaaaggccgagcgcaagctctttgatatgaaagacaggagggcgttgtaa

SEQ ID NO: 63022 - protein, 187 aa, Unknown
  Obtained from environmental sample
  misc_feature (1)..(187): Xaa is any amino acid
MLTAELIKQNVLVLQTGCSAIASAKAGMLKPEVALSKAGPGLREVCEAVGIPPVLHLGSCVDNSRILEAATESILEGGLGEDMGGFPAVGVAPEWMSEKAIAIACYFVASGVPVVLGNPFYVSGSQAVSDYLHGSVQEEFGARFYCIEDPLQAAERIVEILNQARDALGINKKAERKLFDMKDRRAL

SEQ ID NO: 63023 - DNA, 1212 bp, Unknown
  Obtained from environmental sample
  misc_feature (1)..(1212): n is a, c, g, or t
atgagagagcagtttttgaatagagagagctatttgcggcaatttgtggcgtggatagagaagcctgttataaaggttataacggggcaaaggcgtgttggcaaaagtaaatttatgcttcaagtgatgcaacacatcaaaaaattcaacaaacaggcgaacataatatatataaatacagaagaagaggaatttcagcacataacagactacaaagtgctgcaaaaagagattaacgcaaaattatccaaaaaagccaaaaattatttgtttgtggatgaaattcaagacatacaaaaatttgaactagctttgagaaattatttggcaaagaatgaatgcgatatttactgcacaggcagcaattctaatttaatgtctggagagttagcgagctatttaagcggcagatatgtggagtttaaaattcatcctctttctcttgacgaattttgtttattccacaacctaccaaaaaacaacgacactttgctaaaatattttcgttttggtggaatgccttttttgcgaaatttaccacttgaagaattgatggttaatgaatatttgcaaagtctttacagcacaatcttgttaagagatatagcggaacgccacgatattagaaacctgcatttgctaaaatctctctctcgctatattgccgacaacacaggctcaatgttctcttctttaagcataagcaagtatttgaagtctgtaaatttacttgtttcgccaaaaagcatattggattatgcggattatttaaaaaatgccttgcttgtgaaccaaattgaaaggcacgatttaaaagggaaaaaattgttttcttctggtggaaaaatatattttgaagatttgggactgagaaatattgtagctggtggttttaaaataaacgatattcaaaaaatccttgaaaattcggtgtatatgcatttagcgaggcaaaactataaaatttccacaggggttttaaactcacaggaaattgattttatcgcagaaaaaaacgtaaaaagaatttatgtgcaagttgcctataaattgtcttcacaagaaaccatagaccgagaatttgggaatttgcttttaataaaagataatttcccgaaaatagttgtgactatggatgaattggctggaaatgattaccaaggaataaggcatattcatatattggattttttatcacattccttagtttga

SEQ ID NO: 63024 - protein, 403 aa, Unknown
  Obtained from environmental sample
  DOMAIN (4)...(179): Archaeal ATPase
  misc_feature (1)..(403): Xaa is any amino acid
MREQFLNRESYLRQFVAWIEKPVIKVITGQRRVGKSKFMLQVMQHIKKFNKQANIIYINTEEEEFQHITDYKVLQKEINAKLSKKAKNYLFVDEIQDIQKFELALRNYLAKNECDIYCTGSNSNLMSGELASYLSGRYVEFKIHPLSLDEFCLFHNLPKNNDTLLKYFRFGGMPFLRNLPLEELMVNEYLQSLYSTILLRDIAERHDIRNLHLLKSLSRYIADNTGSMFSSLSISKYLKSVNLLVSPKSILDYADYLKNALLVNQIERHDLKGKKLFSSGGKIYFEDLGLRNIVAGGFKINDIQKILENSVYMHLARQNYKISTGVLNSQEIDFIAEKNVKRIYVQVAYKLSSQETIDREFGNLLLIKDNFPKIVVTMDELAGNDYQGIRHIHILDFLSHSLV

SEQ ID NO: 63025 - DNA, 831 bp, Unknown
  Obtained from environmental sample
  misc_feature (1)..(831): n is a, c, g, or t
atggactgtataaagaacatagtcatctgcggtgggactcacggaaacgagctaacgggtgtgtatttggcaaaaaaacacggctggcttttggcaaaccaagcagcggcggcagcagcacgtagatatatagacaaggatttgaacaggtgttttgcgttatctaatttgaatggcaacgataacgctttggaatctgtacgcgccagagaaatcaacgctatgcttgggaaaaaaggaagcgaaaatgtgccggattttattttggatatacacaacacaaccgcaaatatgggagtaactcttatactcagttcctcagaacctgctcttttgcaaatctctgcaataattgcaagcgagttttcaaatatacacatttatctgcaacccgaaaaaagagacgaatctccttatcttggcacaatagccaaaagcgatgtttgcatagaagccggaccgcaagcgcacggaacgcttgatgcggaactcttttttaaagtggagagagttgtttttcggtttttggaactcatagaatcttggaataatggagctttgccaaaaataagcaattttgaaacattcacagaaaagcgaagcattgattacccaagagattctaagggcaatataaccgctattatacatcccgctttgcaaggcaaggatttttgcgaacttaaaagcggaatgcctgtatttatggactttgacggcaaagaaattctttgggaaggcgaaacctgctaccctgctttcataaacgaagccgcatattacgaaaaaggaattgctatgagtttagcagagagatttctacattcctga

SEQ ID NO: 63026 - protein, 276 aa, Unknown
  Obtained from environmental sample
  DOMAIN (3)...(273): Succinylglutamate desuccinylase / Aspartoacylase family
  misc_feature (1)..(276): Xaa is any amino acid
MDCIKNIVICGGTHGNELTGVYLAKKHGWLLANQAAAAAARRYIDKDLNRCFALSNLNGNDNALESVRAREINAMLGKKGSENVPDFILDIHNTTANMGVTLILSSSEPALLQISAIIASEFSNIHIYLQPEKRDESPYLGTIAKSDVCIEAGPQAHGTLDAELFFKVERVVFRFLELIESWNNGALPKISNFETFTEKRSIDYPRDSKGNITAIIHPALQGKDFCELKSGMPVFMDFDGKEILWEGETCYPAFINEAAYYEKGIAMSLAERFLHS

SEQ ID NO: 63027 - DNA, 417 bp, Unknown
  Obtained from environmental sample
  misc_feature (1)..(417): n is a, c, g, or t
atgcttacccttaaaagcaagcgaggccgcaaggcagaaacatacatttgcgcttatttgctacgcaaaggctgtgggttatttgcaaggaattatagatatgctggaggtgagcttgatatagtggctaaagataaaaacggagtgtggctttttgtggaagtaaaatctgtttggaaaaattcttatggttcgccagacacaagggtaaacaaagaaaaacagagaaaaatttggcaaactgcacttcactttttgcacaataacggcgggcttgagcaaaattcccgctttgacgtggcagctatggattttagattcaaacgtggtgctataagatattacgaaaacgcttttgtagcctcaaaggttattccagatttgagaataaaacaagggaagggaaatgcttactaa

SEQ ID NO: 63028 - protein, 138 aa, Unknown
  Obtained from environmental sample
  DOMAIN (11)...(104): Uncharacterised protein family UPF0102
  misc_feature (1)..(138): Xaa is any amino acid
MLTLKSKRGRKAETYICAYLLRKGCGLFARNYRYAGGELDIVAKDKNGVWLFVEVKSVWKNSYGSPDTRVNKEKQRKIWQTALHFLHNNGGLEQNSRFDVAAMDFRFKRGAIRYYENAFVASKVIPDLRIKQGKGNAY

SEQ ID NO: 63029 - DNA, 399 bp, Unknown
  Obtained from environmental sample
  misc_feature (1)..(399): n is a, c, g, or t
atgaaccggtttcccatcggctacggctttcgccctcgccttaggggccgacttaccctgggaagattgcctttacccaggaaacctcgggctttcggcggagggggatcccacccctcttttcgtctacttatacctgcattctctcttccgccgcctccagcataccttacagtacgccttcgtcggcctgcggaatgctcccctaccaaccgcatattgctatgcgattccgcggcttcggttgcatgcttagccccgttacattgtctgcgcgccgtgactcgaccagtgagctgttacgcactctttcaaggaatggctgcttctaagccaacctcctggctgtcctcgccagggcacatcatttcacactcagcatgctatccgggaccttag

SEQ ID NO: 63030 - protein, 132 aa, Unknown
  Obtained from environmental sample
  misc_feature (1)..(132): Xaa is any amino acid
MNRFPIGYGFRPRLRGRLTLGRLPLPRKPRAFGGGGSHPSFRLLIPAFSLPPPPAYLTVRLRRPAECSPTNRILLCDSAASVACLAPLHCLRAVTRPVSCYALFQGMAASKPTSWLSSPGHIISHSACYPGP

SEQ ID NO: 63031 - DNA, 681 bp, Unknown
  Obtained from environmental sample
  misc_feature (1)..(681): n is a, c, g, or t
gtgaggccccctagtccatccagtgctctacctgcgcggggttttggcgaggctgtccctcaaggcatttcggggagaaccagctatttccaagtttgtttagtctttcgctccgagccaccggtcatccctgccttttttaacagactagggttcggccctccacccggtttcacccgggcttcagcctgccggtggctagatcacttggcttcgggtccatggcatgcgactcattatttcgcccttttcagactcggtttccctccggctccgggactcccatcccttagcctcgccgcataccatgactcgcaggctcattctacaaaaggcacgccatcacccagtcgcccgggctttgacatgttgcgggtttacggtttcaggttctctttcactcccctcgccggggttcttttcgcctttccctcacggtacttctgcactatcggtcgtatttcgtgtttagccttggatcgtggtcgacccaggttccgacagggtttctcgtgccccgccgtactcaggtaccgccctacggagtctttactatttcgcgtacggggatttcaccctctttgtcaggctttcccaaaacctttccgctatagtaaagtttttttactccgccccttgcgggcagacggcccttcaaccccgctattgctagcggtttag

SEQ ID NO: 63032 - protein, 226 aa, Unknown
  Obtained from environmental sample
  misc_feature (1)..(226): Xaa is any amino acid
MRPPSPSSALPARGFGEAVPQGISGRTSYFQVCLVFRSEPPVIPAFFNRLGFGPPPGFTRASACRWLDHLASGPWHATHYFALFRLGFPPAPGLPSLSLAAYHDSQAHSTKGTPSPSRPGFDMLRVYGFRFSFTPLAGVLFAFPSRYFCTIGRISCLALDRGRPRFRQGFSCPAVLRYRPTESLLFRVRGFHPLCQAFPKPFRYSKVFLLRPLRADGPSTPLLLAV

SEQ ID NO: 63033 - DNA, 1323 bp, Unknown
  Obtained from environmental sample
  misc_feature (1)..(1323): n is a, c, g, or t
ttggaaaagtccgcaatccaccgttctttcatcaatttggccggttcgcggcttgttttgtttgaaaacagattaagggggcgtttgagcattgtgagcatactttattattatcgtaatattaagcaaaagtcgagagcttttttctccgccgttcgtttgcccggcaaatggattaacattatcctcctcgccgtcctcgtcgcggctatagcgcttttcgttatatcccgtcttaccggaaaaccggtcatatccaggcatattgatatgtccatttcaccccggtttgaggaactgtttggcacggatatggcggacgcgcttctcaaggattttgagcagcagcgtcctgatttgaggattacgaaggctgctgaaggcgcggacatacttttttttgacgacggcgaattcggcagactgcgaagtggctcaaaactgcttgctcttaacctttacattggcgtcaatacacaggatggggagactgtcatagaacaggatgttctatcgcaggacacccaatgggcgctgccgctgatgtcatttatggatcttcttttctacaatatcaatatcttacaggcggcaaattttgaccgcccgcccaaaacacgcgccgaatttctgactgtcgtaaggaccattgcccgcacccatgaggaacaggacgcggtctatggttttgctctggatctcacgcagggggcaaggcggagcatctacccctggatctgggcggcaggcggggaaatatgcgtccccggatccgctccaaatgaaccgcccgtcctttcacgcgccgctgtagatacaatcgccttttttggacagcttcagcgcgagggcctgctttctcccggacaggggacaggcgaacagcgtctgatagaattcaccgaaggcaaaatcgccatgataacaggctcggcaagggacatcgcgttcttgcagagccgcaatatggatttcggcataacggctataccggggacaacgcaggggaaaaaccgtctgagcctgtcaaaaatctacgccggtatttccgctgactgcgctctgcccaaagaagcttgggttttcctctcttttatagcggggaaaagccaggtgctcgccgaagcgctaaccgcgattcccggcagcatacccataaccttccccggcgaatacatcctgaaaaacccgttatactcgaaagcctgggatatttttgaagccgcggaaattgtggaataccgcaacgatccttcagatgaagagatggaacgccttgtgatggagagactcagggaattggggatagggaacagggaatag

SEQ ID NO: 63034 - protein, 440 aa, Unknown
  Obtained from environmental sample
  DOMAIN (63)...(373): Bacterial extracellular solute-binding protein
  misc_feature (1)..(440): Xaa is any amino acid
MEKSAIHRSFINLAGSRLVLFENRLRGRLSIVSILYYYRNIKQKSRAFFSAVRLPGKWINIILLAVLVAAIALFVISRLTGKPVISRHIDMSISPRFEELFGTDMADALLKDFEQQRPDLRITKAAEGADILFFDDGEFGRLRSGSKLLALNLYIGVNTQDGETVIEQDVLSQDTQWALPLMSFMDLLFYNINILQAANFDRPPKTRAEFLTVVRTIARTHEEQDAVYGFALDLTQGARRSIYPWIWAAGGEICVPGSAPNEPPVLSRAAVDTIAFFGQLQREGLLSPGQGTGEQRLIEFTEGKIAMITGSARDIAFLQSRNMDFGITAIPGTTQGKNRLSLSKIYAGISADCALPKEAWVFLSFIAGKSQVLAEALTAIPGSIPITFPGEYILKNPLYSKAWDIFEAAEIVEYRNDPSDEEMERLVMERLRELGIGNRE

SEQ ID NO: 63035 - DNA, 327 bp, Unknown
  Obtained from environmental sample
  misc_feature (1)..(327): n is a, c, g, or t
atgaaatacttaatttgtccggcgcttgccatggccctgattttcggctgtgtaagccttcaaaccggaaatgtgcgtttttatgagggttccgcaatgggataccgggggatgatccatgtgcgggtgggaatggaaaacggggctattacggagattaccgtaattgaatcagatgaagatccggctattggcggggcggctattgaggaattgacggatcttgcgctgatgtacaacaccacggaaatcgacgcggtttccggggcgactgaaacaagcaggggttttcttgaggctgtcgaaaatgctatatttagcccatga

SEQ ID NO: 63036 - protein, 108 aa, Unknown
  Obtained from environmental sample
  SIGNAL (1)...(22)
  DOMAIN (34)...(108): FMN-binding domain
  misc_feature (1)..(108): Xaa is any amino acid
MKYLICPALAMALIFGCVSLQTGNVRFYEGSAMGYRGMIHVRVGMENGAITEITVIESDEDPAIGGAAIEELTDLALMYNTTEIDAVSGATETSRGFLEAVENAIFSP

SEQ ID NO: 63037 - DNA, 348 bp, Unknown
  Obtained from environmental sample
  misc_feature (1)..(348): n is a, c, g, or t
atgagcgactgtattttttgcaggatcataaaaggggaaatccccgctaaaaagatctatgaagacgatgaaatgctcgcgttccatgacatcacgccaatggcccccgtgcattttctgcttatccccaaaaagcacatcagcagccttatgcatctggaagcggaagacacggcccttgtaggcaggcttttgtgcaaggcgcaggaacttgccaaagaccccgcgggttgcggtgaaaatggcgcccgttttgtaattaatgccaaacgcgacggcggtcaaacggtggatcatctccacattcacgttttaggcggacgcgcattgagttggccgccggggtga

SEQ ID NO: 63038 - protein, 115 aa, Unknown
  Obtained from environmental sample
  DOMAIN (4)...(110): HIT domain
  misc_feature (1)..(115): Xaa is any amino acid
MSDCIFCRIIKGEIPAKKIYEDDEMLAFHDITPMAPVHFLLIPKKHISSLMHLEAEDTALVGRLLCKAQELAKDPAGCGENGARFVINAKRDGGQTVDHLHIHVLGGRALSWPPG

SEQ ID NO: 63039 - DNA, 924 bp, Unknown
  Obtained from environmental sample
  misc_feature (1)..(924): n is a, c, g, or t
atgggggaaaaaggatggacagtcagtaaggctgctctcggcgagccgatggggaacatggcaacaaatgatcagttccttatcaatccgatttatgaaacagaaataatgaccgaggccgctaaaaaatccgtgatgatgggccttgtccggcatcgcccgatgatggggccgtctatcttccttcccacaagagacaggggcggggttcagcttaactggcttacagcttacggccaaaaaatcgaggggagtaaaccgaaaggggcggagcgtgtagagctaaaagcctatacattggcagggtacattccgtggttcgatgaattcgaggaagatgtctttgtcgatttgggggctatgttcgtggatgaatttcttgaaacatacgggcaggagtttgaccgccagtgtttgttagccgatgatgatccgttcacaggggcaatggcctgttccgatgttactgaggtaacgatcaagggtaatagcattaacgatctgacatggaaggattttcgagatgccgtgtataaggttccggcagaggaacggaaagattgcgcctggttcttgaatgagacggtcttaaatcatatcgccagtatcgaggacactacaggccgcccgatttggcgggggccgacagaggcaatgccggggcggctggatttgtacccttaccatgaggtatcaattcttccgcagcttgccgatatagaagatgatacgccttttgcgatttttatgaaccccaaaaggattcagcatggaaacaggcggggcatcgaacttaaaaaatttgacgctactactgaaagccttgaatacggcgaattgtttttgaggttccgcaagcgtgatgggtttctcgtaacaagaccaaaaaataacatggttatattaaaaactaaagcgtcttaa

SEQ ID NO: 63040 - protein, 307 aa, Unknown
  Obtained from environmental sample
  DOMAIN (24)...(304): Phage capsid family
  misc_feature (1)..(307): Xaa is any amino acid
MGEKGWTVSKAALGEPMGNMATNDQFLINPIYETEIMTEAAKKSVMMGLVRHRPMMGPSIFLPTRDRGGVQLNWLTAYGQKIEGSKPKGAERVELKAYTLAGYIPWFDEFEEDVFVDLGAMFVDEFLETYGQEFDRQCLLADDDPFTGAMACSDVTEVTIKGNSINDLTWKDFRDAVYKVPAEERKDCAWFLNETVLNHIASIEDTTGRPIWRGPTEAMPGRLDLYPYHEVSILPQLADIEDDTPFAIFMNPKRIQHGNRRGIELKKFDATTESLEYGELFLRFRKRDGFLVTRPKNNMVILKTKAS

SEQ ID NO: 63041 - DNA, 1077 bp, Unknown
  Obtained from environmental sample
  misc_feature (1)..(1077): n is a, c, g, or t
atgccgtttaaggaggtcgatgttatggacgtaaagaaggagtttgtattaaagtcgctggacgacagggtagtattcacagagctatgccgtgaatatggaattggcactaagtgcgggtacaaatggcggcagcggtttcttgaggaagggtatgcaggccttgaggagcattcgaggaaaccgctgaccaacagccgcagcataccggaaccggtaagcgtggaaatattgcggattaagaaattgcatcccgcatggggggcaaagaaaatccttgaaatatacaaacgcaaccacacaggaaagtacgcacccgtgaggggaagtgttgaaaacctttttgtgcgcgccggatacaccggggtaaggcggcgcagaaacctgcgcggcgggggcataatacaaaacagggtaataccaaagaaagcgaacgaagtgtggacggtggatttcaaagggtggtggtacacaaaaaacaaagaaagggtaaacccgctgacagtgcgcgacgaatacagcaaatacatactggcgatagatgtggtcgaaaaaggcgatacagcaagcgttaaacacgtgtttcagcgcatatttaagaagtttggaataccgcagtatatacgcagcgataacggcccgccgtttgctaatgtgcttaatttctggggcttaacgaaattatcggtatggtggatggcattgggaatacagcttgaccgcgacgaccctgggcatcccgaacaaaacggcgggcacgaaaggatgcaccgcgatatgaaaaccgaactggaaggacagatagacggctcgcttaatgaacatcaaaaagtgtttgacaagtggcgaaaagaatttaacgaagtacgtccgcatgaagcattggggatgaaagtgcctgcggacatatacacaaaatctcaaaaaagattttgcagcgaaaatgttgagcttaaatatgggcgcggttataaaatccggatggtcaatgatcgcggatttctgaatctaaaccaaagacgtatttttgttggaaaccctttttccggatatcatgtaggcgtaaaagaattttag

SEQ ID NO: 63042 - protein, 358 aa, Unknown
  Obtained from environmental sample
  DOMAIN (140)...(305): Integrase core domain
  misc_feature (1)..(358): Xaa is any amino acid
MPFKEVDVMDVKKEFVLKSLDDRVVFTELCREYGIGTKCGYKWRQRFLEEGYAGLEEHSRKPLTNSRSIPEPVSVEILRIKKLHPAWGAKKILEIYKRNHTGKYAPVRGSVENLFVRAGYTGVRRRRNLRGGGIIQNRVIPKKANEVWTVDFKGWWYTKNKERVNPLTVRDEYSKYILAIDVVEKGDTASVKHVFQRIFKKFGIPQYIRSDNGPPFANVLNFWGLTKLSVWWMALGIQLDRDDPGHPEQNGGHERMHRDMKTELEGQIDGSLNEHQKVFDKWRKEFNEVRPHEALGMKVPADIYTKSQKRFCSENVELKYGRGYKIRMVNDRGFLNLNQRRIFVGNPFSGYHVGVKEF

SEQ ID NO: 63043 - DNA, 2256 bp, Unknown
  Obtained from environmental sample
  misc_feature (1)..(2256): n is a, c, g, or t
atgtcaaaaagcccggaagcgatcaaggccatcagagagagagataccgaagaagctatacgggtttttacagaagctctcgacgtttacggcgtgaattatttcacggtcacggacgaaaacggttccacgatttgccgaacccacgaaccggaaagattcggtgattcactcgttacccaggcgaatgttgtaaacggaatgcagggcaggatttccacgttttacgagccaggtagtttcgtaatggtttcggtgcggacaggggcccccgttcttgacgacgacggttcgctgattggcataatccttgcgggcgtaagggtagataccgatgagaccgccaaggatttaaaggaaatacttggcgctgaggttatggttttttacggcgataaggaaatatccactaccatagccaaaaaaggaaaattattggaaggtgaaacagttccgccggaaatcaggaaaatagtttacgaagacaagcgtactttctccggaacggtgaaagtcgcgggcacggattttgctggctattatttgcctatattgaactcgcaaaaccaggtctttgccgccatctttgtcggtatccccaaggtagatttgaacagggaaattaaccttatgttcattcaaacactgcttataggcgtaatcagtgttattttagcgattgttttactgagggctttaaggggcgcgatagcggcaagttttgcaaagagcagcttccttgccaacatgagccacgaaatccgcaccccaatgaacgctatcatcggcatggtagcgataggcaagaatgcccaggacagtaaacgcaaaaattacagtttcaataaaatagaggaagcgtccaagcatctgcttggggtaatcaacgaaattttggatatgtccaagatagaagcgaataaactcgaactgtcgccggaagtgttcaactttgagagaatgctccgcagagtcgtcagcattataaacttccgggccgatgagaagaagcagaaatttactgtgcgggtagacagcaaaatacccaaaaacataatcggggatgatcagcgtatagcgcagatcattaccaacctgctgggtaacgcggttaaatttacgccggagggaggaagcattgggcttaacgccgcccttttgagcgaagaaaacggcatttgcctgttggaactaaaagttaccgacagcggcataggcatgacgcccgatcagcaggccagactgttcagcccgttcaatcaggcagataacaacatctcccgcaaatatggcggaactggcctggggctcgccatttcaaagagcattgtggaaatgatgggcggcacaattggcgttgaatcaaaacccggcatgggctcggttttcacgtttaccatcaagacaaaacgcgcggaggacaacgagacaggattatcaaatttaagaataaacagggacaatgtacgtattttggtggcggacgatgaccagagcattttggattatttcaaggaaattacagacaagttcgggttttactgcgataccgccgcgaacgccgccgaagcgcttaaactaactgaagaaaatggtccttacaatattatttttattgactggaaaatgccggaaattgacggcatagagcttgcgaaaaaacttagagaaaagaaaaaagaaaacagcgaaaatgtcctcattatgatttcttccgcagaacggcagtttgtcgagaaggaggccagaaaagcgggctttgacaaatttttatcaaagcccttgttcccatacgacgtaacggatgttataaacgatacgctgggcataaaccagattgtaccggaaaacaatttgcagatgtactcaggtctttttaagggcaagagtatattattggcggaggacgtggatattaaccgcgaaattattcaaatgctgtttgaaaatacgctgatgaaaatagactacgccgtgaacggagaggaggcggtaatgatgttttcagcgtcgcctgataagtacgacttgatattgatggacgttcaaatgcctgaagttgacggctacgaggctacgcggacaatcaggaagcttgattctccgacggcgaagaccattccgattatcgcaatgacggcaaacgtttttaaagaggatatagaaaattgcctgcaggcgggaatgaacgaccacataggaaagcctattgagccggaactgcttttcgaaaagctaaggcgttatcttttctag

SEQ ID NO: 63044 - protein, 751 aa, Unknown
  Obtained from environmental sample
  DOMAIN (242)...(307): His Kinase A (phosphoacceptor) domain
  misc_feature (1)..(751): Xaa is any amino acid
MSKSPEAIKAIRERDTEEAIRVFTEALDVYGVNYFTVTDENGSTICRTHEPERFGDSLVTQANVVNGMQGRISTFYEPGSFVMVSVRTGAPVLDDDGSLIGIILAGVRVDTDETAKDLKEILGAEVMVFYGDKEISTTIAKKGKLLEGETVPPEIRKIVYEDKRTFSGTVKVAGTDFAGYYLPILNSQNQVFAAIFVGIPKVDLNREINLMFIQTLLIGVISVILAIVLLRALRGAIAASFAKSSFLANMSHEIRTPMNAIIGMVAIGKNAQDSKRKNYSFNKIEEASKHLLGVINEILDMSKIEANKLELSPEVFNFERMLRRVVSIINFRADEKKQKFTVRVDSKIPKNIIGDDQRIAQIITNLLGNAVKFTPEGGSIGLNAALLSEENGICLLELKVTDSGIGMTPDQQARLFSPFNQADNNISRKYGGTGLGLAISKSIVEMMGGTIGVESKPGMGSVFTFTIKTKRAEDNETGLSNLRINRDNVRILVADDDQSILDYFKEITDKFGFYCDTAANAAEALKLTEENGPYNIIFIDWKMPEIDGIELAKKLREKKKENSENVLIMISSAERQFVEKEARKAGFDKFLSKPLFPYDVTDVINDTLGINQIVPENNLQMYSGLFKGKSILLAEDVDINREIIQMLFENTLMKIDYAVNGEEAVMMFSASPDKYDLILMDVQMPEVDGYEATRTIRKLDSPTAKTIPIIAMTANVFKEDIENCLQAGMNDHIGKPIEPELLFEKLRRYLF

SEQ ID NO: 63045 - DNA, 960 bp, Unknown
  Obtained from environmental sample
  misc_feature (1)..(960): n is a, c, g, or t
atgtgcaattggtttgaagaacgctttaactggactatccagcgcgactggcttctaattacacctggagtggtgaacgctttgtgcctcgctatcagcgcgttgacaaaacctggcgacggcgttgttatacaacagcctgtgtatcatccgtttgaatcgtgtgtaacgcaaaccgggcggcagttgcttgtcaatgaacttatatacagcgaaggacattacagcatggattttcaggattttgaagagaaaatgaagcgggcaaagatgttcattatgtgcaatccgcacaatccggtcgggcgtgtctggaattgcgatgaacttacgcgcgtgggtgagatatgcctgcgctacggcgttcttgttatcgccgatgaaattcacgaggattttattttccagggccggaggtcaggacaccgacaccttgtattcgctgctttaaatcaggattttgccgatataaccattacctgcacatccccgtcaaaaaccttcaatcttgccggattgcttaacgcaaatatatttatttccaacaaagagctgcgcgataaattcaaagaggagtatgcaaagtccggtttaagccagccgtgcgtaatgggaatggtcgcctgtaaagcggcgtatgaaggcggcgcgcattggctggagcagcttttggattaccttgcccacaatatactgtttctaaaaacatatctntctgatcacattccagggatcaaactaattgaacctgaaggaacatatcttgcgtggctcgattgcaatgagcttggtatttccgcccaggaactggacgaggcgattactcaaaagggaaaattatggctgaaccccggttattcgtttggtaagggcgggaatggctttgagcgcatgaatgttgcctgcccccgttccgtgctgcaaaacgcgctggagcggctagaaaagataacgccttag

SEQ ID NO: 63046 - protein, 319 aa, Unknown
  Obtained from environmental sample
  DOMAIN (6)...(314): Aminotransferase class I and II
  misc_feature (1)..(319): Xaa is any amino acid
MCNWFEERFNWTIQRDWLLITPGVVNALCLAISALTKPGDGVVIQQPVYHPFESCVTQTGRQLLVNELIYSEGHYSMDFQDFEEKMKRAKMFIMCNPHNPVGRVWNCDELTRVGEICLRYGVLVIADEIHEDFIFQGRRSGHRHLVFAALNQDFADITITCTSPSKTFNLAGLLNANIFISNKELRDKFKEEYAKSGLSQPCVMGMVACKAAYEGGAHWLEQLLDYLAHNILFLKTYLSDHIPGIKLIEPEGTYLAWLDCNELGISAQELDEAITQKGKLWLNPGYSFGKGGNGFERMNVACPRSVLQNALERLEKITP

SEQ ID NO: 63047 - DNA, 810 bp, Unknown
  Obtained from environmental sample
  misc_feature (1)..(810): n is a, c, g, or t
atgagcgttaatataaaagattattcgataacagacggaaaacccgtaaatctagattcgtatcctaccaaatatgacggaaagcttgaaaaagaagaagggcaaaaactgctcggtgaattagcggacaaactgcaaaagttacaggctcttctttacgcggacggttccaaatctcttcttgttgttcttcaggcaatggacgcggcgggaaaagattccactataagaaatgtattcggccctgtaaatccgcaaggctgcaaagttgtttcttttaaaaccccaaactcggtggaagtcatgcacgattttttatggcgtatccatcaaaatgttccccgtaaagggcacattggaatattcaaccgctcttattatgaagccgtgcttattgagaaagtaaaaaatctcgcgcccaaggaagtaataaagcagcgttatacgcatataaacgcttttgaatcattactgaatgacgccgggacaaggatagtaaaattctttttgcacatatcaaaggattaccagagacagcgccttcaggaaaggttagacaatcccgagaaattatggaaattcagcccgtctgatattcctgaacgcatgctttgggaagattaccaaaaggcgtatgccgcagcattggaaaattgttcttctgaaatagccccgtggtatattattcccgcggaaaaaagatggtttaggaatttggttattacaaaggtacttgtagaaactctggaatcaatggatcttcattatcctgaagccaaatttgatcccaggactgttgtaattccttaa

SEQ ID NO: 63048 - protein, 269 aa, Unknown
  Obtained from environmental sample
  DOMAIN (28)...(257): Polyphosphate kinase 2
  misc_feature (1)..(269): Xaa is any amino acid
MSVNIKDYSITDGKPVNLDSYPTKYDGKLEKEEGQKLLGELADKLQKLQALLYADGSKSLLVVLQAMDAAGKDSTIRNVFGPVNPQGCKVVSFKTPNSVEVMHDFLWRIHQNVPRKGHIGIFNRSYYEAVLIEKVKNLAPKEVIKQRYTHINAFESLLNDAGTRIVKFFLHISKDYQRQRLQERLDNPEKLWKFSPSDIPERMLWEDYQKAYAAALENCSSEIAPWYIIPAEKRWFRNLVITKVLVETLESMDLHYPEAKFDPRTVVIP

SEQ ID NO: 63049 - DNA, 699 bp, Unknown
  Obtained from environmental sample
  misc_feature (1)..(699): n is a, c, g, or t
atgcttattatagggggtgtggcatactttcttatcagatcggatattaacaagctggttaatttgcatagagcgggtatctggctgggtcttacgacagtagcttcgcttgccatccgcctgatcttgatttgcgccatcctgctccttgtgctttcgattcctgatatactgttccagcgctggcgtttcagggaaaagaataaaatgtccaagcaggaaatgaaagaagaaatgaaaatgtacgagggagacccgcagattcgcaacaggatacgcagccgtttccgggatctactcaagcagaatatagcggaagcggttccaagagcggatgttgtggtcaccaacccgacccattatgccgtcgctcttgagtaccataaggaaaccatgcccgacggcccaatggtcacggcaaagggagccgacgaggttgccgcgcggatcaggaagctggcgcaggaaaacggcgttccgatggtggagaacaaacatctcgcccggactttgtatcaggaagtggaagttggggactatatccccgaagcgtacttcacggtggtagcgacgatattggggagggtaatgcatattaacgaattgcggcgcaaggctaaggcagcgcaagcggcccaggaggcacaggaggctgcggcggccgaggagttagctgaaatctatggagccggcgcatga

SEQ ID NO: 63050 - protein, 232 aa, Unknown
  Obtained from environmental sample
  DOMAIN (1)...(197): FlhB HrpN YscU SpaS Family
  misc_feature (1)..(232): Xaa is any amino acid
MLIIGGVAYFLIRSDINKLVNLHRAGIWLGLTTVASLAIRLILICAILLLVLSIPDILFQRWRFREKNKMSKQEMKEEMKMYEGDPQIRNRIRSRFRDLLKQNIAEAVPRADVVVTNPTHYAVALEYHKETMPDGPMVTAKGADEVAARIRKLAQENGVPMVENKHLARTLYQEVEVGDYIPEAYFTVVATILGRVMHINELRRKAKAAQAAQEAQEAAAAEELAEIYGAGA

SEQ ID NO: 63051 - DNA, 921 bp, Unknown
  Obtained from environmental sample
  misc_feature (1)..(921): n is a, c, g, or t
ttgaaaaaatatgaaaaaaaagacatttacaactgtacaagctgcggctaccaaagctgcgaattaatggctaaagcaatttttaataatcttaacaaaccggaaaactgcgcgcattacaatatagagcttttaaaagaacaaacgaagacggaagaattaaaccgcctcctcaaagaacacattagccgcacaacaggccttatcgaaaaaatctcgcagacagttcatgaccttaacgaaactattgaaatgcaggcgcagtcggtaaaagactcatctcaaaaaacagcgtctatgatagaatcgcttgcctccacttccgaagtttccagaaacaaacagaacgatattcaggaactgcttgataacgccactcagggacaaaagtccatgaaggagacaattcaatcggtacagagcatctctcaatctgtagacggcattagttcggctatcaaaataatcaccgcgattgccgcaaacaccaacctgttatcaatgaacgcggcaatagaggcggctcacgcgggagacgcgggaagaggttttgcggtagtagccgatgaaatccgccgtctttccgataccacaagggaaaattcccacaatatatccaagaccttaaaaaccatcatcgacaatataacggtgacatccaaacaatccggcgatacagactcgcgtataacggaaatgtcaaaggaaattaacagcttcgcggaaacaatgacaaatttgattaacaccttaaacaaactttccgcggaaagccgcgatataacaacagtattgaacagccttagggatcaaagcgccgaggtaagaaccagctatacgtcaatgattacaatgacggacaaccttcgcgacgcaatggaggagttggcggcattatcacaggataagccggccggttaa

SEQ ID NO: 63052 - protein, 306 aa, Unknown
  Obtained from environmental sample
  DOMAIN (10)...(40): Putative Fe-S cluster
  misc_feature (1)..(306): Xaa is any amino acid
MKKYEKKDIYNCTSCGYQSCELMAKAIFNNLNKPENCAHYNIELLKEQTKTEELNRLLKEHISRTTGLIEKISQTVHDLNETIEMQAQSVKDSSQKTASMIESLASTSEVSRNKQNDIQELLDNATQGQKSMKETIQSVQSISQSVDGISSAIKIITAIAANTNLLSMNAAIEAAHAGDAGRGFAVVADEIRRLSDTTRENSHNISKTLKTIIDNITVTSKQSGDTDSRITEMSKEINSFAETMTNLINTLNKLSAESRDITTVLNSLRDQSAEVRTSYTSMITMTDNLRDAMEELAALSQDKPAG

SEQ ID NO: 63053 - DNA, 519 bp, Unknown
  Obtained from environmental sample
  misc_feature (1)..(519): n is a, c, g, or t
atgcttaccacggacggcggggcggtgaacagcgcgtttgtggccctgggcataatcaaagagccgatcctgtggcttgccgaacccaggtatttctggggagtagtcggcgttacttatgtatggaaagaagtaggatggaataccataatataccttgcggcaatcgccggcattgacccgaatttatatgaagccgccgcgattgacgggtgtaacaggtaccagaaaatgtggcgtatcacccttccctgcataaagccgaccattattattctgttaataatgagcatcgggcagatccttgaagcgggttttgaattgcaatatttgctgaggaaaccgcttgttatggacgtgtctgacaccattgacgtctatgtgtatgtattcggcctcagccatttaaacttttcccttgctacggcggcgggtatgttcaagaatttcgtaaatattacccttatatttatcgctaactggatcgcgaaaaaagcgggagaggagcgtcttatatga

SEQ ID NO: 63054 - protein, 172 aa, Unknown
  Obtained from environmental sample
  misc_feature (1)..(172): Xaa is any amino acid
MLTTDGGAVNSAFVALGIIKEPILWLAEPRYFWGVVGVTYVWKEVGWNTIIYLAAIAGIDPNLYEAAAIDGCNRYQKMWRITLPCIKPTIIILLIMSIGQILEAGFELQYLLRKPLVMDVSDTIDVYVYVFGLSHLNFSLATAAGMFKNFVNITLIFIANWIAKKAGEERLI

SEQ ID NO: 63055 - DNA, 966 bp, Unknown
  Obtained from environmental sample
  misc_feature (1)..(966): n is a, c, g, or t
atgaaagcggcaacaatgtcaaaatttgaaaattttaacgcttacctgatgaaaccgtcaacacagtcaaaaattgaaaattatattttccactttttgaatacctgttttttacttctcctttctttcataaccctgtatcctttctggaccaccgtagccgtgtccttcaatgacgcgctggatgcgatccggggcggcattacttttttcccgagaaaattcagcctttttaattatcaggtaatttttcagacgggggccattccccacgcctttatgatttccgtcgcaaggactgtaattaatcttggaacgagcgtgttttttacggcgatggtcgcttttgccctttcccggcgtgaatttgtactgcaaaaaccctttacctttattttaatactttcaatgtatataaacgccggccttattccgacatttttattaatcaagaatcttggtatgtatggaacgttctgggtatatgtagtaccgggaattgtaaacgcttttaattttgtcgtgatgaggacatatatgcgcactattcccgaaagtattattgagtccgcgcgtattgacggttacggggatttttatatatttgcccgcattatattgcctttaagccttcctgttctcgcgacgatagggctctttgtcgccgtaggctcatggaactcgtggtttgacacgatgatttacaatgccggcaatgtgaggctgcacacgcttcagtacaagctgatggaatatctgcaggcaagccagtccgcaggcaagtcggccggagacgccggagccatggctatggccgccggggcggggggaggcgcgaccatggtaacgcccatgagcatacgcgcggcgattacggtaatcgctgccgcccctattttaatgatttatccctttatgcagcgctactttgtagttggcctgaatgtcggcggcgtgaaagaatag

SEQ ID NO: 63056 - protein, 321 aa, Unknown
  Obtained from environmental sample
  DOMAIN (89)...(316): Binding-protein-dependent transport system inner membrane component
  misc_feature (1)..(321): Xaa is any amino acid
MKAATMSKFENFNAYLMKPSTQSKIENYIFHFLNTCFLLLLSFITLYPFWTTVAVSFNDALDAIRGGITFFPRKFSLFNYQVIFQTGAIPHAFMISVARTVINLGTSVFFTAMVAFALSRREFVLQKPFTFILILSMYINAGLIPTFLLIKNLGMYGTFWVYVVPGIVNAFNFVVMRTYMRTIPESIIESARIDGYGDFYIFARIILPLSLPVLATIGLFVAVGSWNSWFDTMIYNAGNVRLHTLQYKLMEYLQASQSAGKSAGDAGAMAMAAGAGGGATMVTPMSIRAAITVIAAAPILMIYPFMQRYFVVGLNVGGVKE

SEQ ID NO: 63057 - DNA, 2172 bp, Unknown
  Obtained from environmental sample
  misc_feature (1)..(2172): n is a, c, g, or t
atgaaaaagatgagggtgaagaagaggacgaatatgtattctgaaaatcttcattttctgcaggaactggacgaagaacagcgggccgccgccactgcggaaaaaaacgtcgtcgttagcgcgggagcgggatcgggaaaaaccagggttcttacctaccgtatcgcgtatatgctcgaaaagggaattccccagcacgctatacttgcccttacctttaccaataaggcggcgaaggaaatggaaacaagggtaaaggagctgacagggaaaaaactgcaatctcttacggtcggtacttttcacgctttcgggctctctataataagggacgaggccgagcttttgggcttccgaaaaaacttttcggtttacgacgaaacggatcgcataacgcttatcaaggaaagccttaaggagtgccgactcgcctcaaaaaaaatcgacctttacgccctttcgcagctgttttcaaacataaaaaccggcatcgcttcatggaacgacggtatgagtgccgcgggcacagccaaaaacaaccccttggcgagcgttgacctgaaacccgtatacgaagcgtaccagagcggccttaaagtgtataacgccgttgattttgacgaccttttaaccctgccccttgaattatttgaaaataatcctgatattctcgcgaaatactgtaagcgttaccgctatatcatggtagatgaattccaggataccagcctgacccagtacaggctgatgcgccttttggccggggctgacgaaaaagacgccgcacacaacgtgtgtgttgtgggagacgatgaccagtcgatctattcatggaggggcgcggattacaggaacatagcccagtttgaaaaagacttccccaatgttaaagtagtaaagctggagcagaactaccgctcgacctctacaatcctggacgcggccaacggcgttatatcgcataacacaaaccgcaaggaaaaaaacctctggtcgccggtaagcggcggcagacccatagagcttgtatacccggataatgaaagcgacgaggcggattttatcgcgtcaaaaataagggaactccagtttaccgaaacgcgcagataccacgatttcggcgtgcttacaaggaccaattcactagccagaaatatagaggaggcgttcctcgcggataatattccctataaagtatccggcggcacgagttttttccagcgcaaggagattaaggacataatttcctaccttaaggtaatcgccaacccgcaggacgacataagccttctgcgcgttataaacaccccgccaaggggcataggcaggacgacggtggcactgttaaatgacatcgcaaaaaagaacaagtcgaatatttgggacgctgtttcccgccttaaccaggcgcgccagggcggtcagcagcaattattccaggacaaaaaggccggtaacgcgcttgaggaattcatggaattaatagaaacccagcgcgccgaaattaccgaaagaaaaaatctgtccggacaaccctggcgcctctccgagaagacaagggctcttattgacgcggttgactactacagttatctggtggttgagcactcaagcgatgaaaaaaaggccaagtggaaattcggcaacatcgaatactttataaagatgattgagaactgggagcgcgatcccgacactgacaatcccggcctttacccctggctcaaccgcatcagcctgatcaccaaagacgacggtgaaaccgacactcttggcaaggtcagccttatgaccatacactccgcgaaggggctggaattccccgtggtctttatcgcgggcgcggaggaaggtttaattccccacgaaaaaagcatcaataccgaagacggcgaagagaatgaagcgggaagcattgaggaggaaaggcgcttgttttacgtcgccataacgcgggcaagggagaagctgtacataagcagctgtaaaaaacgcagccgccggtcgcacagcgactctcaaagcgccgacgaatgcaagccctccccttttctggaagaaatccccagccatttaatccaggccgcccagccggtgtcaaaagaagcggaagaacagatgagtgaagatataatgaaagacataagagcgcgcctgcaaaaagggcagtaa

SEQ ID NO: 63058 - protein, 723 aa, Unknown
  Obtained from environmental sample
  DOMAIN (23)...(521): UvrD/REP helicase
  misc_feature (1)..(723): Xaa is any amino acid
MKKMRVKKRTNMYSENLHFLQELDEEQRAAATAEKNVVVSAGAGSGKTRVLTYRIAYMLEKGIPQHAILALTFTNKAAKEMETRVKELTGKKLQSLTVGTFHAFGLSIIRDEAELLGFRKNFSVYDETDRITLIKESLKECRLASKKIDLYALSQLFSNIKTGIASWNDGMSAAGTAKNNPLASVDLKPVYEAYQSGLKVYNAVDFDDLLTLPLELFENNPDILAKYCKRYRYIMVDEFQDTSLTQYRLMRLLAGADEKDAAHNVCVVGDDDQSIYSWRGADYRNIAQFEKDFPNVKVVKLEQNYRSTSTILDAANGVISHNTNRKEKNLWSPVSGGRPIELVYPDNESDEADFIASKIRELQFTETRRYHDFGVLTRTNSLARNIEEAFLADNIPYKVSGGTSFFQRKEIKDIISYLKVIANPQDDISLLRVINTPPRGIGRTTVALLNDIAKKNKSNIWDAVSRLNQARQGGQQQLFQDKKAGNALEEFMELIETQRAEITERKNLSGQPWRLSEKTRALIDAVDYYSYLVVEHSSDEKKAKWKFGNIEYFIKMIENWERDPDTDNPGLYPWLNRISLITKDDGETDTLGKVSLMTIHSAKGLEFPVVFIAGAEEGLIPHEKSINTEDGEENEAGSIEEERRLFYVAITRAREKLYISSCKKRSRRSHSDSQSADECKPSPFLEEIPSHLIQAAQPVSKEAEEQMSEDIMKDIRARLQKGQ

SEQ ID NO: 63059 - DNA, 447 bp, Unknown
  Obtained from environmental sample
  misc_feature (1)..(447): n is a, c, g, or t
ttgatcattgattataaaaccggtaaagccccttccgcaaaacaatgccgctggaacgaagaagacggccttaaggattttcagattcccatgtacatcaagctgtacgaagatactgcgggcacagcagtaagccgggccttctttttcagtatacataagcaccaaattattccggtgatgggcgaattcaacggaaaagaattttcccgggaaaagtatcagagttccatggacgcccttgaagaggcgataaaatattttgacatttctgtatcgtccctcaattttaagccggaaagaatttcctgcaagacctgcgcttcctgcgaattcaaaacgatctgccgttccctctattccttgaatccacggcaggagcttttcaataataaagttcagcatgaaaaagatgagggtgaagaagaggacgaatatgtattctga

SEQ ID NO: 63060 - protein, 148 aa, Unknown
  Obtained from environmental sample
  misc_feature (1)..(148): Xaa is any amino acid
MIIDYKTGKAPSAKQCRWNEEDGLKDFQIPMYIKLYEDTAGTAVSRAFFFSIHKHQIIPVMGEFNGKEFSREKYQSSMDALEEAIKYFDISVSSLNFKPERISCKTCASCEFKTICRSLYSLNPRQELFNNKVQHEKDEGEEEDEYVF

SEQ ID NO: 63061 - DNA, 1272 bp, Unknown
  Obtained from environmental sample
  misc_feature (1)..(1272): n is a, c, g, or t
ttgaaatcaccgaggggcgggccggccattgtacggaagattgatatacgcggcaacagcaagacgtgggagaaggtgatacggcgcgaaatatcgctcatgcccgggcagcggtaccgccagtcgctcatggcggcgagccagcagaacattatgcgcctcaactacttccagagcgccatgccggacatattgccaaacgacgacggcacgatcgatctgatattcgacattgtggaaaaagacaacatcggccagctcaccgtgggcgcggcctacagcgatcaggacaagctgacaggcaccttctccaccgcgataccgaactttcgcggagccggacaagaactcaaactcgaggtgcagtacggcggctatagaaagctcggcatggtcagtttcacggaaccgtggtcgttcgacacaccgctgtggcttacggggacgctcttcgccgatcagcagatatacagctactcaagcggcgattacgataccacgacgagttacggctttcgcgtcggcgtgggccgctcgcgcctctcatggcccgacaacaagtttcgctttcagtcaatctaccaactcagccacgagcgcacaagcagggcgccggctgaaatcggcgatatgaagatcatagagacgggcataatgagcaaactgcggttaaacgtcgagcgctacgacctcgacatgccgctctttccgaacgagggctcaaggctgaccgtcactccggaggtagccgggctcggcggcgactacaggtacttcaagggcaccgtctcatacgagaactatttcagactccccgccaagcttgtcttcggcagcgatgtgaagctgggcgtgataaccggcctcggcgaactgaagatatcgagagacgacctattcaccggcggcggcgcatacggcgacgcgataatcaggggttactccgactgggcgttcggcgggtatcgccgctggtcggtgggcgacggtatatcgatgttcgccatgaacatgtcgctgcgctatcccgtcatagaccagcagatatacctcggcatattcgccgacatgggcaatacgtggccgtcgatctccggaatagacctcggcgacttatatcgcggggtgggcggcggtgttcgcataaatttacctatgatcggggtgatgggcgtggacatcgggtacggactcgatccgcttgacaagagcaacataaaaggcaagccgagcggaatcagttggcacattattatgaacaagggtttttaa

SEQ ID NO: 63062 - protein, 423 aa, Unknown
  Obtained from environmental sample
  DOMAIN (9)...(81): Surface antigen variable number repeat
  misc_feature (1)..(423): Xaa is any amino acid
MKSPRGGPAIVRKIDIRGNSKTWEKVIRREISLMPGQRYRQSLMAASQQNIMRLNYFQSAMPDILPNDDGTIDLIFDIVEKDNIGQLTVGAAYSDQDKLTGTFSTAIPNFRGAGQELKLEVQYGGYRKLGMVSFTEPWSFDTPLWLTGTLFADQQIYSYSSGDYDTTTSYGFRVGVGRSRLSWPDNKFRFQSIYQLSHERTSRAPAEIGDMKIIETGIMSKLRLNVERYDLDMPLFPNEGSRLTVTPEVAGLGGDYRYFKGTVSYENYFRLPAKLVFGSDVKLGVITGLGELKISRDDLFTGGGAYGDAIIRGYSDWAFGGYRRWSVGDGISMFAMNMSLRYPVIDQQIYLGIFADMGNTWPSISGIDLGDLYRGVGGGVRINLPMIGVMGVDIGYGLDPLDKSNIKGKPSGISWHIIMNKGF

SEQ ID NO: 63063 - DNA, 1119 bp, Unknown
  Obtained from environmental sample
  misc_feature (1)..(1119): n is a, c, g, or t
gtgaagaggtcgttttcaggaaaacggaagccgtggagagctgtcaataagatgaaaaaaatgttgattgccaccgtcctgtcttttttgcttattttggccatggggagtattgcgggcgccgaagcgaaggtgcttgacgcaataaggatagagggattgcttgtcgccaaccacgacgccgtctccgacgccatactgcttaggcccgggagcgaattcacgccggcggatgttcaagaatccgtgcgccgcgtctacaaactcggccatttccgcaaggtagacttcttcgtagacgaggaggcggactcaagcgtctcgctgaagctcgtagtagaggagttccccatagtagacaaggtcgaatttttcggcaacaagaagataaagaagaaggagcttgaggagaaaaagttactgcgtttctacaccccgctctcggacgcgcagctgtacaagagcaggcagactattttggatatgtacgccgaaaagggatacctgctcgcggaggttgacgcgcaagttattgccacaagcgttccgggcaacgcgattgtcaagtacgagataaaggaggggcccagggtaagggtcaggtctatagtatttcacgggaatcgcgacgtaacgtcaaagtggctctcgcggcgtttcaagacgaaggaaaaccgctggtggcgctccggcgatttcaactacgaactataccgctcgcacctcgacactctcgtcatgcagtacaacgacagaggtttgctggacgccgccgtcgaacgcgatactgtttggtactcggaggacaagcgggatatattcatagagataacgataaacgaggggcgcaaatactttgccggcgacgtcgcgttttcgggcaacagcatcatcgagtcagacacgctcgccttgaatgtcgcccttacaaaggggcggccgtttcgtaagagtcaattcgatatgacgaagtacatgctcgaaaccgcctatagggaggaggggtacctttgggtgcgcgtcgacgacaagcggtcgtatcggggggaaaacgccgacaccatagacctgctctttgaaatcaccgaggggcgggccggccattgtacggaagattga

SEQ ID NO: 63064 - protein, 372 aa, Unknown
  Obtained from environmental sample
  DOMAIN (44)...(116): Surface antigen variable number repeat
  misc_feature (1)..(372): Xaa is any amino acid
MKRSFSGKRKPWRAVNKMKKMLIATVLSFLLILAMGSIAGAEAKVLDAIRIEGLLVANHDAVSDAILLRPGSEFTPADVQESVRRVYKLGHFRKVDFFVDEEADSSVSLKLVVEEFPIVDKVEFFGNKKIKKKELEEKKLLRFYTPLSDAQLYKSRQTILDMYAEKGYLLAEVDAQVIATSVPGNAIVKYEIKEGPRVRVRSIVFHGNRDVTSKWLSRRFKTKENRWWRSGDFNYELYRSHLDTLVMQYNDRGLLDAAVERDTVWYSEDKRDIFIEITINEGRKYFAGDVAFSGNSIIESDTLALNVALTKGRPFRKSQFDMTKYMLETAYREEGYLWVRVDDKRSYRGENADTIDLLFEITEGRAGHCTED

SEQ ID NO: 63065 - DNA, 621 bp, Unknown
  Obtained from environmental sample
  misc_feature (1)..(621): n is a, c, g, or t
gtgaattcgctcccgggcctaagcagtatggcgtcggagacggcgtcgtggttggcgacaagcaatccctctatccttattgcgtcaagcaccttcgcttcggcgcccgcaatactccccatggccaaaataagcaaaaaagacaggacggtggcaatcaacatttttttcatcttattgacagctctccacggcttccgttttcctgaaaacgacctcttcaccgtccgcgcaaagcgatattatgtcgccgtcgccgaatttgttcaacaggaactcttcggccaacgggtcctccacggagcgctggatggaacggcgcagcgggcgcgctcccaatatcgggtcgtagcccttatccacgagcagttttttcatctccggcgtaaagatgagcttgatattcctatcgacaaggcgctcctgcacctcgttcagctggatatcgacgattttggcgatctcatctttgccgaggggcgcgaagacgatggtctcgtctatgcggttgatgaactcccggatgaatatccgcttcatctcgtccatcaccttgccgcgcatcgcctcgtaatcggtgtccgcgctgttcctcccgagcccacggtcccgtttttctga

SEQ ID NO: 63066 - protein, 206 aa, Unknown
  Obtained from environmental sample
  misc_feature (1)..(206): Xaa is any amino acid
MNSLPGLSSMASETASWLATSNPSILIASSTFASAPAILPMAKISKKDRTVAINIFFILLTALHGFRFPENDLFTVRAKRYYVAVAEFVQQELFGQRVLHGALDGTAQRARSQYRVVALIHEQFFHLRRKDELDIPIDKALLHLVQLDIDDFGDLIFAEGREDDGLVYAVDELPDEYPLHLVHHLAAHRLVIGVRAVPPEPTVPFF

SEQ ID NO: 63067 - DNA, 474 bp, Unknown
  Obtained from environmental sample
  misc_feature (1)..(474): n is a, c, g, or t
atgacctcaacgcgggcacgcgngacgtcagaaaaacgggaccgtgggctcgggaggaacagcgcggacaccgattacgaggcgatgcgcggcaaggtgatggacgagatgaagcggatattcatccgggagttcatcaaccgcatagacgagaccatcgtcttcgcgcccctcggcaaagatgagatcgccaaaatcgtcgatatccagctgaacgaggtgcaggagcgccttgtcgataggaatatcaagctcatctttacgccggagatgaaaaaactgctcgtggataagggctacgacccgatattgggagcgcgcccgctgcgccgttccatccagcgctccgtggaggacccgttggccgaagagttcctgttgaacaaattcggcgacggcgacataatatcgctttgcgcggacggtgaagaggtcgttttcaggaaaacggaagccgtggagagctgtcaataa

SEQ ID NO: 63068 - protein, 157 aa, Unknown
  Obtained from environmental sample
  misc_feature (1)..(157): Xaa is any amino acid
MTSTRARXTSEKRDRGLGRNSADTDYEAMRGKVMDEMKRIFIREFINRIDETIVFAPLGKDEIAKIVDIQLNEVQERLVDRNIKLIFTPEMKKLLVDKGYDPILGARPLRRSIQRSVEDPLAEEFLLNKFGDGDIISLCADGEEVVFRKTEAVESCQ

SEQ ID NO: 63069 - DNA, 1368 bp, Unknown
  Obtained from environmental sample
  misc_feature (1)..(1368): n is a, c, g, or t
atggccgaggtggcttatatgaccgttacttccgaacagcgaaacgatgataatgttgagattgttttttccataaccgatacgggccagggaatgacacaggaacaagtgcgtaatttaggcaccgaatattcccgctttaatatggaagctaaccgtaaaaccgagggaaccggccttgggatgaatattacaatgaatttggttcatttgatgggcggtaatatttccatagacagcactccgggtcttggttcgacatttaccgtgcatataccgcagaaatgcgttgattttgaaaccatcggaaaggaaattgcagataaccttgtgcatcataatcttgacggcgtgtccagaatgagaaccatacaggtaaaacgggattttatgccttatggccgcgtattgatagtggatgatgtggaatcgaacctgtatgtcgcaaaggggcttatgtccccgtatggattgtcaatagacgcttctaccagcgggtttgaagcgatagaaaaaatcagaagcggctcggtatatgacgttatctttatggatcacatgatgcccaagatggacggcattgaggccgcgaaaatcatccgcggtttgggttataaagagcctattgtagcgttaaccgcaaacgctctcgccggacaggcggaaatatttttagataacggttttgacggatatatttccaaacccatagacatacgccagcttaacagcacgctgaataaatttgtgcgcgacaaacagcctgcggcggtgattgaagaggcgcggcggcaaagggaaagcatgtccaacgcgactcaattttcatctttaagccggcagttaatagagtttttccttcgtgacgcgaaaaaaagcgcgtccgttctggaaacaatatatgttaacagcggccgtaaaagcgacgatttatcaatgtttatcataaatattcacggcatgaaaagcgcccttgcgaatatatcagaggatgaactatcggatcatgcggcaaggctggaacaggcgggacgggaaaagaatatcaaatttattctggcggaacttccgtcgttcatggaaaagctttatagtttaatggataaactggaaagtgatatcgccgcaaaagaaggctcgggcgatggagaggtaaatccccaatatttaaaagaaaaactgcttgcgattaaagcctcatgcgctatattaaacaaaaaagccgcaaaaaaaatattggcggaattaaaggaaaaaacgctgccggctccgacggcgcagatgttaagcaatatttccgaatacttactgcacagcgaatttgacgagataattaaaactatagatgactttgtgaagcataattaa

SEQ ID NO: 63070 - protein, 455 aa, Unknown
  Obtained from environmental sample
  DOMAIN (1)...(95): Histidine kinase-, DNA gyrase B-, and HSP90-like ATPase
  misc_feature (1)..(455): Xaa is any amino acid
MAEVAYMTVTSEQRNDDNVEIVFSITDTGQGMTQEQVRNLGTEYSRFNMEANRKTEGTGLGMNITMNLVHLMGGNISIDSTPGLGSTFTVHIPQKCVDFETIGKEIADNLVHHNLDGVSRMRTIQVKRDFMPYGRVLIVDDVESNLYVAKGLMSPYGLSIDASTSGFEAIEKIRSGSVYDVIFMDHMMPKMDGIEAAKIIRGLGYKEPIVALTANALAGQAEIFLDNGFDGYISKPIDIRQLNSTLNKFVRDKQPAAVIEEARRQRESMSNATQFSSLSRQLIEFFLRDAKKSASVLETIYVNSGRKSDDLSMFIINIHGMKSALANISEDELSDHAARLEQAGREKNIKFILAELPSFMEKLYSLMDKLESDIAAKEGSGDGEVNPQYLKEKLLAIKASCAILNKKAAKKILAELKEKTLPAPTAQMLSNISEYLLHSEFDEIIKTIDDFVKHN

SEQ ID NO: 63071 - DNA, 750 bp, Unknown
  Obtained from environmental sample
  misc_feature (1)..(750): n is a, c, g, or t
ttgcccgtgcaggaattcaacgaaaaagaaattttaagattcaatcccgatacaggcgaaaggctgtcaaatttctggggttattcaacggcgtcgttctttgcgcccaagggttcttacgcttctgataaaacgccgggcgggcaggtgaaagaattcaaagagatggtaagagaactgcacaaggcgggaatcgaggtaatacttgacattgtttttaaccacaccgccgagggcaacgaaatggggccgactatatctttccgaggtttggacaattcaatttattacatactaaacgagaaccgccgctattatcaaaattattcaggatgcggcaatacgatgaactgcaaccatcccgtagtgcgcaccttcatcatggactgcctccgctattgggtaatggaaatgcatgtggacggattccgttttgatcttggttccattttggggcgcgatcaacagggaaggataatggaaaaccctcccatgctggaacgaatcgcggaagaccccatattgagttcgacaaaaataatcgccgaagcgtgggacgccggcggcgcttatcaggttggatggtttccgggcggccgatgggcgaaatggaacgacaaataccgcgaccacgtgcgcagatactggcgcaaccgatctatggaaacccgctattttgctacgccccctttccggcagttccgaaccttttattgccccacgggacgaaagcccttttccccctattaa

SEQ ID NO: 63072 - protein, 249 aa, Unknown
  Obtained from environmental sample
  DOMAIN (10)...(235): Alpha amylase, catalytic domain
  misc_feature (1)..(249): Xaa is any amino acid
MPVQEFNEKEILRFNPDTGERLSNFWGYSTASFFAPKGSYASDKTPGGQVKEFKEMVRELHKAGIEVILDIVFNHTAEGNEMGPTISFRGLDNSIYYILNENRRYYQNYSGCGNTMNCNHPVVRTFIMDCLRYWVMEMHVDGFRFDLGSILGRDQQGRIMENPPMLERIAEDPILSSTKIIAEAWDAGGAYQVGWFPGGRWAKWNDKYRDHVRRYWRNRSMETRYFATPPFRQFRTFYCPTGRKPFSPY

SEQ ID NO: 63073 - DNA, 546 bp, Unknown
  Obtained from environmental sample
  misc_feature (1)..(546): n is a, c, g, or t
atgaccagcgcgtgtaccgcaccctgtaaattttccgcggcggtaaaactcgcgcccttatccgtcaagatagccgcttccgcggagttttgcgcgggaacgataaattcgcgtatcccttcggcaagtccggcggcgactgcggcaagaacgccgcgtacggggcgtattctgccggaaagctcaagctctcccatgatgagcaagtctcccgtaacagcgactaatcccgccgccgccattaccgaaagcgcaatcggcagatcgagcgcggctccgtcttttttcaatcctgcgggagcgagattgattaaaattctgtccagcggaaaactgaaccccgaatttctgaaagccgcccgcactctgtcgcgcgcttctctgaccgctccttcagcaagccctgaaatgtcaacgccgggaattcccctgcgaatatccgtctcaacccggacaatgattccgccagcccccagagggcataaatgtaaaaatacccatagaatctcctgcctatatatggcgtgcagatgctccggcgcttga

SEQ ID NO: 63074 - protein, 181 aa, Unknown
  Obtained from environmental sample
  misc_feature (1)..(181): Xaa is any amino acid
MTSACTAPCKFSAAVKLAPLSVKIAASAEFCAGTINSRIPSASPAATAARTPRTGRILPESSSSPMMSKSPVTATNPAAAITESAIGRSSAAPSFFNPAGARLIKILSSGKLNPEFLKAARTLSRASLTAPSASPEMSTPGIPLRISVSTRTMIPPAPRGHKCKNTHRISCLYMACRCSGA

SEQ ID NO: 63075 - DNA, 693 bp, Unknown
  Obtained from environmental sample
  misc_feature (1)..(693): n is a, c, g, or t
atgatactataccacggcgggacagacatcgttaaagaaccgaacctcgcttccggcgaacgcagcagggatttcggcgtcggcttttatacgacggatatccatgaacaggcgatgaaatgggcaatacggcaaggtcaggttcgcggtaaacaggcgatcctaaacatatacgaatttgacgaagacagggcggagaaggatttaaaattcaagaactttactgaatactcccttgaatggctcaatttcgtcgtgagcaatagggcaaagcggcaatccaaacacgatttcgacatcgtctttggaaagatcgccaatgacgacgtcggcgaaacggttcaggctgttatagacggacttacgcctcctgattttgccctgcaaaagttaaagttcatgcaggcaaacaatcaatacgcgttctgtaccgaaaaagcgctatcttacataaaattttcagatgctcaaaatgtcggacaaaaaatgtcgcacggaacagtaagggcggcgacgctgaaaacgataatcccgcttatcatggagcattttaactgcggcgaaaacgaggcgctgaaaaagttctatgaatcccacatcggggcctgctacgcggacgacaataccgggctgtacgggcagagcgcttattatgtcgcggatttgttttttgaggagtgcgagaacaattag

SEQ ID NO: 63076 - protein, 230 aa, Unknown
  Obtained from environmental sample
  misc_feature (1)..(230): Xaa is any amino acid
MILYHGGTDIVKEPNLASGERSRDFGVGFYTTDIHEQAMKWAIRQGQVRGKQAILNIYEFDEDRAEKDLKFKNFTEYSLEWLNFVVSNRAKRQSKHDFDIVFGKIANDDVGETVQAVIDGLTPPDFALQKLKFMQANNQYAFCTEKALSYIKFSDAQNVGQKMSHGTVRAATLKTIIPLIMEHFNCGENEALKKFYESHIGACYADDNTGLYGQSAYYVADLFFEECENN

SEQ ID NO: 63077 - DNA, 408 bp, Unknown
  Obtained from environmental sample
  misc_feature (1)..(408): n is a, c, g, or t
atgagctcttcaaaagaaaagaatagacgcatcctagtcatcgacgacgaggcggacgtcctcgagttcttgaggatctacctggagacgatgggctgggaggtaacggccgtgcccacagtggcggccgcgttcgaggctttggccaaatccccgtatttcttagtcataaccgacatcgccatgcccgaaatggacggctatgagttggttgacgcggtgaaagaaaagggttaccaatgccgcttcgccctcatgaccggcttcggctacaaccccaaacacacgatcataaaaatcaacaaaaccgtaaaattcccatgcctcttcaaaccgttcaacagagaaaaagtaatggacgcggtaaacgaggcattttccatatatcacagcgatattacagagtaa

SEQ ID NO: 63078 - protein, 135 aa, Unknown
  Obtained from environmental sample
  DOMAIN (9)...(123): Response regulator receiver domain
  misc_feature (1)..(135): Xaa is any amino acid
MSSSKEKNRRILVIDDEADVLEFLRIYLETMGWEVTAVPTVAAAFEALAKSPYFLVITDIAMPEMDGYELVDAVKEKGYQCRFALMTGFGYNPKHTIIKINKTVKFPCLFKPFNREKVMDAVNEAFSIYHSDITE

SEQ ID NO: 63079 - DNA, 378 bp, Unknown
  Obtained from environmental sample
  misc_feature (1)..(378): n is a, c, g, or t
atgaagaaaaaaatcttggttatcgaggacgacagcgacatcgccgatctcgtcaagctggtgcttgagaccgacatgtttgaggtgcaagccgtcctcgaaccggaaacagccttcgacaaagtcaaagagtataggcctgacgccatacttcttgacatctgtatgccgaagttggacggatgggcggtgttcaaactgatccgcggatgcgaagagtttaaagacgtccccatcgcgattctctccggcaaaagtcaacagctggaccacatggtcgggctgcacataatgaacgcggacgcgtatatcgcaaaaccgttcggaaaacaggaactgatagacaaaacttatgagctcttcaaaagaaaagaatag

SEQ ID NO: 63080 - protein, 125 aa, Unknown
  Obtained from environmental sample
  DOMAIN (3)...(118): Response regulator receiver domain
  misc_feature (1)..(125): Xaa is any amino acid
MKKKILVIEDDSDIADLVKLVLETDMFEVQAVLEPETAFDKVKEYRPDAILLDICMPKLDGWAVFKLIRGCEEFKDVPIAILSGKSQQLDHMVGLHIMNADAYIAKPFGKQELIDKTYELFKRKE

SEQ ID NO: 63081 - DNA, 525 bp, Unknown
  Obtained from environmental sample
  misc_feature (1)..(525): n is a, c, g, or t
ttggcgggagtgctcgtgacgagcaatcccgggctatacgagcgtctgatttttatcgccaagacgaccggcgcgtgcttgtcgcctttcgacagttttttaatcgtacgcggaataaagacgctggccgtccgtatggaccgtatgcaagagagcgcgttggccatagcgcggtggctgacaaatcatgacgctgtgaagaaagtgtattatataggcttgccggagcaccccgactacgagatttcgcgccgccaagcaagcggtttcggcggaatgatctcgttttcgctcaaagattcggagacggcggtcaggacattggaacgggtgaagataataaagtacgcggagagccttggcggtgcggagagtttgataacgtacccaatgttgcagacgcacgccgatatgccggaggaagagaggaacgcgagggggataaacgcggaatttttacggctgtccgtgggcttagagagtgcggatgatctaataaaagatttaaagcaggctatcggttga

SEQ ID NO: 63082 - protein, 174 aa, Unknown
  Obtained from environmental sample
  DOMAIN (1)...(174): Cys/Met metabolism PLP-dependent enzyme
  misc_feature (1)..(174): Xaa is any amino acid
MAGVLVTSNPGLYERLIFIAKTTGACLSPFDSFLIVRGIKTLAVRMDRMQESALAIARWLTNHDAVKKVYYIGLPEHPDYEISRRQASGFGGMISFSLKDSETAVRTLERVKIIKYAESLGGAESLITYPMLQTHADMPEEERNARGINAEFLRLSVGLESADDLIKDLKQAIG

SEQ ID NO: 63083 - DNA, 369 bp, Unknown
  Obtained from environmental sample
  misc_feature (1)..(369): n is a, c, g, or t
gtgctttatgctgtagctgtaggctatctggcggtctacgggtcggtcgaagttgaatttagccaagacgggtctccttatcaaccgatagcctgctttaaatcttttattagatcatccgcactctctaagcccacggacagccgtaaaaattccgcgtttatccccctcgcgttcctctcttcctccggcatatcggcgtgcgtctgcaacattgggtacgttatcaaactctccgcaccgccaaggctctccgcgtactttattatcttcacccgttccaatgtcctgaccgccgtctccgaatctttgagcgaaaacgagatcattccgccgaaaccgcttgcttggcggcgcgaaatctcgtag

SEQ ID NO: 63084 - protein, 122 aa, Unknown
  Obtained from environmental sample
  misc_feature (1)..(122): Xaa is any amino acid
MLYAVAVGYLAVYGSVEVEFSQDGSPYQPIACFKSFIRSSALSKPTDSRKNSAFIPLAFLSSSGISACVCNIGYVIKLSAPPRLSAYFIIFTRSNVLTAVSESLSENEIIPPKPLAWRREIS

SEQ ID NO: 63085 - DNA, 1200 bp, Unknown
  Obtained from environmental sample
  misc_feature (1)..(1200): n is a, c, g, or t
ttgataaggagacccgtcttggctaaattcaacttcgaccgacccgtagaccgccagatagcctacagctacagcataaagcacgacccgatctcccgcaaaaagcctctcgacgtgttgccgatgtgggtcgccgacatggattttccggctccgccgtgcgttttagacgtcctatcggaacgcgtaaagcacggtattttcggctactccgaacccgacgccaaatactttaccgcggtacgcgggtggtttgaaaagcgtttcaattggaatgtcgagcgtgagtggctctccataaccccgggagtggtgaccgccatatacatagcgattcgcgccctcacaaaacaagacgggggagtactcatacagcagccggtctaccaccccttcgagtccgccgtcaaggatacgaagcgcaagctgcttgtcaatcgactcgtatacggtagcgatggtcggtacggtatagattttgctgactttgaggagaaggcgaaacaggcggagatgttcatcctttgcaacccgcacaatcccgtggggcgggtctggacgcgcggcgaactcatgcgtatgggcgagatttgtctgcgccacggcgtaaccgttatttccgacgaaatccaccaagattttatctacgaggggcgcaagcacttggtcttttcaaaccttgacgggcgttttgccgacgtaacgatgacttgtaccgcgccgtctaagacgttcaaccttgccggattgcagttggcgaatatcttcgtaccaaacaaggctatgcgcaacgcgtttgagagggagtatgcgggcgtagggttaagccaaccgccgctcatgggtttggcggcgtgtcaggccgcctacgaggggggtgctgagtggcttgatcagttgattaattaccttgccggtaatatggctctgataggggattttttgcgtacgcatataccgaaggtcaagttaatagagccggagggcacgtatctcgcgtggctcgactgcgccgggcttgggctgtctgtgtgcgggttaaacgactttatcaccaacaaggcaagactatggctaaacaacggacccatgttcggtttgggcggcgaggggttccaaaggatgaacgcggcttgcccgaaatcggtggtgaatgaggcgttggagcggctgaaatcggctgttattgggttgggttga

SEQ ID NO: 63086 - protein, 399 aa, Unknown
  Obtained from environmental sample
  DOMAIN (37)...(391): Aminotransferase class I and II
  misc_feature (1)..(399): Xaa is any amino acid
MIRRPVLAKFNFDRPVDRQIAYSYSIKHDPISRKKPLDVLPMWVADMDFPAPPCVLDVLSERVKHGIFGYSEPDAKYFTAVRGWFEKRFNWNVEREWLSITPGVVTAIYIAIRALTKQDGGVLIQQPVYHPFESAVKDTKRKLLVNRLVYGSDGRYGIDFADFEEKAKQAEMFILCNPHNPVGRVWTRGELMRMGEICLRHGVTVISDEIHQDFIYEGRKHLVFSNLDGRFADVTMTCTAPSKTFNLAGLQLANIFVPNKAMRNAFEREYAGVGLSQPPLMGLAACQAAYEGGAEWLDQLINYLAGNMALIGDFLRTHIPKVKLIEPEGTYLAWLDCAGLGLSVCGLNDFITNKARLWLNNGPMFGLGGEGFQRMNAACPKSVVNEALERLKSAVIGLG

SEQ ID NO: 63087 - DNA, 549 bp, Unknown
  Obtained from environmental sample
  misc_feature (1)..(549): n is a, c, g, or t
atgattcttggcggcgatgaattcgggcgtactcaaaacggcaacaacaacgcttattgtcaggacaatgaaacgtcatggtacgactggtctctgcttgaaaaaaatgccggcttgtaccgttttgtcaaagaaatgatagctttccgtcttagacatcacggttttatgcgcccagaatttttcacgggaaagggcggcgcgtacaaaggcattcccgatataagctggttcaatgaaaaaggcgcacccattgattgggaaaaaatagattattgtttagctttacgtttacttggcacaaaagcggatacgttagctgatagggatgataatgatttttacataatgtttaacgcaaactcagacccttatacttttacagtcgccgatccgccgccgaagaaaaaatggtatcgcgctgtagatacagggcagtcgtctcccaacgacattcttcttccgggaaccgaagaaattcttatttatcaaaactcatattctattaaagcccgaagtacggtaatattaatttccaaggaagggtaa

SEQ ID NO: 63088 - protein, 182 aa, Unknown
  Obtained from environmental sample
  misc_feature (1)..(182): Xaa is any amino acid
MILGGDEFGRTQNGNNNAYCQDNETSWYDWSLLEKNAGLYRFVKEMIAFRLRHHGFMRPEFFTGKGGAYKGIPDISWFNEKGAPIDWEKIDYCLALRLLGTKADTLADRDDNDFYIMFNANSDPYTFTVADPPPKKKWYRAVDTGQSSPNDILLPGTEEILIYQNSYSIKARSTVILISKEG

SEQ ID NO: 63089 - DNA, 612 bp, Unknown
  Obtained from environmental sample
  misc_feature (1)..(612): n is a, c, g, or t
atggacgacagcagttttatttttggcgtcgatcttgacggcgtagtaggcgatttttacggcgagataagaaaaatcgccgccgaatggctgaacaaaccgatagattcacttaccaccgaaatttcctacggacttaaagagtggggtcttgacgagttcggcggctacgacagattgcacagattcgccgtaacgcaaagaaatattttcggcagtatggaaccgattcggcacgctcccgctatcctgcggaaattatcaagcaacggaataagaatccgtattattacacatcggctatttttaaaatattctcacgcaacgacaataaagcaaacaatagattggcttgataattacgatattccctactgggacatttgctttatgaacgacaaaggcgcggtcggcgcgaacgtctacatagacgacacccccgaaaacataatcagtctgcgaaagcacggctgtaaaacaatagtattcagtaactccaccaaccgcggacttcccggtccgcgcgccgaaaactggcttgaagttgaaaaaattgtaatggaagcctgcgaagaatggaaaacaggcactgtgggactctttggtaattga

SEQ ID NO: 63090 - protein, 203 aa, Unknown
  Obtained from environmental sample
  misc_feature (1)..(203): Xaa is any amino acid
MDDSSFIFGVDLDGVVGDFYGEIRKIAAEWLNKPIDSLTTEISYGLKEWGLDEFGGYDRLHRFAVTQRNIFGSMEPIRHAPAILRKLSSNGIRIRIITHRLFLKYSHATTIKQTIDWLDNYDIPYWDICFMNDKGAVGANVYIDDTPENIISLRKHGCKTIVFSNSTNRGLPGPRAENWLEVEKIVMEACEEWKTGTVGLFGN

SEQ ID NO: 63091 - DNA, 564 bp, Unknown
  Obtained from environmental sample
  misc_feature (1)..(564): n is a, c, g, or t
ttgaaagacattgttctaacgacaattaacgccaaatggacgcacccctcgctggcgctgcgcctgctcaaagccaacctcggttcccttgaacctcaatgcgaaataatcgaattcgctctgcgtcaaccgttatgcgaaaagacagagcctctgcttgctatgcgtccgcgaattttaggcatctctatctcaatatggaatcaccttgcgacaatagagcttcttgaagctctggaaaaagaatgggtacacagcgaaaaacccatagtaattcttggcggtcctgaaatttcttttttacctgatgacgcaaaaatatttgagtatgctgattatataattcgcggagagggagaaacagttttttccgctctatgtgagagtatcttacaaaatgaaaataaaatgatcgggtgcggacgcgcaaagccttgcaggcgacatatggctggatcgccaatgcagccacgccaaagcgtgcgtccaacgccgccagccatccggagccggcagggctttgcgcgcccgcaccaaagaattaattttcaatatgacagataa

SEQ ID NO: 63092 - protein, 187 aa, Unknown
  Obtained from environmental sample
  misc_feature (1)..(187): Xaa is any amino acid
MKDIVLTTINAKWTHPSLALRLLKANLGSLEPQCEIIEFALRQPLCEKTEPLLAMRPRILGISISIWNHLATIELLEALEKEWVHSEKPIVILGGPEISFLPDDAKIFEYADYIIRGEGETVFSALCESILQNENKMIGCGRAKPCRRHMAGSPMQPRQSVRPTPPAIRSRQGFARPHQRINFQYDR

SEQ ID NO: 63093 - DNA, 1323 bp, Unknown
  Obtained from environmental sample
  misc_feature (1)..(1323): n is a, c, g, or t
atgggaaggggaatatttaacgctttactcaataatcttgatgtagttgcaaatgatttagcagataacaggcgggaaggtttcgacctcaaatacaaacttattgacgctcttaaaagcgccttgtcggttttctttttccagcatccatccatgctggatttccaaacaagaatgaagcagaaatggaaacgcagcaatctggaaaccataatgggggtaaaagaaataccgagcaacgtacagataacgaccctgcttgacggaatagaccccgattctttaagcggcgcattcaatgaaaacctgcataccgtggatgaatggggcggccttaagggcttccgctgcctggacggcggcgttcttttggcgcttgacggcgtctggtatttctcatctgaacagatacattgcgaacattgccttcatacaacaaaagaagatgttacgacatactaccacagcgcgcttgcaggaacgctggtaaagcccggaaacacggcggttttgcctgtagcgcctgaaatgatagccaatactgacaacgcatccggtgaaacgaacagcaaaaagcaggattgcgaacgaaatgcggccaaaagatggcttgttaagcacgcacaggagtataaatggctttccccgacacttctaggcgatgatttattctcaaattacccattttgcaaggaagtattggaatacggctatagttttatctttacttgcaaagaggattcccacccttggctcactgagacggttgaaaactcttttctacaggaaacttccaagcgggaatggaacgggagacatcaccttgtctatacctaccgatggcttaatggggttgaaatacgggacaataaagaaaccctgctggtaaattatttttctctttcgatttggaacgaggaaaaaaacaaacaaaccttttataatacctggataaccaataaaacgataaccaacgacatgntttctcttcttgcttcatgcgcccgctcgcgctggaagatagaaaacgagcataactcggactttagtccgcacgtcctgaaaaaccacggctacaacttggagcataattttgggcacgggaaaacccatgccagcgaaacgtactgcttgttgcacctgctggcttttcaaatgcactcgctgctggatatcaccgatgaagattaccgtaaggcaagggcgtatgcccgacggagggacgaattctttaacgaactgcgtgttctcatgcgccgtaacttctttgaaagttggcagcaacttattgttttcatgtattctgacattgatacggggtaa

SEQ ID NO: 63094 - protein, 440 aa, Unknown
  Obtained from environmental sample
  misc_feature (1)..(440): Xaa is any amino acid
MGRGIFNALLNNLDVVANDLADNRREGFDLKYKLIDALKSALSVFFFQHPSMLDFQTRMKQKWKRSNLETIMGVKEIPSNVQITTLLDGIDPDSLSGAFNENLHTVDEWGGLKGFRCLDGGVLLALDGVWYFSSEQIHCEHCLHTTKEDVTTYYHSALAGTLVKPGNTAVLPVAPEMIANTDNASGETNSKKQDCERNAAKRWLVKHAQEYKWLSPTLLGDDLFSNYPFCKEVLEYGYSFIFTCKEDSHPWLTETVENSFLQETSKREWNGRHHLVYTYRWLNGVEIRDNKETLLVNYFSLSIWNEEKNKQTFYNTWITNKTITNDMXSLLASCARSRWKIENEHNSDFSPHVLKNHGYNLEHNFGHGKTHASETYCLLHLLAFQMHSLLDITDEDYRKARAYARRRDEFFNELRVLMRRNFFESWQQLIVFMYSDIDTG

SEQ ID NO: 63095 - DNA, 441 bp, Unknown
  Obtained from environmental sample
  misc_feature (1)..(441): n is a, c, g, or t
ttgtccacaagcacctgcctgtcaaaacgtccggggcgcaggagcgcggggtctaacacatcgggtctgtttgtggcggccaggataatcaatccgccggcgttgtcaaaaccgtccatttctacaaggagctggttcagcgtttgttcgcgctcgtcgttgccgccgccgatattgtttattctgctcttgccgatggcgtctaactcatcaataaaaataatacagggcgctttgtttcttgcctgcttgaataaatcgcgtacacgcgccgcaccgacgccgacaaacatttctacaaagtcggccccgctcatgcggaaaaaggaaactctcgcttcccctgcgacggcgcgcgccagcaaagtttttcccgtccccggcggtcccaccaaaagcactcccttgggtatcttgccgccgatctccttgtacttctga

SEQ ID NO: 63096 - protein, 146 aa, Unknown
  Obtained from environmental sample
  misc_feature (1)..(146): Xaa is any amino acid
MSTSTCLSKRPGRRSAGSNTSGLFVAARIINPPALSKPSISTRSWFSVCSRSSLPPPILFILLLPMASNSSIKIIQGALFLACLNKSRTRAAPTPTNISTKSAPLMRKKETLASPATARASKVFPVPGGPTKSTPLGILPPISLYF

SEQ ID NO: 63097 - DNA, 1371 bp, Unknown
  Obtained from environmental sample
  misc_feature (1)..(1371): n is a, c, g, or t
ttgccaaatacgcgcaagaaaaaattgaaggccgctcaattgaactgtaacttacgaaccaagaccctactccctactccctactccccactcccttttctcttcctctgttccctgttccctgttctctgttccctgttctctgcctgtgcttccaatcccgtgccgtccggcccggttgtaattcctgaggactttaccgggattgtccatgcgggccataccaatacaccgcaggaatacgcccttctggacaggatgggcgcaagttggctccttactactttctattgggaccggattgaaagaacggaaggccaatggaattttaacgattacgataagtatgttgatacggcaaaagcggcaggaaaaaaaataatcggcgttcttgcttatgatgtctcatggatccacaaagacggtaaatcccacagatatatcccaccggacaaagttcatgcgtattcgaattatgtgcaaaagacggcggagcattttaaaggcagagttgacgcgtggtgtatctggaacgagccaaactttagcttctggaatggaagcagggacgaatttctgtcgcttgcccgccaggcctcggacgctttaagagaagttgactctgaggtgacccttttgggcggggcatttaaccgcgggatttttggccttccgatggcgtatatcaatggcctgtttgaatcgggcgcaatggataaggcggacgccgtcgcctttcatccctatgagctaaaccccaatcgtaccgccaggctattcctgaaattccgcgcccaggttgccaaatatggctttgaagaccgtatatggctaaccgaagtaggataccctaccgggggctggtatcctaccgccgtttcagaaaaaaactttcccgagtatgttgttaaaacttttatcggcctggccattaacggcgcgaaaaaaatcttatggtatcagttgttcgatccgctggaacgttctaaaaacaattcagaggatttttttggacttgtacggagtgataacgattacacatccaaaggggcggaggcattccgtctctgcgccctatacctttccggagccgcatactatcaggagcttcccctacgaaaaaacctgcccaacactctccgctcattttattttgaacagccatcgggagggcgggcgcttgtcttatggaaggacggggggacgataaaccttatgttacaggcttcggcaagcgattataccaggcacgacattgttacgggaaacgccgaaacaatatccgcgcaaacacccattgcggttggaaatgttccggtttttataacctggcagggagggggaatcccttcattggagaaaaaacgctga

SEQ ID NO: 63098 - protein, 456 aa, Unknown
  Obtained from environmental sample
  misc_feature (1)..(456): Xaa is any amino acid
MPNTRKKKLKAAQLNCNLRTKTLLPTPYSPLPFLFLCSLFPVLCSLFSACASNPVPSGPVVIPEDFTGIVHAGHTNTPQEYALLDRMGASWLLTTFYWDRIERTEGQWNFNDYDKYVDTAKAAGKKIIGVLAYDVSWIHKDGKSHRYIPPDKVHAYSNYVQKTAEHFKGRVDAWCIWNEPNFSFWNGSRDEFLSLARQASDALREVDSEVTLLGGAFNRGIFGLPMAYINGLFESGAMDKADAVAFHPYELNPNRTARLFLKFRAQVAKYGFEDRIWLTEVGYPTGGWYPTAVSEKNFPEYVVKTFIGLAINGAKKILWYQLFDPLERSKNNSEDFFGLVRSDNDYTSKGAEAFRLCALYLSGAAYYQELPLRKNLPNTLRSFYFEQPSGGRALVLWKDGGTINLMLQASASDYTRHDIVTGNAETISAQTPIAVGNVPVFITWQGGGIPSLEKKR

SEQ ID NO: 63099 - DNA, 951 bp, Unknown
  Obtained from environmental sample
  misc_feature (1)..(951): n is a, c, g, or t
ttggcggtaacataccctgaaatctacgatatgcaggtagaagctatcgctcttgccgccgttgaatgcgtaaaagaaaaaattccggtacatcccgaaattatgatacctatcgtagtaaccgcaagagaactcaggcttttacgccccaatgtggagaaaatatttgaaaaagtgctttccgcggcgggagtaaaggttcctgtaaccgttggtacgatgattgaagtgccgcgcgccgctattcgctcggcgcatatcgcgcattatgcggactttttcagttttggaacaaacgatcttacacagatgacattcgcctttagccgcgatgacgttgcgtcgttcctgcctttctatcttgaaaaaaatgttcttgatgttgatccattcaagactattgaccaggacggagtaggcggtttgatggaattagcgattaaagaaggtcgatctgtaaaaccggatctcaaacttgggatctgcggagaacacggcggagacccagcaactatagatttttgctatagggtggggttgagctacgtatcatgttcaccattccgggttccgttagctcggcttgcaggtgcgcaagctgtaattaacaactccggaaagaatataacgggaggggggtcagaaaagactaaaccaaccactgccaaggtgaaaggcagtaaaaaacctgcaaaagcaagggggaaaaagaaaatggcagtaacatctgcgaagaagaaaccctgcggcgaaaaagaaaaccgcaaagaagaccggcgcgaaaaaagccggtgcgaagaagactgcgaaaaagaaacccgcagccaagaaaaccggcgccaaaaaaaccggcgccaaaaagactgcgaagaaaaaacccgcagccaaaaagaaaaccgcggcgaagaaaaaacccgcagccaaaaaatcagtagttctttaatactttag

SEQ ID NO: 63100 - protein, 316 aa, Unknown
  Obtained from environmental sample
  DOMAIN (1)...(202): PEP-utilising enzyme, TIM barrel domain
  misc_feature (1)..(316): Xaa is any amino acid
MAVTYPEIYDMQVEAIALAAVECVKEKIPVHPEIMIPIVVTARELRLLRPNVEKIFEKVLSAAGVKVPVTVGTMIEVPRAAIRSAHIAHYADFFSFGTNDLTQMTFAFSRDDVASFLPFYLEKNVLDVDPFKTIDQDGVGGLMELAIKEGRSVKPDLKLGICGEHGGDPATIDFCYRVGLSYVSCSPFRVPLARLAGAQAVINNSGKNITGGGSEKTKPTTAKVKGSKKPAKARGKKKMAVTSAKKKPCGEKENRKEDRREKSRCEEDCEKETRSQENRRQKNRRQKDCEEKTRSQKENRGEEKTRSQKISSSLIL

SEQ ID NO: 63101 - DNA, 1023 bp, Unknown
  Obtained from environmental sample
  misc_feature (1)..(1023): n is a, c, g, or t
atgagtaaaataattacattcggcgaaataatgctccgtcttgcgcccgagggctattaccgttttgttcaggcaaacaccttcggcgcgacttacggcggcggcgaggcaaatgccgctatttcgctcgccggtttcggcatggacgccgcctttgttacaaaacttccaaagcacgagatcgggcaggccgcgatcaacagcctgcggcagttcggcgtagacacctcgaaaatcgcaaggggcggcggccgcgtggggatttatttcctggaaaaaggcgcgtcccagcggccatcaaaagtaatttacgaccgcgccaattcggcgatagccgctgcgacaacagccgattttgactggcccgcgatttttaacggggtttcctggttccactttacaggcatcaccccggctatttcagataacgctgcggctattacgcttgacgcgctgaaaaccgcgaaggcaaagggcattaccgtttcctgcgatctcaattaccggaaaaacctctggtcaaaggaaaaagccggcgaggtaatggggaggctcatgccctttgtcgatgtctgtatcgccaacgaggaagacgccgccgatgttttcggcatacacgcgaagaacagcgacgtgagctccggcagtattaaccttgatgggtacaaggaagttgcaaagaccctgacagaccgcttcaattttaaaaaagtggcgattacattaagggaatcgatcagcgcgaacgacaacaactgggccgcgatgtactactgcaacggggatttttatttttccaaaaaatacgctgtgcatatagtggaccgcgtgggcggcggagacagtttcggcgcgggccttatctacgcgaacctcaaaggttttgcaccccgggaaagcgtcgaattcgccgtcgccgcaagctgcctgaaacactcaatcgaaggcgactttaaccatgtatctgttgaagaagtgcagaaactggcaggcggcgacgcgtcaggaagagtgcaaagataa

SEQ ID NO: 63102 - protein, 340 aa, Unknown
  Obtained from environmental sample
  DOMAIN (1)...(326): pfkB family carbohydrate kinase
  misc_feature (1)..(340): Xaa is any amino acid
MSKIITFGEIMLRLAPEGYYRFVQANTFGATYGGGEANAAISLAGFGMDAAFVTKLPKHEIGQAAINSLRQFGVDTSKIARGGGRVGIYFLEKGASQRPSKVIYDRANSAIAAATTADFDWPAIFNGVSWFHFTGITPAISDNAAAITLDALKTAKAKGITVSCDLNYRKNLWSKEKAGEVMGRLMPFVDVCIANEEDAADVFGIHAKNSDVSSGSINLDGYKEVAKTLTDRFNFKKVAITLRESISANDNNWAAMYYCNGDFYFSKKYAVHIVDRVGGGDSFGAGLIYANLKGFAPRESVEFAVAASCLKHSIEGDFNHVSVEEVQKLAGGDASGRVQR

SEQ ID NO: 63103 - DNA, 594 bp, Unknown
  Obtained from environmental sample
  misc_feature (1)..(594): n is a, c, g, or t
gtgtttatcaacctgaaagcccttacaggcggacccaacgggaggacatttcccacaccagttgtgctgaacggagaattggcgtttatactcgcgacaacgacgttggttattgtcctcgtgttgctgcagaattttctccgttccagctatggccgggcgatcaaggcatgcagggaagatgaaattgcggctaacgcaaacggaattaatgttttccgctacaagatgttcggttttgtcattgccgcttttatcgcgggtcttggcggctgtatctacgcgttggttgttggttttgtcaaaccgggtatagcgtctttcctcaattccgtcgactaccttatttttgtcgttctgggcggcatgggttccatgaccggctcgattctttcagcttatgtccttacctatttgcaggaatttttgcgtttcctgcaggactaccgcctcttgatatatccggtgatactgatactcgtcatgctgttccgtccccagggccttttgggaatgaaagaattttccataatcggctttgttgataaaatttgcggcatattcctcaggcgaacaaagaaggaggagacatga

SEQ ID NO: 63104 - protein, 197 aa, Unknown
  Obtained from environmental sample
  DOMAIN (1)...(162): Branched-chain amino acid transport system / permease component
  misc_feature (1)..(197): Xaa is any amino acid
MFINLKALTGGPNGRTFPTPVVLNGELAFILATTTLVIVLVLLQNFLRSSYGRAIKACREDEIAANANGINVFRYKMFGFVIAAFIAGLGGCIYALVVGFVKPGIASFLNSVDYLIFVVLGGMGSMTGSILSAYVLTYLQEFLRFLQDYRLLIYPVILILVMLFRPQGLLGMKEFSIIGFVDKICGIFLRRTKKEET

SEQ ID NO: 63105 - DNA, 576 bp, Unknown
  Obtained from environmental sample
  misc_feature (1)..(576): n is a, c, g, or t
gtgaaaaacatgaaccccgcaaaattgaaccgtatcggccttgcccggacttttcagaatatacgcctgttttcaaatctttccgtcgaagacaatatccgcattgccttacattccggcagaaccagcggccctatagacgcactgttccgcctgaagcgtttccgtattgacgaggaacggatgagagcccaggcgcgggagcttctttcccttttcaagatcgaaaaaaagaaggacgaactggcgcgcaatcttccatacggcgaacagcgcaagctggagattgcccgcgccctggcttcaaatcccagcctcctcttgctggatgaaccggccgccgggatgaacccccaggaaaccgaagatttgatgaagataatcaggtttatcagaaatgaatttcacctgacgattcttttaatcgaacacgatatgcggctggtaatgggaatatgcgaacgtcttattgtgctggattacgggcggacaatcgccgccggttccccggaagaaatcaggcgaaatcccgcggtgatcaaggcttatcttggaacggaggccgctaatggctga

SEQ ID NO: 63106 - protein, 191 aa, Unknown
  Obtained from environmental sample
  DOMAIN (1)...(162): ABC transporter
  misc_feature (1)..(191): Xaa is any amino acid
MKNMNPAKLNRIGLARTFQNIRLFSNLSVEDNIRIALHSGRTSGPIDALFRLKRFRIDEERMRAQARELLSLFKIEKKKDELARNLPYGEQRKLEIARALASNPSLLLLDEPAAGMNPQETEDLMKIIRFIRNEFHLTILLIEHDMRLVMGICERLIVLDYGRTIAAGSPEEIRRNPAVIKAYLGTEAANG

SEQ ID NO: 63107 - DNA, 750 bp, Unknown
  Obtained from environmental sample
  misc_feature (1)..(750): n is a, c, g, or t
ttggaacggaggccgctaatggctgagcctctgttaaaagttgaaaatcttattgtcaattatggggcaatacgcgctttgagggggatctcctttgaagtgagcgaaggtgaaataatcaccctgattggggcaaacggcgcgggaaaaagcacaacgcttcacgcgatttccaacattataaagaaaacttccggtacggtgatatttgacaagcgtgatataagctccgctccgcctgacagcatcgtcgcgtccggcctggtgcaggttccggaaggtcggcgcattttcgcgaacttgagcgttcgtgacaatctggaaatgggcgcgtattcgcggcgctctgttaccccggcggaaaaacaggctatacgaaaagacatggaaagagtgtttggaatttttcccaggcttaaagagcgcatacgtcaggtggggggaacgctttcgggcggcgaacagcagatgctggcgatgggccgctcgctgatggccagtccccgtctcctgctccttgacgagccgtcaatgggccttgcccccatccttgttgacgaaattttctcggtcatcaagggaattaacgaaacaggaacaacggtactgctggttgagcaaaacgcttacaaagcccttgatcttgcgtcgcgggcgtatatccttgaaacaggggagattgtcaaaaacggcatgactgccgatttaatgaaagatgaagcggtaaaggctgcttatttaggaggatga

SEQ ID NO: 63108 - protein, 249 aa, Unknown
  Obtained from environmental sample
  DOMAIN (37)...(225): ABC transporter
  misc_feature (1)..(249): Xaa is any amino acid
MERRPLMAEPLLKVENLIVNYGAIRALRGISFEVSEGEIITLIGANGAGKSTTLHAISNIIKKTSGTVIFDKRDISSAPPDSIVASGLVQVPEGRRIFANLSVRDNLEMGAYSRRSVTPAEKQAIRKDMERVFGIFPRLKERIRQVGGTLSGGEQQMLAMGRSLMASPRLLLLDEPSMGLAPILVDEIFSVIKGINETGTTVLLVEQNAYKALDLASRAYILETGEIVKNGMTADLMKDEAVKAAYLGG

SEQ ID NO: 63109 - DNA, 405 bp, Unknown
  Obtained from environmental sample
  misc_feature (1)..(405): n is a, c, g, or t
gtgatggaaagaaatgtgatcatcgttcaggaaaacgaagttgtggaagaggcggcgagaatcatggcggatcaggggattggctgtctgcctgtactgaacggctcgcttttaaccggaattattaccgacaccgatattttccatttctttattaacgcttacggagcgcgccacaagggcatacggataacgattaatttcaaggaaaaacgcggccaatttgcggcatttgccggtgcggtatcggaaaagggaggcaatatcgttgccgttgttacctccgaaggcgatgatgtcgcccaccgtcgcgcaacaatcaagattaccgacatcagccgtgccgtcgtagaggaaattgccgctactttggatggcgctgaaattgaggacattcgggaataa

SEQ ID NO: 63110 - protein, 134 aa, Unknown
  Obtained from environmental sample
  misc_feature (1)..(134): Xaa is any amino acid
MMERNVIIVQENEVVEEAARIMADQGIGCLPVLNGSLLTGIITDTDIFHFFINAYGARHKGIRITINFKEKRGQFAAFAGAVSEKGGNIVAVVTSEGDDVAHRRATIKITDISRAVVEEIAATLDGAEIEDIRE

SEQ ID NO: 63111 - DNA, 3759 bp, Unknown
  Obtained from environmental sample
  misc_feature (1)..(3759): n is a, c, g, or t
atgaaaacgttaggaatctgtttcggcgccaccacggtgcagtacgtaaagttgaacgcctctaaagccgccgacgacggcaagattgaggcgaccgggcgcgtagcccacgagggcgatcccaaaggcatcgcgcttaagttgttgtcagacccggagttagcgagcgttgaccgcatcgcagttaccggacgggcctttcgcgccagcgtcgacctctccaccatctccgagccggaggccgtggagtgcgccctgcgccggacctacccgggcggcggctacccgcacctcgtgataagctccggcggcgagacgcagctcgtatacgtcataaaccccaagggcggggtgagctccgtccactccggcaacaagtgcgcctccgggacgggcgagttcttcctgcaacagatacgccgtatggacctaacgctcgaagaggcggtcgagctagccaagcgcggcacgccccacaagatcgccggacggtgcagcgtcttctgcaagagcgactgcacccacgccctgaacaagggcgagcccagagccaacatcgcggcggggctctgcctgatgatggcggacaagatatgcgatctcgttaaggacatgaggggcggcaaatcaacgctgatcggcggcgggtcgctcaatacggccatggtcaacatcctaaaggagcgcctcggagatctcgacgtcccagacaccgccgcggtctttgaggcctacggggcggcgctttgggccgccgacaacgaatgcgtcgcgcttccgaaggatctctccgaggctatccacgacgcgccgacctcattcgggcgccacgccccgctcgcggaggcgctgccgctcgtctcgttcaaggagatgaagaaagacaccgtcaagagcggcgacgagtgcgtgctggggctcgacgtcgggtcgaccaccaccaaggcggtgctgatgaggcgcagcgacaaagccgtcgtcgcctccgtctacctgaggaccaacggcgatcccatcggcgcctcgcgcaactgctacaaggccgtccgcgaacaggtcggggatacgaagttcgacattacagggctcggggtgacgggatcgggccgccagatcgcggcgctccacgcgctcaccgacaacgtcataaacgagatcatagcccacgccaccgcggcggcctacttcgacaaagatgtcgataccatcttcgagatcggcgggcaggacgcgaaatatacctatttgacgggcggggtgccgtcggactacgcgatgaacgaggcttgcagcgcgggaaccggttcgttcttggaggaatccgcgcgcgaatcgctgaacgtcttgacggaaaaaatcggcgagcgggcgctcttgggcaagcagccgcccaacttcaccgaccagtgctcggcgttcatatcgagcgacatcaagaccgccggacaggagggtatcggcaaagacgatattttggccggcctcgtctactctgtctgcatgaactacctcaaccgcgttaaaggctcgcggcaggttggccgtaagatattcatgcagggcggcgtgtgctacaataaagcggtgccggtggctatggcgtcgctcatgaaacaccagatcgtcgtcccgcccgaacccggcctgatgggggctttcggcgtcgccatggagacggcgaataggatggccatcgggctaagcgccgcctccaaatttgatctcgacgagctggcaaaccgcgaagccacacgggagagcagctttgtctgcgccggcggcaaagagaagtgcgaccgcaaatgcgaaatatcgcgcatacgcgttaatgacaaactctacccattcggcggcgtctgcaacaaatactacaacctgcgcttgcataaagaggtggatgtcgaagacctcgacctcgtagccgtccgcaacaagctgttattcgagcagttcggcgttatggaagggttggcgcataaaggccacgccaaaacagccgaggggcataaccgcgggacgtccccgaagaccgtggggataatgcgcacgttcctgacgcacgcactctacccgctctactcgaacttcttccgcgagatgggcttaaaagtcgtgctggccgacgcgatcgatccggagggcatcgcccgcatcgaggcggctttctgcctgccggcggaactgacgcacggcagcttcctcaacttgctcaaaaagaagccggactacatcttcctgccgcacgtctcccagatacccgttaagaacccgtcctcctacagcaaaacctgcgtcttcgtccaaggcgaggcctattacctgaaaacgacgttcaggcacgagatagaggaggcgcggacggcagtcctctcgccggtgctctcctttgaacgggactatgaccgcgcccgcgcccgccacgagcttatcaacatggcggtatcggctatgcacatatcacaaaagaccgccgaggcggcgttccatcgggcggtggagcggcagcgcgctttcgacgatgaattgcagacctacggcagacgggcgcttgaatatttggaagccaaccccgacaccttcgggctcgtaatcttcggacgcccgtacaacagtttcgccgccgacgccaacatgggcatcccccacaaggcggcctcgcgcggctacatcgtaatacccttcgacatgctccccgccggcgactacatggccgacagcaagatgtactggggcatggggcagaaaatcttgaaagcggcgcagttcgtcaaaaaacgcgacaacctcttcggcgtcttcatcacgaatttctcgtgcggccccgactcgttcgttctcagctacttccgcaacctgatgaagtcaaaaccgtcgctgacgcttgaactcgaccagcacaccgccgacgccggcatcgatacccgcatcgaggcggcagtcgacattatgcagagctaccgccgcatcagcaaagagctgccgccggaggacacgtcgttcgtccccgccgtagtgccggacaacgagatgagggtgagagccgccgacggcacgtactacaacctgcgcgaccccaaagtagagcttatgctgccgtctatggggcgctacggcaccgaggcgctcgccgcgatattcagaagcctcggcgtggacgcccacgccctgcccatcgccgacaaagaagtcctgagcataggcaagaaaaactcaacgtgcaaagagtgcgtaccctacatcgtcaccaccggatcgttcttgcagtacgtgtgggagaagaagaaggacccgaacaaaatcacgctcttcttcatggctacaagcgacggcccctgccgcctcggccagtactgccgggcgatagcgcagaacatagagaacctgaaaatccccaacgcggccgtcctcacgctgaccgacgaaaacggctacggcggcatgggcgcgacaagcctcctgaaaggctggcaaagcatcataatctccgacgtcttcggcgacatacggagcatgcttgccgtggccgccaaagacaaagaacaagcgctggcgacgctcgaggagtgctggggcgagttcatccgcttcttcgagggcaaggtccgcggcggcattatgaagacgattgacaaggtggtaaaacgcctgtcaaagatactgctcaaaatgaagcccgaagacgtgcctatcgtctccgtcatcggagaaatcttcgtaaggcgcgacgagttctgccgcaaaaacatcaccgactactag

SEQ ID NO: 63112 - protein, 1252 aa, Unknown
  Obtained from environmental sample
  DOMAIN (4)...(251): BadF/BadG/BcrA/BcrD ATPase family
  misc_feature (1)..(1252): Xaa is any amino acid
MKTLGICFGATTVQYVKLNASKAADDGKIEATGRVAHEGDPKGIALKLLSDPELASVDRIAVTGRAFRASVDLSTISEPEAVECALRRTYPGGGYPHLVISSGGETQLVYVINPKGGVSSVHSGNKCASGTGEFFLQQIRRMDLTLEEAVELAKRGTPHKIAGRCSVFCKSDCTHALNKGEPRANIAAGLCLMMADKICDLVKDMRGGKSTLIGGGSLNTAMVNILKERLGDLDVPDTAAVFEAYGAALWAADNECVALPKDLSEAIHDAPTSFGRHAPLAEALPLVSFKEMKKDTVKSGDECVLGLDVGSTTTKAVLMRRSDKAVVASVYLRTNGDPIGASRNCYKAVREQVGDTKFDITGLGVTGSGRQIAALHALTDNVINEIIAHATAAAYFDKDVDTIFEIGGQDAKYTYLTGGVPSDYAMNEACSAGTGSFLEESARESLNVLTEKIGERALLGKQPPNFTDQCSAFISSDIKTAGQEGIGKDDILAGLVYSVCMNYLNRVKGSRQVGRKIFMQGGVCYNKAVPVAMASLMKHQIVVPPEPGLMGAFGVAMETANRMAIGLSAASKFDLDELANREATRESSFVCAGGKEKCDRKCEISRIRVNDKLYPFGGVCNKYYNLRLHKEVDVEDLDLVAVRNKLLFEQFGVMEGLAHKGHAKTAEGHNRGTSPKTVGIMRTFLTHALYPLYSNFFREMGLKVVLADAIDPEGIARIEAAFCLPAELTHGSFLNLLKKKPDYIFLPHVSQIPVKNPSSYSKTCVFVQGEAYYLKTTFRHEIEEARTAVLSPVLSFERDYDRARARHELINMAVSAMHISQKTAEAAFHRAVERQRAFDDELQTYGRRALEYLEANPDTFGLVIFGRPYNSFAADANMGIPHKAASRGYIVIPFDMLPAGDYMADSKMYWGMGQKILKAAQFVKKRDNLFGVFITNFSCGPDSFVLSYFRNLMKSKPSLTLELDQHTADAGIDTRIEAAVDIMQSYRRISKELPPEDTSFVPAVVPDNEMRVRAADGTYYNLRDPKVELMLPSMGRYGTEALAAIFRSLGVDAHALPIADKEVLSIGKKNSTCKECVPYIVTTGSFLQYVWEKKKDPNKITLFFMATSDGPCRLGQYCRAIAQNIENLKIPNAAVLTLTDENGYGGMGATSLLKGWQSIIISDVFGDIRSMLAVAAKDKEQALATLEECWGEFIRFFEGKVRGGIMKTIDKVVKRLSKILLKMKPEDVPIVSVIGEIFVRRDEFCRKNITDY

SEQ ID NO: 63113 - DNA, 777 bp, Unknown
  Obtained from environmental sample
  misc_feature (1)..(777): n is a, c, g, or t
ttgggccgccgacaacgaatgcgtcgcgcttccgaaggatctctccgaggctatccacgacgcgccgacctcattcgggcgccacgccccgctcgcggaggcgctgccgctcgtctcgttcaaggagatgaagaaagacaccgtcaagagcggcgacgagtgcgtgctggggctcgacgtcgggtcgaccaccaccaaggcggtgctgatgaggcgcagcgacaaagccgtcgtcgcctccgtctacctgaggaccaacggcgatcccatcggcgcctcgcgcaactgctacaaggccgtccgcgaacaggtcggggatacgaagttcgacattacagggctcggggtgacgggatcgggccgccagatcgcggcgctccacgcgctcaccgacaacgtcataaacgagatcatagcccacgccaccgcggcggcctacttcgacaaagatgtcgataccatcttcgagatcggcgggcaggacgcgaaatatacctatttgacgggcggggtgccgtcggactacgcgatgaacgaggcttgcagcgcgggaaccggttcgttcttggaggaatccgcgcgcgaatcgctgaacgtcttgacggaaaaaatcggcgagcgggcgctcttgggcaagcagccgcccaacttcaccgaccagtgctcggcgttcatatcgagcgacatcaagaccgccggacaggagggtatcggcaaagacgatattttggccggcctcgtctactctgtctgcatgaactacctcaaccgcgttaa

SEQ ID NO: 63114 - protein, 258 aa, Unknown
  Obtained from environmental sample
  misc_feature (1)..(258): Xaa is any amino acid
MGRRQRMRRASEGSLRGYPRRADLIRAPRPARGGAAARLVQGDEERHRQERRRVRAGARRRVDHHQGGADEAQRQSRRRLRLPEDQRRSHRRLAQLLQGRPRTGRGYEVRHYRARGDGIGPPDRGAPRAHRQRHKRDHSPRHRGGLLRQRCRYHLRDRRAGREIYLFDGRGAVGLRDERGLQRGNRFVLGGIRARIAERLDGKNRRAGALGQAAAQLHRPVLGVHIERHQDRRTGGYRQRRYFGRPRLLCLHELPQPR

SEQ ID NO: 63115 - DNA, 1416 bp, Unknown
  Obtained from environmental sample
  misc_feature (1)..(1416): n is a, c, g, or t
atggggctggataaaaacataaaaaaaacaatggtcataggctccggcccgattgttatcgggcaggcggcggagtttgactacgcgggaacgcaggcctgccgtatgctgcgcgaggacgggattgagattgtccttgtcaattccaatccggcgaccattatgaccgacagcaacatcgccgataaaatatacattgagccgctgactcttcccaccgttaagcgcattatcgaaaaggaaaggcccgacagcatactatccggactcggggggcaaacgggacttacgttgtgcatgcagcttgcccgcgacggcttccttgaaaaaatgaacgtacgccttttgggttcctcgcctgaaaccatcgacaaggccgaagaccggaaaatatttaaagaaaccatgcagggcataggccagcccgtggttccttcggtaatcgcaaccgatacggaaaccgcggttaaattcgccgatgaacttggttattcggtcattgtgcgcccggcattcacgctgggcggcacgggcggcggaattgccgccaacgaggagcagcttactgaaattgcgtctaacggtctgtctctctcgccaatacatcagattttggttgaaaaatcaatcgccggctggaaggagattgaatatgaggttatgcgcgaccgcgccgggaatgttatcacggtctgctcaatggaaaatttcgatcctgtgggcatacacacgggcgacagcatcgtcatcgcgcccgccgtcaccctggctgacaaggaataccagatgctccgttcggcagccctgaacataattcaggccctgggcgtggaaggcggctgtaacgtccagttcgccctgcatccacggagttttgaatacgcggtcattgaggtaaacccccgcgtttcgcgttcctcagcgctcgccagcaaggctacaggctaccccatcgctaaagtcgcgacaaaaatcgccgtcggctataccctggacgaaattataaacgccgttacgggaaatactttcgcggcgtttgagcctacgattgactatgttgctgtgaaattcccaaaatggccttttgacaaattcgtatacgccaataaggagctgggcacgcagatgaaagcgactggcgaggttatggcgcttgcggacacctttgaggaagcgctcttaaaagccgtacgcggcgcggaaatcggccttaacagccttgacctgcccaggctttcggcaaaatcagatgaagagatacgagcgcttcttcataccgtaaccgacgagcgcctgtttgtgctgtacgaggccattaaacgcggcgtcagcgtggatgagctttaccggacgaccagggtagaccgctggtttttgcacgggcttgtcaatatcgcctccgggcggtatttataa

SEQ ID NO: 63116 - protein, 471 aa, Unknown
  Obtained from environmental sample
  DOMAIN (420)...(470): Carbamoyl-phosphate synthetase large chain, oligomerisation domain
  misc_feature (1)..(471): Xaa is any amino acid
MGLDKNIKKTMVIGSGPIVIGQAAEFDYAGTQACRMLREDGIEIVLVNSNPATIMTDSNIADKIYIEPLTLPTVKRIIEKERPDSILSGLGGQTGLTLCMQLARDGFLEKMNVRLLGSSPETIDKAEDRKIFKETMQGIGQPVVPSVIATDTETAVKFADELGYSVIVRPAFTLGGTGGGIAANEEQLTEIASNGLSLSPIHQILVEKSIAGWKEIEYEVMRDRAGNVITVCSMENFDPVGIHTGDSIVIAPAVTLADKEYQMLRSAALNIIQALGVEGGCNVQFALHPRSFEYAVIEVNPRVSRSSALASKATGYPIAKVATKIAVGYTLDEIINAVTGNTFAAFEPTIDYVAVKFPKWPFDKFVYANKELGTQMKATGEVMALADTFEEALLKAVRGAEIGLNSLDLPRLSAKSDEEIRALLHTVTDERLFVLYEAIKRGVSVDELYRTTRVDRWFLHGLVNIASGRYL

SEQ ID NO: 63117 - DNA, 336 bp, Unknown
  Obtained from environmental sample
  misc_feature (1)..(336): n is a, c, g, or t
atgccctgcatggtttctttaaatattttccggtcttcggccttgtcgatggtttcaggcgaggaacccaaaaggcgtacgttcattttttcaaggaagccgtcgcgggcaagctgcatgcacaacgtaagtcccgtttgccccccgagtccggatagtatgctgtcgggcctttccttttcgataatgcgcttaacggtgggaagagtcagcggctcaatgtatattttatcggcgatgttgctgtcggtcataatggtcgccggattggaattgacaaggacaatctcaatcccgtcctcgcgcagcatacggcaggcctgcgttcccgcgtag

SEQ ID NO: 63118 - protein, 111 aa, Unknown
  Obtained from environmental sample
  misc_feature (1)..(111): Xaa is any amino acid
MPCMVSLNIFRSSALSMVSGEEPKRRTFIFSRKPSRASCMHNVSPVCPPSPDSMLSGLSFSIMRLTVGRVSGSMYILSAMLLSVIMVAGLELTRTISIPSSRSIRQACVPA

SEQ ID NO: 63119 - DNA, 831 bp, Unknown
  Obtained from environmental sample
  misc_feature (1)..(831): n is a, c, g, or t
gtggatacggagacgataaaccgtctggaggaactggggcgcacttatcagtacaccccaaaaatttccgatttcaaaaaactgttatcagaaaccggctttccgaaatttacgcaaacagttctttcaacaattacttcggcttataaatatcccgtggatatagaatttaccgtcaatttcgacccaaacggcgagttcaggtttaatcttctgcaatgccgccccctgcaaaccaaagggctcgggcgggcgatcaagattccggatcttaaacaggaacagatatttttctcgtcaataggcaactttatgggcggcaatgtccgattgggtttcgattacgcggtgtgtatcaagacaatggaatacctcgcgcttcccgatcaggaaaaatacagtgtcgcgcgtacgataggagtgataaaccagaaatataaagataagaccatgctgctgctcggcccgggcagatgggggacgaccacgccttccctgggagttccggttcatttcagcgagctgtgcaatatggccgccatttgcgaggtgtcatatccaaaagcgggcgttgtgccggatctgtctttcgggagccattttttccaggacatcgtggaatcggatgttttttacgcggcgatttttaacggggaacctgacgttgtattctgtcccgaacaaattttagaacgggaaaacctgtacggaaaattattgccgggagaaaaaaatatggattcaattatacatattgcccaaacgccgggcctgattttacattccgatattacgaaccaaaaattgttgatctattgggaaaagacataa

SEQ ID NO: 63120 - protein, 276 aa, Unknown
  Obtained from environmental sample
  misc_feature (1)..(276): Xaa is any amino acid
MDTETINRLEELGRTYQYTPKISDFKKLLSETGFPKFTQTVLSTITSAYKYPVDIEFTVNFDPNGEFRFNLLQCRPLQTKGLGRAIKIPDLKQEQIFFSSIGNFMGGNVRLGFDYAVCIKTMEYLALPDQEKYSVARTIGVINQKYKDKTMLLLGPGRWGTTTPSLGVPVHFSELCNMAAICEVSYPKAGVVPDLSFGSHFFQDIVESDVFYAAIFNGEPDVVFCPEQILERENLYGKLLPGEKNMDSIIHIAQTPGLILHSDITNQKLLIYWEKT

SEQ ID NO: 63121 - DNA, 780 bp, Unknown
  Obtained from environmental sample
  misc_feature (1)..(780): n is a, c, g, or t
ttggaattgggcgcaagggattttatcatgaagccggcggaaaaaagcatattgctgcacagaattgaactgcatctccgttttgcttcctatcaggttcagaccgaagaaaaagtcacagccctttcagacaacattgcaatttcatttgcggagatgatcgaatgtcgtgatgaaaacacgggcggccatgtgattcgcacgtcaaaatatgttgatatactgggcaaagagatgattaacaagggcatttttccggatgagctcaatgattctgaattacagatgatggtgcgcgccgctccgctgcacgatataggaaaaatcgccatcagtgaccgggtgctgttgaaagccggacggcttgatgatatagaattttccattattaaacgtcatgcggaaataggcgctcaaattgtagaacggatgtaccagcggatgcccgcccagcggtatctttattatggcagccttattgccggatcccaccatgaacggtatgacggcaagggttacccaaaaggcctggaaaaaaataatattccgctctgcgcgagaattatggcggtggcggatgtttatgacgcgcttatggaaacacgggtttaccgcaaggggctgggccatatccaggcaagcaatatcatttttgaaaacgaatggacgcagtttgatcccaaggttgttgaagcgttcagaaatgtcgaggagcagataaatgaagtggcaaacacatggaatgaagctgcaatgaacagcggcggtatatatgcttaa

SEQ ID NO: 63122 - protein, 259 aa, Unknown
  Obtained from environmental sample
  DOMAIN (61)...(198): HD domain
  misc_feature (1)..(259): Xaa is any amino acid
MELGARDFIMKPAEKSILLHRIELHLRFASYQVQTEEKVTALSDNIAISFAEMIECRDENTGGHVIRTSKYVDILGKEMINKGIFPDELNDSELQMMVRAAPLHDIGKIAISDRVLLKAGRLDDIEFSIIKRHAEIGAQIVERMYQRMPAQRYLYYGSLIAGSHHERYDGKGYPKGLEKNNIPLCARIMAVADVYDALMETRVYRKGLGHIQASNIIFENEWTQFDPKVVEAFRNVEEQINEVANTWNEAAMNSGGIYA

SEQ ID NO: 63123 - DNA, 396 bp, Unknown
  Obtained from environmental sample
  misc_feature (1)..(396): n is a, c, g, or t
ttgctgaataacatgcacgaatcaattttggaatttcaaaagccaaatgttcataacttcaataaatacgcccacttaacagaggaaataaaggagaaatccaagatagacaaggacttttggctgtctcttaaaaacagcgacgtatggcttatgaaaccagaaaaaagcggggatggcagggaacacgtagctcctttcccttacgaactcccctatcgtttaattaaagcatacacctatataggtgaaactattttagaccccttctgcggtagcggtacttctctgctcgccgccaaaaacctcggcaggaacgcagtgggctacgagataaacgccaactttgcaaagagcattaagaataaactgtgctctatttctgctgaacgttaa

SEQ ID NO: 63124 - protein, 131 aa, Unknown
  Obtained from environmental sample
  DOMAIN (1)...(122): DNA methylase
  misc_feature (1)..(131): Xaa is any amino acid
MLNNMHESILEFQKPNVHNFNKYAHLTEEIKEKSKIDKDFWLSLKNSDVWLMKPEKSGDGREHVAPFPYELPYRLIKAYTYIGETILDPFCGSGTSLLAAKNLGRNAVGYEINANFAKSIKNKLCSISAER

SEQ ID NO: 63125 - DNA, 1779 bp, Unknown
  Obtained from environmental sample
  misc_feature (1)..(1779): n is a, c, g, or t
atgaaacggacacataactgcggagagttgcgcaaaggcgatgttggaaaaatagttagcctttgcggttgggtggataggcggcgcgatttgggcggcgttatattcgttgatttgcgcgataaatacggtaaaacgcaggtggtttttgaccccgcccgcaatgtggatgtgcataaaatcgcagactctttgagaaacgaatttgtaattcaggtgacaggcgaggtgcaaagccgtcccgaaggtatgcaaaacgaaaagctctccaccggagacatagatgttaaaatagacgaactcgtaattttaaataaatcggaaaatccgccgctcgctatcaacgacccaaaagaggaatgtaaggaaaacgatgatttacgcttgcgctatcgctatctggatttgcgccgcccgtggattcagaaaaaccttatgctaaaaagcaagctgctcggcgaaactcacgcctttttccgcagaaatggctttgaggaaattgaaacccccgttctctgcaaaagcaccccagaaggcgcaagggattacattgtgccgagccgcgttaatccgggtaagttttatgccttgccgcaaagcccgcagcaatacaagcagcttttgatgatagctggcatggataggtattatcaaattgcaaagtgctttagagacgaagatttacgcgcagaccgccaacctgaatttacgcagatagatttggaaatgtcttttgttgagcaaaacgatgtgatggctatgctggataattatgtgaaagaagttctcgcaaaaatctgggaatttgaagtcccagaaattccacgcattaaatactcggaagcgatgctccgctacggctccgataaaccagatttgcgttttgacttgcctatttccgatgtgtctaatattgcagccaatgtggattttgcggtttttaaaagcacggttgcaaacaaaggcgttgtacgtggcattgccgcaaaaggctgcgtggatttcacgcgcaagcaaatagacgatttaacctcgtatgtaggtcgctatggttccaagggcttggtgtggatgagggttaaagacggcgatgaggtggaaacacaggttgccaaattcttcaccacggagcagttgaatgcgctccgcgatgcggtgggcggcaaagccggcgatatgatgttctttatagcaggctctgagaaagtggcggctaacgcgatggggcagctccgcttggaaatagcccgcataaaaggcttgatgaacagcgatgttcgcaagttcgcttggataaccgggttcccgatgtttgaatacagcgaaacggaaaaacgctttatgtccatgcaccacccattcacaagccctatccccgaacatttggatatgatgctaggcggcaacttaagtgattgcgaagcccaagcctacgaccttgttttgaacggcgtggaaattggcggcggctcggttcgtatacataatcccgaagttcaggaaaaagtattccgtttgctgggtttaagcgaaacccaagtgaaggaaaaattcggcttttttgtggatgcctttaaattcggtgctcctccgcatggcggtctggccctcggcttagatagagtagtggcaactatggaaggtcaggactctatccgtgatttcatagcgttcccaaagaacacaagcgcaagctcgcctatggatcaatgcccaagcgaagtggataccatacaacttttggaaactcacatatcgcttaacgttcagcagaaatag

SEQ ID NO: 63126 - protein, 592 aa, Unknown
  Obtained from environmental sample
  DOMAIN (19)...(104): OB-fold nucleic acid binding domain
  misc_feature (1)..(592): Xaa is any amino acid
MKRTHNCGELRKGDVGKIVSLCGWVDRRRDLGGVIFVDLRDKYGKTQVVFDPARNVDVHKIADSLRNEFVIQVTGEVQSRPEGMQNEKLSTGDIDVKIDELVILNKSENPPLAINDPKEECKENDDLRLRYRYLDLRRPWIQKNLMLKSKLLGETHAFFRRNGFEEIETPVLCKSTPEGARDYIVPSRVNPGKFYALPQSPQQYKQLLMIAGMDRYYQIAKCFRDEDLRADRQPEFTQIDLEMSFVEQNDVMAMLDNYVKEVLAKIWEFEVPEIPRIKYSEAMLRYGSDKPDLRFDLPISDVSNIAANVDFAVFKSTVANKGVVRGIAAKGCVDFTRKQIDDLTSYVGRYGSKGLVWMRVKDGDEVETQVAKFFTTEQLNALRDAVGGKAGDMMFFIAGSEKVAANAMGQLRLEIARIKGLMNSDVRKFAWITGFPMFEYSETEKRFMSMHHPFTSPIPEHLDMMLGGNLSDCEAQAYDLVLNGVEIGGGSVRIHNPEVQEKVFRLLGLSETQVKEKFGFFVDAFKFGAPPHGGLALGLDRVVATMEGQDSIRDFIAFPKNTSASSPMDQCPSEVDTIQLLETHISLNVQQK

SEQ ID NO: 63127 - DNA, 624 bp, Unknown
  Obtained from environmental sample
  misc_feature (1)..(624): n is a, c, g, or t
atgaaacggctggcaacggcgcgcttcctcgccattattatcggggggatgacctcgcttatgattccttcccttgtggcggctttggtcctcaaagaatacattattgtcagggcatttcttatcccgctttcaatcggattgattctggctttgtctgccgtgttttttatccgcaaagctccgttagggcttaggccgcgggacggatttctcctggtgtttctggtttggattttttcaagccttatcggcagcctgccttattatttttctaaattaaatatgtctgtttgcgattcgatttttgaaagcacctgtggctttgctactaccggagcgacaacattatctgacattgaggtcatgcctccgcccctgcttctctggcggagcatgagccactggtcggggggcatggggataatccttctaacagttgctttgttgccgctattgggggtcggcggctttcagctcgtaaaggccgaagctccggggccggagaaggacaagcttaccccgcgcattaacaacgccgcgaaagttctttggcttttttactgcgtttttaccgcaattctcgccgtgctttacaaattggggaggaatggagtggtttga

SEQ ID NO: 63128 - protein, 207 aa, Unknown
  Obtained from environmental sample
  SIGNAL (1)...(27)
  misc_feature (1)..(207): Xaa is any amino acid
MKRLATARFLAIIIGGMTSLMIPSLVAALVLKEYIIVRAFLIPLSIGLILALSAVFFIRKAPLGLRPRDGFLLVFLVWIFSSLIGSLPYYFSKLNMSVCDSIFESTCGFATTGATTLSDIEVMPPPLLLWRSMSHWSGGMGIILLTVALLPLLGVGGFQLVKAEAPGPEKDKLTPRINNAAKVLWLFYCVFTAILAVLYKLGRNGVV

SEQ ID NO: 63129 - DNA, 813 bp, Unknown
  Obtained from environmental sample
  misc_feature (1)..(813): n is a, c, g, or t
atggagtggtttgacgcagtttgtcacagctttgcaataatggctacaggcggagttagtacaaaaaacgcgggtttcgctttttacaattctgcatttatcgactgggttactgtgatctttatgatcctggcggctttgaatttcaatttatactaccgtattgtgcataaaaagttttctgattttgcgcataacaccgaaaccaaagtgtttttcctcatctttattgttgccgctctggcagtaagccttagccttgttccccaatacggctcttttgccgatgctctgcgcttcggtttttttcagaccgctgcctttttgactaccaccggaaacgccagggcagactatacggtttggcccagcctggcgcaggctgttcttttgtgccttatgttcatagggggttgctcaggttccaccgccggaggtataaaggttatacgacacacggtacttttcaaacaggcattgaacgagctcaggcgcattatttatccgcagggggtgtttagtatccagctcaaccaaaaagttggccgcaaggatgtggtttacggggtcgcgggttttgtttttctttactttttggttgtaggcatgacttcccttattaccgcggcggccggtttcgatatttcttcgtcatttagcgccgcgctttccatgactggcaacataggcattggttttggcgcagcaggtccgttcaaaaattatagcatgtttccagattatctaaagctgttttattcgctggtgatgatcgcgggtcgtctggaactctggactctcggccgattctga

SEQ ID NO: 63130 - protein, 270 aa, Unknown
  Obtained from environmental sample
  DOMAIN (1)...(265): Cation transport protein
  misc_feature (1)..(270): Xaa is any amino acid
MEWFDAVCHSFAIMATGGVSTKNAGFAFYNSAFIDWVTVIFMILAALNFNLYYRIVHKKFSDFAHNTETKVFFLIFIVAALAVSLSLVPQYGSFADALRFGFFQTAAFLTTTGNARADYTVWPSLAQAVLLCLMFIGGCSGSTAGGIKVIRHTVLFKQALNELRRIIYPQGVFSIQLNQKVGRKDVVYGVAGFVFLYFLVVGMTSLITAAAGFDISSSFSAALSMTGNIGIGFGAAGPFKNYSMFPDYLKLFYSLVMIAGRLELWTLGRF

SEQ ID NO: 63131 - DNA, 687 bp, Unknown
  Obtained from environmental sample
  misc_feature (1)..(687): n is a, c, g, or t
atggatcataaaggcctgggcgggctgccggttggaacagccgggcgcggcctcctgctcctctcagggggcatagattctccggttgcaggattcctcatggccacaaggggcatgggaatagacgcggtgcatttccacgcatacccctacacatcagaggaagcaaaacaaaaagtgatccgtctttccgaaatcctcggcgcttacactatgaagatacgcttatttcttgtcggctttaccaaagtgcagatgaggataaaggaagccgcgcctcttccctgggcaacggttctgctccgcatggcgatgatggactgcgccgaaaaaatagggcgcagaataaaaagcaaatgcctgattaccggggagagcctttcccaggtggcgagccagaccatagaaaaccttacctgcacccaaagccgcataacgctccccgtgctaaggcctctgatcggcgcggacaaagactccatcaccagaaaagcgaaacaaatcggcacctacgcgacatcgattgaaccttacgaggactgctgcgtcctgtttagccctgttcaccccgtcctgcgcggcgatccggcggaggcggccgcgctctatgaatcgcttgatctggaaccgctgatagaagaggccatacaagaaaaaagggagtggggagtggggagtanggagtag

SEQ ID NO: 63132 - protein, 228 aa, Unknown
  Obtained from environmental sample
  DOMAIN (16)...(169): ExsB
  misc_feature (1)..(228): Xaa is any amino acid
MDHKGLGGLPVGTAGRGLLLLSGGIDSPVAGFLMATRGMGIDAVHFHAYPYTSEEAKQKVIRLSEILGAYTMKIRLFLVGFTKVQMRIKEAAPLPWATVLLRMAMMDCAEKIGRRIKSKCLITGESLSQVASQTIENLTCTQSRITLPVLRPLIGADKDSITRKAKQIGTYATSIEPYEDCCVLFSPVHPVLRGDPAEAAALYESLDLEPLIEEAIQEKREWGVGSXE

SEQ ID NO: 63133 - DNA, 2364 bp, Unknown
  Obtained from environmental sample
  misc_feature (1)..(2364): n is a, c, g, or t
atgagaatttccagtcatgtacaggcaattattgacgcggcttacaatgaagcaaaaatgcgaagccacgaatatgtaacgccggaacatattttatacgcggctctggcttttgaggaagttcagggggttctgtattcctgcggggcggatcttgcgcagatcaaatccggcatggaaaatttctttgaacaaaaagtgccgtcttcggcggcggctgaacccgccaaaaccgtaggctttcacagcataatagagagggcgataattcaaagcaaatccgcccaaaaagacagaattgacgtggcggatatccttgtatcgctttatgacgaaaaacgctgttacagcgcctattaccttcgtaaggcaggagtaaagcggtttgagcttttacaggtactgtcccacagccacggaaacgagggcggaaaagacaacgatgcttccgatgatgatcaggcagacgggcaaaagtcaaagcaaagcaaaaagaccgcgcttgaacgttacgcgatagaccttactgaactggctcgtaacaataaactcgaacccgtcatcggcagggaagaagagctggatcggactattcaggtactttgcagaaggttgaaaaataaccccattcatgtaggggattccggcgtgggaaaaacggcaattaccgaaggcctcgcgcagagaatagtcgccggcgacgtgccgccgactctgaaaggtttcagtattttctcgcttgatatgggcgctcttttggcgggcacaaaataccgcggcgattttgaggaaagagtcaaacgcgtcgtggaagaaatgatgaaaaaagaaaaagccattctttttattgacgagattcacacccttgtaggagccggcgcggtttcaggcggggcgctggacgcttccaacatgctaaaaccggcgcttacatcgggcaaactccgctgtataggctccacgacgcatgaggagtacggcaagcattttgaaaaagaccgcgccctgtcccgccgtttccaaaaaatcgacataaacgaaccttccgaagaagttgcgattgatatcttaaaagggctgaaatccagatacgaaaactaccacaatgtccactacagcgacgagatcgttgaaacggcggtgcatctttccgcccagtttatcacggagcggcgcctgccggacaaggccatagacgtaattgacgaagccggcgcttacgcgcggatagaagcgtacaaaaaacagcgtgaaaataacagcacgacagataacacggcgcagattatcaatgcggaaaaaacaccggaagccaacgcgccttcaactgtgcagaacgggcaagttgaaaaaatagaaataagcctgccggttatcgaaacaataatttcaaaaatagcgcgcataccgcagaggtcggtaggcgaaagtgaaaaagacaaacttaaagatttggaaaaaaggcttaaagagcgtattttcgggcaggacgaagccgttgcggcggtggtaaaggcggtaaaacgttcaagagcgggtttccgggcggaaggcaaaccggttgcgaattttctttttgccggccctaccggcgtcggaaagacggaattggcgcgccagcttgcggaaacacttggcattgcaatgatccgttttgacatgagcgaatatcaggaaaaatattccgtatcgcgccttgtcggttcatcgccgggttatgtcggttatgaagaaggcggccagcttacggacgcggtgcgcaaacagccgcatgccgtagttttattagacgaaattgagaaggcgaacccggatattttcaatattctccttcaaataatggattacgccacccttacggacaatcagggacgcaaagccgatttccgcaacgtaatttttataatgacaagcaacgccggagcaaaggaaatcggcaaagggcttatcggttttggagagcgaataatggacgataccgcgataaatgacgcgatagaaaaaatctttacccctgaattccgcaaccgccttgacgcggtcgtgcatttcggacatctttcgcgggaaatcatggtttccatcgtcaacaaagaacttgacgctttctcaactcagcttgccgaaaagaacataacgcttaccgtaacatccgcctgcgtggacaaaatagcggaagaaggctacagcagggagtttggcgccagaaacaccggccgtcttatcgaggaaaagattaaaagcttctttgtggacgaagtgcttttcggccgtttaagcgagggcggaagcgccgttgtagactgggacggggaatatcttatgaatattgagggagcggctctggaagcgtccctcgtttaa

SEQ ID NO: 63134 - protein, 787 aa, Unknown
  Obtained from environmental sample
  DOMAIN (477)...(750): Torsin
  misc_feature (1)..(787): Xaa is any amino acid
MRISSHVQAIIDAAYNEAKMRSHEYVTPEHILYAALAFEEVQGVLYSCGADLAQIKSGMENFFEQKVPSSAAAEPAKTVGFHSIIERAIIQSKSAQKDRIDVADILVSLYDEKRCYSAYYLRKAGVKRFELLQVLSHSHGNEGGKDNDASDDDQADGQKSKQSKKTALERYAIDLTELARNNKLEPVIGREEELDRTIQVLCRRLKNNPIHVGDSGVGKTAITEGLAQRIVAGDVPPTLKGFSIFSLDMGALLAGTKYRGDFEERVKRVVEEMMKKEKAILFIDEIHTLVGAGAVSGGALDASNMLKPALTSGKLRCIGSTTHEEYGKHFEKDRALSRRFQKIDINEPSEEVAIDILKGLKSRYENYHNVHYSDEIVETAVHLSAQFITERRLPDKAIDVIDEAGAYARIEAYKKQRENNSTTDNTAQIINAEKTPEANAPSTVQNGQVEKIEISLPVIETIISKIARIPQRSVGESEKDKLKDLEKRLKERIFGQDEAVAAVVKAVKRSRAGFRAEGKPVANFLFAGPTGVGKTELARQLAETLGIAMIRFDMSEYQEKYSVSRLVGSSPGYVGYEEGGQLTDAVRKQPHAVVLLDEIEKANPDIFNILLQIMDYATLTDNQGRKADFRNVIFIMTSNAGAKEIGKGLIGFGERIMDDTAINDAIEKIFTPEFRNRLDAVVHFGHLSREIMVSIVNKELDAFSTQLAEKNITLTVTSACVDKIAEEGYSREFGARNTGRLIEEKIKSFFVDEVLFGRLSEGGSAVVDWDGEYLMNIEGAALEASLV

SEQ ID NO: 63135 - DNA, 528 bp, Unknown
  Obtained from environmental sample
  misc_feature (1)..(528): n is a, c, g, or t
ttgagggagcggctctggaagcgtccctcgtttaatgccatgaaaagcggtcctgacccggattttccgtatttaaccgaacaagactactacagatttagaaatcccaaagaatggctcgacgacatagtcgcggtaggcgggaatctttcgccgggaatgctgctttccgcgtatgaacagggaattttcccctggtataaccccgaagaccccattctttggcaatcacccgacccgcgctgcgtgattttccccgataaattacacatttccgactctatgcgcaaaattctgaaaaaagacgtatataaaattacatttaacaaagattttacgggcgtaatgaacggctgctcgaatacaaaacgccggaatcagaacggaacatggatttccgatgatattatcaaggcttatacggaaatgcaccgcctcggatgggctcattccgcggaagcgtggcaaaacnggggaacttgtcggcggctgttacggggtcctgatgggcaaggcgtttttcggtga

SEQ ID NO: 63136 - protein, 175 aa, Unknown
  Obtained from environmental sample
  DOMAIN (51)...(175): Leucyl/phenylalanyl-tRNA protein transferase
  misc_feature (1)..(175): Xaa is any amino acid
MRERLWKRPSFNAMKSGPDPDFPYLTEQDYYRFRNPKEWLDDIVAVGGNLSPGMLLSAYEQGIFPWYNPEDPILWQSPDPRCVIFPDKLHISDSMRKILKKDVYKITFNKDFTGVMNGCSNTKRRNQNGTWISDDIIKAYTEMHRLGWAHSAEAWQNXGTCRRLLRGPDGQGVFR

SEQ ID NO: 63137 - DNA, 1944 bp, Unknown
  Obtained from environmental sample
  misc_feature (1)..(1944): n is a, c, g, or t
ttgaagggaaagacaatgacgactaaagattcattgaaagaaaaaactcaagtccttcttgagtatccgcaaataatggagaaagcggcaaatctttccgtcagcgaagaagcggcgtcgataataagaaattcatcgcccgtatacgacgattcaatcgagaaaataaaatcaatggtacacgcgatttttacattgcttaaaacgcgcaatgacgaaccgcgcttaggactgccctctatcggttttttaatcccgaaaattgaaacagagggcgcggttctggctcttgacgaagttttagccgtcgggctttttgtcgagcgcgcggacgaatttacaaaatggataatcaaagataaaaacgaaaacagggaacagccgtcggaaggcaaagaagcacttttttctctgctggaaaatttacccgtctgcggcgctgttgccgcggaaatctttaaaataatcgacagagaaggcaatttgcgcgatcttccggcgttacgcgccatcaagaagcggataaacactttggaaaaagaacttgacaaagcggtttccggttatatcgctaatgaggattacaagcgtatgcttcaatcgccgctgccgtcgcaaagggacggaagggctgtgcttgcggtaaaagtgaattttcgcggaagaatccccggcattttgcatgaagtgtcgtccagcggacaaacagtctttgtagagccgcttgatgtcgtggataaaaataatgaaatcttagtggaaaaaaggaatctggacgcggaagtgcaaaaaatcctgcgcgagcttacggaaaatatttccgttcacgcggagagtctaaaaaagtttcaccaaacgattatcgagcttgagtgtttaagaactaaggcaaggtattcggcggaaaccaaaggacactttgcgctgaatacggacacagggcaaagtcttttgttaaaacaggcgcgccaccctatgttaaaaaaagcggttcccatcaatatagaaatgggcggcgatatccgcacattgatcattacgggtcccaacacgggcggaaaaacggtagcgttaaaaactctcggtctttttgccatgatgaaccagagcgctcttgccctgccgcttgacgaagggagcgtccttccgatttttgacggaatatacgccgacatcggcgacgagcagtcgattaatcagtctctttcaactttttccgctcatattacgaacatatcgggaataacaactcacgcaaccgaaaaatcgctcattctgcttgacgagcttggttcgggaacagatccgcaggaaggcggcgctattgcgatggcggttcttgattatttaatagaaaaaaacgcaagaatgataattacaacacatcacggtatcttaaaacattacggctacacaaggcaaggcgtagaaaacgcatccgttgaatttgacgctcatacattatcgcccacctacaaaattattaacggactgcccggcgaaagcagagcgcttgatatcgcttcagctaacggtcttaatcccgatattgtgtccaaggcgagaagttacattgatgaagaaaaatccgatgtttcacagatgataaaaagtcttgagcaaaaacaacgggaacttgccggtctggaacaaaagagcgcaatggagcaaaacaaattaacggaagaaaaaagaaaagccgatttgaaagcattgcagctgcgtcagaaggaagcggaattaaaacgggaatcggtcggtaaactccaacagtttttgggtgaaagcagaaaaacattggaaaaccttgtgcgtgagttaaaagagggcgaagttgaccgcgaaaagacgctgaaagtaaaagtgttcttaaacgaactgcgcgtaacgcggaaacagagagcgaaacgctggaagccgaagaacgcgctatccgcaaattaa

SEQ ID NO: 63138 - protein, 647 aa, Unknown
  Obtained from environmental sample
  DOMAIN (312)...(531): MutS domain V
  misc_feature (1)..(647): Xaa is any amino acid
MKGKTMTTKDSLKEKTQVLLEYPQIMEKAANLSVSEEAASIIRNSSPVYDDSIEKIKSMVHAIFTLLKTRNDEPRLGLPSIGFLIPKIETEGAVLALDEVLAVGLFVERADEFTKWIIKDKNENREQPSEGKEALFSLLENLPVCGAVAAEIFKIIDREGNLRDLPALRAIKKRINTLEKELDKAVSGYIANEDYKRMLQSPLPSQRDGRAVLAVKVNFRGRIPGILHEVSSSGQTVFVEPLDVVDKNNEILVEKRNLDAEVQKILRELTENISVHAESLKKFHQTIIELECLRTKARYSAETKGHFALNTDTGQSLLLKQARHPMLKKAVPINIEMGGDIRTLIITGPNTGGKTVALKTLGLFAMMNQSALALPLDEGSVLPIFDGIYADIGDEQSINQSLSTFSAHITNISGITTHATEKSLILLDELGSGTDPQEGGAIAMAVLDYLIEKNARMIITTHHGILKHYGYTRQGVENASVEFDAHTLSPTYKIINGLPGESRALDIASANGLNPDIVSKARSYIDEEKSDVSQMIKSLEQKQRELAGLEQKSAMEQNKLTEEKRKADLKALQLRQKEAELKRESVGKLQQFLGESRKTLENLVRELKEGEVDREKTLKVKVFLNELRVTRKQRAKRWKPKNALSAN

SEQ ID NO: 63139 - DNA, 444 bp, Unknown
  Obtained from environmental sample
  misc_feature (1)..(444): n is a, c, g, or t
atggacaaaaaaacagcccgctccgcagaggacgcggaaatttcatggctggtaaaaatcggttcgctgaaaataagttttccggagagcgagttaattccggcggaaagcgcgaaccccggcgcaaaaacttccggtaaatccgcgggcaaaaaaaacgcgtttaagtcgtgggaagcggagtacggcgcaacaacggaagcggcttacgaaataatgattcgcggaatgcgctttgaggacgcgatggaagccgtccgcaaacagttagacgcggcggtaattttcggtatgaaacatttcgctgtcattcacgggaagggggaaggtattttgcggcagggcgtacatgactatctgcgaaaacatcctgcggtagcggagttttatttctcacgccccgaaatgggcgggtatgggcgaacggaagtcgtgcttaaataa

SEQ ID NO: 63140 - protein, 147 aa, Unknown
  Obtained from environmental sample
  DOMAIN (72)...(147): Smr domain
  misc_feature (1)..(147): Xaa is any amino acid
MDKKTARSAEDAEISWLVKIGSLKISFPESELIPAESANPGAKTSGKSAGKKNAFKSWEAEYGATTEAAYEIMIRGMRFEDAMEAVRKQLDAAVIFGMKHFAVIHGKGEGILRQGVHDYLRKHPAVAEFYFSRPEMGGYGRTEVVLK

SEQ ID NO: 63141 - DNA, 366 bp, Unknown
  Obtained from environmental sample
  misc_feature (1)..(366): n is a, c, g, or t
atgtccgtagaaaccattgcagaaacgcttttagaaaagctgaaaagtatagcgcaaacagaaaccgttattggcgagccaatacactcaggggaatcaaccgttattcccgttagccgcgtgtctgttggtatgggcatgggtggtcatacgggtaaaagcgatttggcttctagcggcggcggacttcgcatagaccccgtggcttttttggtgttaaaaggcgatgatgttaaagttttgcccatagacaaggggcaatccacgctttcaaaaatagcagacttaacaccagatgtagttgccttccttttaaaaaatgtttcaaagaaaactgaaaattctgaaaaggaatctgcgaaatga

SEQ ID NO: 63142 - protein, 121 aa, Unknown
  Obtained from environmental sample
  misc_feature (1)..(121): Xaa is any amino acid
MSVETIAETLLEKLKSIAQTETVIGEPIHSGESTVIPVSRVSVGMGMGGHTGKSDLASSGGGLRIDPVAFLVLKGDDVKVLPIDKGQSTLSKIADLTPDVVAFLLKNVSKKTENSEKESAK

SEQ ID NO: 63143 - DNA, 357 bp, Unknown
  Obtained from environmental sample
  misc_feature (1)..(357): n is a, c, g, or t
atgctctgcataaagctttttgtgccggaacgagctattgtaccaaggttttggattaaatcttccttgttcatgccaattccgttgtcttctatggtgagaattttcgtttcatcgtttgcggatatatctatgcgcagttccgtgcctgcgggtaaaagttctggatttgcaatggataagaacctcaatttatctaaagcatctgccgcgttagataccaattcgcgcaaaaatatttctttattgctgtatagtgaatgtatcatcaaatgcagcaactcacgaacttcagtttggaattccattttttccatatttctcctctataaaaaaattatttttttggtaatgtag

SEQ ID NO: 63144 - protein, 118 aa, Unknown
  Obtained from environmental sample
  misc_feature (1)..(118): Xaa is any amino acid
MLCIKLFVPERAIVPRFWIKSSLFMPIPLSSMVRIFVSSFADISMRSSVPAGKSSGFAMDKNLNLSKASAALDTNSRKNISLLLYSECIIKCSNSRTSVWNSIFSIFLLYKKIIFLVM

SEQ ID NO: 63145 - DNA, 1791 bp, Unknown
  Obtained from environmental sample
  misc_feature (1)..(1791): n is a, c, g, or t
gtgaaacctgaacttgccgcttaccttgaacaactttcaatggagtatctcagggaaatatataagagtctgattggaaaagtacctgtggtaagaaaagcagaacttattcagaagcttgcgggggctttagactttaaaacgaaagatagtttccatcaatggtttgattatttgccgccattaacccaaaacgtactttccgctctgacgtttaccgactttcttccagtaacagttctggagaaaaattttaaagaaatacttttggtaaagaatagccgatattcgtgggaaaccatattacagctaaacgaaaaactcaatctgggttttttagtactcgatcgttgtaacacgcagtacactcttgggttacccgtatttctgcgaaaagcattgtcgccatggcttgagccgcctcctgaagcagacattgccaattgcgtttccgatgataccgggcccggctgggacaacagccaattaatagccgattcgtatccactactctgcgaaaccgtaatacagttgtttgcggatattccggaaatggaaagagaaaaagcagtaaaaggattcaagaaaaaacaaatggcggagttgcggacatcgtccggttttcttgactttgatatggataatactctttgccctgacagcattgacctgactctgcgctttacactctgcatgaaaaactttaaaccggttcgtcccaaagacgcttatgaggaaattcgtaatatggtaaccgggtttttcggcaaagattcactgtataaaaaaacatggttttatcctgaccgtaattatcttgaatataatgtttgcattgatcatttgggtagaactccgggttattaccttgagaattatgacgggctgccgtcatccagggaaacttttcataaaatcctcctggaagtagcaaaagacggtcgccgttttgacgccgataagctggctgaacatatcaaaattacagcgaagaagtttggttttagcggcagcgaattcgaaaaaactttaagaataaaggcctctttacttgaaatggatggaattacctattcttgcgagtattatgaagatttccatacatacgggatattacgttttcccttgctggtaaaaccgttgtttaaagcatactgttatatttttgcggctctgggacttttagaaattacccggaaaacgccaccccttgccgttacgaaagtttcaaaacagtatcctatctccccttacgattccttaaaaaccatccgtatcacaaaactcggcctctggtgtctgggcttgtcttcggagaaaccgccactaccccgtcatgaataccaggcaatagccgacaaggaattgctccttgttacggttcagggcaactcgctggaaaggacagtgtaccttgacaggataggcattaagctgggggaagatcgctggcgcgtaagtccggcttcctttatttcaggctgcgactccaaaaagcacatagaagaccggattgaacgctttaaaagacttattgatccggcccccgctccccattggctggaactgtttgacaaagcgcttacccgcgccgggctgtttggtcattaccgcaatgatgtgctggtgtacaacctgggcgaaaaccggaaaatatcggaagagcttttgcgcgatccggaactaaagcgcatcgcctttcgtgccgagggaggaatgcttatagtgccaacaaaaaatcaaaagaagtttttggttttattgaacgaacacgggattgccagtttttaa

SEQ ID NO: 63146 - protein, 596 aa, Unknown
  Obtained from environmental sample
  misc_feature (1)..(596): Xaa is any amino acid
MKPELAAYLEQLSMEYLREIYKSLIGKVPVVRKAELIQKLAGALDFKTKDSFHQWFDYLPPLTQNVLSALTFTDFLPVTVLEKNFKEILLVKNSRYSWETILQLNEKLNLGFLVLDRCNTQYTLGLPVFLRKALSPWLEPPPEADIANCVSDDTGPGWDNSQLIADSYPLLCETVIQLFADIPEMEREKAVKGFKKKQMAELRTSSGFLDFDMDNTLCPDSIDLTLRFTLCMKNFKPVRPKDAYEEIRNMVTGFFGKDSLYKKTWFYPDRNYLEYNVCIDHLGRTPGYYLENYDGLPSSRETFHKILLEVAKDGRRFDADKLAEHIKITAKKFGFSGSEFEKTLRIKASLLEMDGITYSCEYYEDFHTYGILRFPLLVKPLFKAYCYIFAALGLLEITRKTPPLAVTKVSKQYPISPYDSLKTIRITKLGLWCLGLSSEKPPLPRHEYQAIADKELLLVTVQGNSLERTVYLDRIGIKLGEDRWRVSPASFISGCDSKKHIEDRIERFKRLIDPAPAPHWLELFDKALTRAGLFGHYRNDVLVYNLGENRKISEELLRDPELKRIAFRAEGGMLIVPTKNQKKFLVLLNEHGIASF

SEQ ID NO: 63147 - DNA, 1329 bp, Unknown
  Obtained from environmental sample
  misc_feature (1)..(1329): n is a, c, g, or t
atgggggcgtgtcttgcggatgaaatgggccttggaaaaacgattcaggtgatagctctcctgcgagccctcaacgaggcgggcgttaggggaaactgccttattctttgcccaaagaccctggtgttcaactgggtcgctgaactggaaaggttcgcgccggaactgccccgcacggtgcattatggaacagggcgggataccgcccaactggaaaccgaaggattcaggatcatccttagcacatacgctacactgcggcgcgacatcgaagattttcagaagatcaattttttgtatatcatccttgatgaatcccagaatataaaaaacctgaccactcaaacaacggccgcggtactctccctgaatggaaaacatcggcttgccctgagcggtactccaatagaaaataatctgggggaattgtacagcctgttccgttttctaaacccctcgtttttcggttccgagaagctttttgttcaacgttatcttcatccgattcaggatgataacgacgaagacgcccttaaagacctaaaagcaagaatatatccctttatgctcaggcgtttgaagcgggatgtgctaaaagagcttccggccaaaaccgaagaaactgcgtacatcgagctggaagaaagccacctggctgtttatcaccgcaggcggctggaatacaagcagttcatcgacaatatcatcgcaaagggtgaggcggcaaaatcccagtttgtgattttcaaggcgctgggcgaactgcgccgccttgccagtgttccggaagcggacggagaatatgccgggccgtcggcaaagcgccagtacctgctagaccggatagcggagctgacagaaaacaaccataagtgcctcatctttaccaactttcttgcgacggtggacataataagcgaagacctggccggacttggaattcaaaaccttaccatgacgggagcaacggtagatcgtcaggcgctggttagacgctttcaaacggatgacaatgtaaaagcttttgttatgaccttaaaaaccggagggaccggccttaaccttacggcggcagattacattttcataatggatccctggtggaacagcgccgcagaaaatcaggccattgaccgcagccaccgcatcgggcagcagaatccggtgttttgttaccggctgatagccaaagatacaattgaagagcggattttggaacttcagaaacgaaagaccgatttggcgggcgcgcttcttgccgatgatccgggagcgctgaaagccctgagccccgaggatgtggcctaccttgttggagacgctccgtga

SEQ ID NO: 63148 - protein, 442 aa, Unknown
  Obtained from environmental sample
  DOMAIN (308)...(384): Helicase conserved C-terminal domain
  misc_feature (1)..(442): Xaa is any amino acid
MGACLADEMGLGKTIQVIALLRALNEAGVRGNCLILCPKTLVFNWVAELERFAPELPRTVHYGTGRDTAQLETEGFRIILSTYATLRRDIEDFQKINFLYIILDESQNIKNLTTQTTAAVLSLNGKHRLALSGTPIENNLGELYSLFRFLNPSFFGSEKLFVQRYLHPIQDDNDEDALKDLKARIYPFMLRRLKRDVLKELPAKTEETAYIELEESHLAVYHRRRLEYKQFIDNIIAKGEAAKSQFVIFKALGELRRLASVPEADGEYAGPSAKRQYLLDRIAELTENNHKCLIFTNFLATVDIISEDLAGLGIQNLTMTGATVDRQALVRRFQTDDNVKAFVMTLKTGGTGLNLTAADYIFIMDPWWNSAAENQAIDRSHRIGQQNPVFCYRLIAKDTIEERILELQKRKTDLAGALLADDPGALKALSPEDVAYLVGDAP

SEQ ID NO: 63149 - DNA, 1302 bp, Unknown
  Obtained from environmental sample
  misc_feature (1)..(1302): n is a, c, g, or t
gtgtaccctgaactgttagcgccggccggttcgtttgcgtgcgcggaggccgctttcacccacggagccgacgccgtctacgccggaataggcaaattcaacctgcgggcgcactccccgaatttcgagcccgacgagttcggcgaattgctgaaattagcctccatcagtaacaaacgcgtctacggcgctcttaacatcatgccgagcgacgagatgctggcgcctcttgaggagacgctccggcagttagccgccgccaaatctttgccggccgcgttcataatcagcgaccctggcgttttgtccttggtaacggaagtttgccccgacacccccatccacctgagcacccagagcgggtgcttcaattccgcggctatgaaattttggcgtaaacagggcgtgagccggattatcctgcccagagagctttgtattgaccagatacggtacttatcgcggcagggtgcggcggagacggaggtattcatacacggcgcaatgtgcgtgtcgatctccggccgttgcctgctaggcgcttactacggcggccgccacccgaatttaggcgattgcccgcaaccgtgcaggctgaaataccgcatagcgccggttgatgccggtcaatctccaaaagatggttttgacgttgaggagtcctgcgacatcgggggcggcgcgtggaacccgcaagacggggcctacctgctaaactcaaaggatttatgcacgataggaatcctcccgcggataatagagagcaacgtatcgtcgctcaagatagagggacgcaacaagaccgcctactacgtggcgtcgacagtgaaagtctaccgcgacgccatagatacctgcatggccgccccggacggctacaaggtaaaggagtggtggcgggaggagctaaacgccatcgaccataggccgtacacgaccggcttctacgacggcgaccccataaagcaggaggtattctcgtcaaaagcgcgggccgggtaccgcttaatcgggacagtaaaagcggttatcggcggacgtccggtcgttgacgttaaaaacgtcttttccgcggaatccgcgccgataaacgtcctgcccgtgaaaagcgccaagcccccgttcgacctaaactttagttcaatactagaatttgacggcgctgatgaaacagacggatcgacagaaactaggtttataaacatcgcacgggcaagaccaaaccgcctagtcctgctagacggttgcacagaaaagataagaacgggggatatgctgcgaattcgtgaatcctgcaactaa

SEQ ID NO: 63150 - protein, 433 aa, Unknown
  Obtained from environmental sample
  SIGNAL (1)...(22)
  DOMAIN (74)...(322): Peptidase family U32
  misc_feature (1)..(433): Xaa is any amino acid
MYPELLAPAGSFACAEAAFTHGADAVYAGIGKFNLRAHSPNFEPDEFGELLKLASISNKRVYGALNIMPSDEMLAPLEETLRQLAAAKSLPAAFIISDPGVLSLVTEVCPDTPIHLSTQSGCFNSAAMKFWRKQGVSRIILPRELCIDQIRYLSRQGAAETEVFIHGAMCVSISGRCLLGAYYGGRHPNLGDCPQPCRLKYRIAPVDAGQSPKDGFDVEESCDIGGGAWNPQDGAYLLNSKDLCTIGILPRIIESNVSSLKIEGRNKTAYYVASTVKVYRDAIDTCMAAPDGYKVKEWWREELNAIDHRPYTTGFYDGDPIKQEVFSSKARAGYRLIGTVKAVIGGRPVVDVKNVFSAESAPINVLPVKSAKPPFDLNFSSILEFDGADETDGSTETRFINIARARPNRLVLLDGCTEKIRTGDMLRIRESCN

SEQ ID NO: 63151 - DNA, 855 bp, Unknown
  Obtained from environmental sample
  misc_feature (1)..(855): n is a, c, g, or t
ttgatcagatcggccgaggctattcgtcttctccgccacaacatgcttgaacttggcgaaaacgcctaccgaggcgcgattatagtcgcccccgacagcacaggcgccatctccctcataaacgcgctccacgtcgaggactacctgcgcggcgtggtcccgctcgagatcggcagcctgagcgagaacgaactggaagcgctcaaggcgcagactatcgccgcccgcacttacacctacaagaagatgacgcaaaacgccgacaaactcttcgacttggcctccacggtcgccgaccaggtctacggcggggcgaacgccgaagccgccgcccccgacatggcgatccgcgcgacaaaggatctgataatcgcctacaacaacgatataatagacgcctattaccactcgacctgcggcgggacgaccgcgaacgtcgaggacgtgtggggcggcgaaagcctcccgtacctccggtcaaggagcgactcggacaagggcggcaaggcctactgcggccaagggggggcgttccggtggacggagacttggagcatgaacaagctctccaacatcataaagcagcactccggcgagggaaacatgaccccgcccggcaacgtcagccacggtgggcgcgccggcgctccccaagaggattggacggtgcgccgcatagaggtgcgcgaacgcttgcagtgcgggcgggtcaaacaagtggccattgtcacgaagatcggcgagtacaaagcgagcggcgaanaagcgcgcttcgtcctgcgccggaacaacgccgcgcagcaagccctgcggtcggcgaacttcaacacgccancatggcaaacggggaggtaa

SEQ ID NO: 63152 - protein, 284 aa, Unknown
  Obtained from environmental sample
  DOMAIN (30)...(126): Stage II sporulation protein
  misc_feature (1)..(284): Xaa is any amino acid
MIRSAEAIRLLRHNMLELGENAYRGAIIVAPDSTGAISLINALHVEDYLRGVVPLEIGSLSENELEALKAQTIAARTYTYKKMTQNADKLFDLASTVADQVYGGANAEAAAPDMAIRATKDLIIAYNNDIIDAYYHSTCGGTTANVEDVWGGESLPYLRSRSDSDKGGKAYCGQGGAFRWTETWSMNKLSNIIKQHSGEGNMTPPGNVSHGGRAGAPQEDWTVRRIEVRERLQCGRVKQVAIVTKIGEYKASGEXARFVLRRNNAAQQALRSANFNTPXWQTGR

SEQ ID NO: 63153 - DNA, 1722 bp, Unknown
  Obtained from environmental sample
  misc_feature (1)..(1722): n is a, c, g, or t
atgctggaattcaaggattatatagccgactggccggatttgccttaccgcaatttttccgagtatcttgaaggcattgtgtcgaaatggggagacaagaccgctatccattaccgttcgaacggtaataaggaatttaccaattggtcgtttaataagttaggagaagaatgtcgtcgaatcgcaaggggtttgcttgcggcggggcttgtgaaaggagacagggtgtgcctttgggcggaaaatcgcccggaatggatggcggtttggctgggtacggccgttgccggcctcgttattgtcccggtggatttccttgcatctgaaaaagaatgtacaaacattttatcgttgacgggcacgaaggcgttctttcattcttcaagaaaacagggcttcgccgattctcttgcttcccagggattgtctatacccataaagataagtttgacttccgaatcttactcttcctttggcgcatccgctgggggaacgtctcttgcaattgagatcgcagaaaaagatccggcgtccatagtttttacttccggcacaacaggtttcgccaaaggcgtaacgcttagccacaagggggtcattgccaactgcaatgcggcaatactatcgctccgggcatatccctccgatgttttcatcaacgtgcttccacttcaccatacttatcccacgacctgctcctttttagcaccatttgctgtaggtgcttccacaataattgtagaaaaacttgtcggttctgtggtaatcgatgatatacgggacgcaaacggaaatttcctaattgcggttcctcttctttacgacaaggtgatggcaggtattcaaaagggctacaatgccctgccgggaattctaaaagccatactaaacgtattcagggctatttcccttgccgaagcaaaaaaggggcgcattggtttcggccgctttgtctttaaatttgtacgccgcagagccgggctccagtccatcagaatgatggttgcgggaggcggtcctcttaatccgcaaacagcggatttttttgattcttttgggttcaatatcgttcacggctacggaacaagcgaaaatagtcccctcatcagcgttaataccccctggcacaggcgtaatgtttcagtcggccttccggtggcaaaaaccgaagttaaaattgtcgatgccgacgcggacggcgtgggggaaatagcggcaaagtctccgtccatcatgcttggctattacaacaatcccgaggccactgccgaggtcattactcccgacggatggcttttgacaggagatttgggttacagggacaaaaagggttttatctatataaacggaagaaagaaaaatctaatcgtcagctcaggcggcaaaaacatttacccggaagaaatcgaagctcattttaataacacaaggataatcgccgaaacccttgttgtaggccgaaaagaaaaggaacacgggggcgaacaggtttttgccgtgctggttcccaactatgaaaacatcgcggtcgattacccgggcaaagaaaatgacgatggttttatcaaggaaatctttaagcaggagatcgacaagataaaccgcactcttgtcggttataaaaagattaccgattttaccatccgcagggagtcttttgaaaagaacgcccagcagaaaatcaagcgttatttgtacaagagttacgaaacgccaaattag

SEQ ID NO: 63154 - protein, 573 aa, Unknown
  Obtained from environmental sample
  DOMAIN (50)...(484): AMP-binding enzyme
  misc_feature (1)..(573): Xaa is any amino acid
MLEFKDYIADWPDLPYRNFSEYLEGIVSKWGDKTAIHYRSNGNKEFTNWSFNKLGEECRRIARGLLAAGLVKGDRVCLWAENRPEWMAVWLGTAVAGLVIVPVDFLASEKECTNILSLTGTKAFFHSSRKQGFADSLASQGLSIPIKISLTSESYSSFGASAGGTSLAIEIAEKDPASIVFTSGTTGFAKGVTLSHKGVIANCNAAILSLRAYPSDVFINVLPLHHTYPTTCSFLAPFAVGASTIIVEKLVGSVVIDDIRDANGNFLIAVPLLYDKVMAGIQKGYNALPGILKAILNVFRAISLAEAKKGRIGFGRFVFKFVRRRAGLQSIRMMVAGGGPLNPQTADFFDSFGFNIVHGYGTSENSPLISVNTPWHRRNVSVGLPVAKTEVKIVDADADGVGEIAAKSPSIMLGYYNNPEATAEVITPDGWLLTGDLGYRDKKGFIYINGRKKNLIVSSGGKNIYPEEIEAHFNNTRIIAETLVVGRKEKEHGGEQVFAVLVPNYENIAVDYPGKENDDGFIKEIFKQEIDKINRTLVGYKKITDFTIRRESFEKNAQQKIKRYLYKSYETPN

SEQ ID NO: 63155 - DNA, 789 bp, Unknown
  Obtained from environmental sample
  misc_feature (1)..(789): n is a, c, g, or t
atgaaaccaatagcggaactgacagacgaagaagtccttggcgtgcggtattttttaatggacattgacgacaccctcacacggcaggggaaactcctttcatcttcttactcggccctgtggaaactgaaagaagcagggctaaaggtaatccctgtaaccggacgccctgcaggctggtgcgacctgatagcaagggaatggcctgtcgatggagtggttggcgaaaacggagctctggctttttgggaggagccgggatcgatcttgaaagccgaataccatcccaatgcggtaaggaacgatcacagcgttcttgaaaggatcaaggaaaaagcgtntgcggaatttccggaactcagacttgccaaggatcagtttgctaggctttttgatattgcccttgactttgcggaggaagagccggttcttccaattagcgctgcacagcgcattaaggaaatagcggaagaagaaggagccatcgcaaggatctcttccatccatgtaaatatctggatgggcgaatacaacaagctttcgatggttgaacgcttcctggccgaacgattcggctggaaatccggcgcgggagacagggaagtgatatttgtcggagattcgccgaacgacgagccgatgtttgcgcgttttcccctaacttgcgccgtatcaaatatagagcgctacattggccttatcaaacacaagcccgcctttgttgccggcaaagaaggcggcgacgggtttgcggagattgccggggtctttcttgaaaggcggatgtga

SEQ ID NO: 63156 - protein, 262 aa, Unknown
  Obtained from environmental sample
  DOMAIN (18)...(254): haloacid dehalogenase-like hydrolase
  misc_feature (1)..(262): Xaa is any amino acid
MKPIAELTDEEVLGVRYFLMDIDDTLTRQGKLLSSSYSALWKLKEAGLKVIPVTGRPAGWCDLIAREWPVDGVVGENGALAFWEEPGSILKAEYHPNAVRNDHSVLERIKEKAXAEFPELRLAKDQFARLFDIALDFAEEEPVLPISAAQRIKEIAEEEGAIARISSIHVNIWMGEYNKLSMVERFLAERFGWKSGAGDREVIFVGDSPNDEPMFARFPLTCAVSNIERYIGLIKHKPAFVAGKEGGDGFAEIAGVFLERRM

SEQ ID NO: 63157 - DNA, 537 bp, Unknown
  Obtained from environmental sample
  misc_feature (1)..(537): n is a, c, g, or t
ttgtcagtaccattccatgcaggaataagtatggaagaattaaaatttagagacgcgttaagaacggacttagaaaaaatagttgaaatatacaattcgacaattccttccaaaatgattacggctgatacagaacctgtttcagttaaaagcagggaaaaatggtttgacgagcataatccaactaaacgcccgctttgggttgtcgagaataaatcaaatgaaataatcggttgggttagttttcagtcattttacggaagacccgcttataatgccacagttgaaataagtatttatctggaaacagaacatagaggcaggggattgggaaaacaaattctacaatacagcattgacaacgctccgaaatgcggaattaagactttgcttggctttattttttcccataacgaaccaagcataaagttgtttagatattttggctttgaggattgggcgacgcttccaaatatcgcggagcttgatggggtggaacgcggactaaagatattaggtaaaagaatatctgaataa

SEQ ID NO: 63158 - protein, 178 aa, Unknown
  Obtained from environmental sample
  DOMAIN (68)...(151): Acetyltransferase (GNAT) family
  misc_feature (1)..(178): Xaa is any amino acid
MSVPFHAGISMEELKFRDALRTDLEKIVEIYNSTIPSKMITADTEPVSVKSREKWFDEHNPTKRPLWVVENKSNEIIGWVSFQSFYGRPAYNATVEISIYLETEHRGRGLGKQILQYSIDNAPKCGIKTLLGFIFSHNEPSIKLFRYFGFEDWATLPNIAELDGVERGLKILGKRISE

SEQ ID NO: 63159 - DNA, 324 bp, Unknown
  Obtained from environmental sample
  misc_feature (1)..(324): n is a, c, g, or t
gtgcaagccgccgttaaaatcctgaaagacaggaatgtaaaatttgtttttgacggagaactacaggctgacgcggcgcttgttccttcggttaccgatcagaaagcgccgggcagcccggtaaaaggcaaagtcaacaccctgatcttccccgatctcggcgcgggcaacattggctataaactggtgcagcggcttggcaacgcccaggctttcgggcctttactccagggtttcgcgaaacccataagcgatctttcccgcggcgcttcggttgacgacatcgttacgacctgcgcggtaacgctctcacgagcaaagtaa

SEQ ID NO: 63160 - protein, 107 aa, Unknown
  Obtained from environmental sample
  DOMAIN (1)...(103): Phosphate acetyl/butaryl transferase
  misc_feature (1)..(107): Xaa is any amino acid
MQAAVKILKDRNVKFVFDGELQADAALVPSVTDQKAPGSPVKGKVNTLIFPDLGAGNIGYKLVQRLGNAQAFGPLLQGFAKPISDLSRGASVDDIVTTCAVTLSRAK

SEQ ID NO: 63161 - DNA, 1521 bp, Unknown
  Obtained from environmental sample
  misc_feature (1)..(1521): n is a, c, g, or t
gtgcgcggcgaggttataatgccgcgggagacatggcggcaaaaatacccgtccaaagccaactgccgcagcgcctctcacggaataatgcgccgcaaggacggctgcggctgcgaagatttgaaagttattacttatgactcttcgacaagctcagcaaccagtgtcaacgatgaaggctattttcaggatgaagtaaaaaacattgaatggcttgccaaaccgggctttgaaatagttgtaacaaaaatttgcaaagacgccgacgcggttatttcataccgcggcaaggtggcaaaaacgcgggacagccttccttttgacattgacggccttgttatcaaagacattgcaatcgacatggccgaccttcgcagacagaggcctgaaaagcagatagcatttaaattcgaacttgaaaccgcgttcagcatactcaggaaggtggaatggagcgaaacaggggcaacctatacccccataggcatagttgatcccgtccggctcgcgggaacgaccgtgcaacgcgccaaccttaacaaccccggcatgatccggtctatgggcctgcaaataggctcggccgtatccgttgtaaaacgcggcgagatcatcccgaagatcgaagggctcgcgccttcaggggcattgcccctggaatcattggaggcaaaagaaccgatagaattccccgtcaactgttccgtatgcggctccgccctggtggactcaggcacacgcctgtactgccccaataccggctgcgctaaacgccttctgcaccgcctggaaaaatggatctccgttctggacatccgcgaactgggcgataaactgatacgtcagctttttgacaaggaaagggtgcggaggatagccgatctttatacgcttaccgctggagaacttgcggattacgaaaggatgggcgaactatcagcggctaaagtcgtccgccatatacagacaaagagagaattatcgctcgcggcttttgtcgcaggttttgatcttgaaggcgttgcggagactacgatggataaagtcgcttccgccgggtttaacacaatggaaaaactccgaaaggcttcggcggaagacctggcgggcgtttacggccttggagaaataaccgcgaaagttattgttgagggccttgcggaaaccgccgccgagatggacgcagtgcttgcatcgggcgttatcagcatagcgccgccgccaagtgaagagtcccagcccatgcggggcctgtcattttgtttcaccggagagcttgcctccatgaagcgaagccaggccgaagaaaaaatcaaaacccttggcgcttcggccaaatcatcggtagtaaaaggcctttcataccttgttaccaatgatcccgaatcaggctcatccaaaaacaaaaaagccagggagttgggaatacctataatcaatgaggatgagtttttggcattacttgccagccctgcgggcgttaaaaatcaggcgacatctgtccagggagaactgttctaa

SEQ ID NO: 63162 - protein, 506 aa, Unknown
  Obtained from environmental sample
  DOMAIN (410)...(488): BRCA1 C Terminus (BRCT) domain
  misc_feature (1)..(506): Xaa is any amino acid
MRGEVIMPRETWRQKYPSKANCRSASHGIMRRKDGCGCEDLKVITYDSSTSSATSVNDEGYFQDEVKNIEWLAKPGFEIVVTKICKDADAVISYRGKVAKTRDSLPFDIDGLVIKDIAIDMADLRRQRPEKQIAFKFELETAFSILRKVEWSETGATYTPIGIVDPVRLAGTTVQRANLNNPGMIRSMGLQIGSAVSVVKRGEIIPKIEGLAPSGALPLESLEAKEPIEFPVNCSVCGSALVDSGTRLYCPNTGCAKRLLHRLEKWISVLDIRELGDKLIRQLFDKERVRRIADLYTLTAGELADYERMGELSAAKVVRHIQTKRELSLAAFVAGFDLEGVAETTMDKVASAGFNTMEKLRKASAEDLAGVYGLGEITAKVIVEGLAETAAEMDAVLASGVISIAPPPSEESQPMRGLSFCFTGELASMKRSQAEEKIKTLGASAKSSVVKGLSYLVTNDPESGSSKNKKARELGIPIINEDEFLALLASPAGVKNQATSVQGELF

SEQ ID NO: 63163 - DNA, 555 bp, Unknown
  Obtained from environmental sample
  misc_feature (1)..(555): n is a, c, g, or t
ttggattttgccggaattttcggcaacgacaaccccgtcatcgttgaaatcggctttggcatgggcagggcgaccgccgttatcgccggggaaaacccggataaaaattacatagggcttgaaatccacaaaccggggatagggcggctcctctgggaaattgaacagcgccccctttcaaatgtcaggataatcgaacatgacgcaaccgaagtttttcaaaacatgctcccggcaaattcgctggaaggggtgcatattttcttccccgatccctggccaaagaagcgccaccacaagcgcagattgatacagcggccttttacggattgtatagggtcaagattgaaacccggaggctacatctacatggtcagtgactggtcagactatgctgactgggcattgtctgtgttaaccaatactgaaggtatggttaacgtatataaggactttgcggagccccaatcctggcggccccggacgagttttgagaaaaaaggccttgacaagaagcatgaaataaaggaattgtttttcaggcggagcctatga

SEQ ID NO: 63164 - protein, 184 aa, Unknown
  Obtained from environmental sample
  DOMAIN (2)...(183): Putative methyltransferase
  misc_feature (1)..(184): Xaa is any amino acid
MDFAGIFGNDNPVIVEIGFGMGRATAVIAGENPDKNYIGLEIHKPGIGRLLWEIEQRPLSNVRIIEHDATEVFQNMLPANSLEGVHIFFPDPWPKKRHHKRRLIQRPFTDCIGSRLKPGGYIYMVSDWSDYADWALSVLTNTEGMVNVYKDFAEPQSWRPRTSFEKKGLDKKHEIKELFFRRSL

SEQ ID NO: 63165 - DNA, 2544 bp, Unknown
  Obtained from environmental sample
  misc_feature (1)..(2544): n is a, c, g, or t
gtggacagccacagggacgcgtacaatttgcttaaaaacgggcgggccgacgcgtttttcgggctggataccgccgaaggggcttttgacatatacgacgacgtggtaagcgaagagttttttcccttgattttcagatcgtcctgcctttcgactcataacgaagagttccagccgataattaacgttctggacaaggcgatgaacgacaatgttcttgtatacctgacagagatgcaaaaaaagggtcttaggcaatatcaggaaaacaaaatatacgcgtcattaacggaagaagagcgcgaattccttaagaataacgctaaaacgcccataccggtcgtcgccgaattcagcaattatcctatttcattttacaataacaatgacaatagatgggaaggaatatttttcgaggcgctggaacaagtttccaaacttaccgatttaaaatttgaagttgttaacgagcaggacacgccgcttttaaagttaatagacatgcttgaaaacggcgacgcgtacatcctgcccgaattgcataagacaatggaatatgacggccgttttatctggtcggatattcccattataaacgataacttcgcgattttatccagatccgatttccgcaacatagacgtaaacgacgtgtttcatttgcacgcggccataagaagagacaccatatattccgaaatgttcaagagaatatttcccgcgcacaggaattttaccgaatatgacacaatggaagacacatgggacgctttaaggaaaggcgaggtagacgtaattttcgccagccgccgcaggctagtcatatacaccaattattacgaattagcggattttaagcttaatctggtttttgatcatgtgtttaattcttatttcgcctataacaaagacgcggtcattcttaaatcaattgttgataaggcgctccgccttgtcaatgtaaacaatatggcaaaccagtggatatacaggacgtatgactaccgcgtaaaaatggcggccgcccagcgcccctggcttatagggtcatctgtttcgttcttcatcgttcttacgcttgtaacaattttgttaataaaaagcagaagttcaggcaaggagcttgaaaaactggtggctctgagaaccggcgccctggagttcgagacatccaagcttcagtccgtgcttgcttcaattcctgacctcatgtacacaaaggacaaagatttaagatatacgcaatgcaaccatgcttatgaaaaatttatgggagcaagcgaagaaatactgctgggaaaagccaacagcgacgggacgtggtttcccgccgaagacgtggagaagatccagcttaccgacgaaatcgtaattaatgaaaacaggataatttcccatgaaacaagaatccactctcccgcgacagggaaagaaggcttttatgaaaccgttaaagctccgctgatacgggacgggaaggtcgtagggatagtttccattatacgcgacgtgaccaaacgcaaagagatggaaagggatctgtccctgcagacttcattgtttaagactatgctaagctccctcccggacgcggtattctgcaaaaacctggatttcaagtacaccttatgcaacaactatctggcggatttagtcggcaaacaaaatgaggatatgcttggcaaggatgatatttccgccctggggttgtctgccgaaacggcgaaaatttcttttgaaaacgacttaaaagtcgtgaacgaacaagaacgcgtagcatacgaagaacctattccatgcgcggacggcgtcacgcggctttttgaaaccgtaaaatcgccgcttatactggacggcgacgtagtcggaattatggcgatagggcgcgacataacccggcgcaaagaaatggaagaggaagcccttgccgccaaccgcgccaaatcatccttccttgccaatatgagccatgaactgcggacgccgcttaacgtggttataggtcttacagatttaacgcttgaggaagatttggaaaccaacacaaaggaaaacctggtaaagataaacaacgcgggcacgacgcttttaagcattgtaaacgacatccttgacttctcaaaaatcgagtcaggcaaacttaccttgtcgcctgttgaatattatttgtccagcttaattaacgacatcatcactcttgtccttacccgccttggggaaaaacccattaagttcaaattgaatatcaaagacgatcttccgaacaaactgttaggcgacgatttgcgcgtaaaacaaatacttacaaaccttcttaccaacgctattaagtacacccgcgagggaagcattgaacttatcatacgctccacgaagataaacgacaaggtctggctggatgccgccgtctgcgataccggtttgggcatcccggaagaagacatctcaagcctgttccttgatttctatcagggtttcctcaaacgccacccgcaacatagagggcacggggttgggacttccgattaccaaaaagcttgttga

SEQ ID NO: 63166 - protein, 847 aa, Unknown
  Obtained from environmental sample
  DOMAIN (112)...(331): Bacterial extracellular solute-binding proteins, family 3
  misc_feature (1)..(847): Xaa is any amino acid
MDSHRDAYNLLKNGRADAFFGLDTAEGAFDIYDDVVSEEFFPLIFRSSCLSTHNEEFQPIINVLDKAMNDNVLVYLTEMQKKGLRQYQENKIYASLTEEEREFLKNNAKTPIPVVAEFSNYPISFYNNNDNRWEGIFFEALEQVSKLTDLKFEVVNEQDTPLLKLIDMLENGDAYILPELHKTMEYDGRFIWSDIPIINDNFAILSRSDFRNIDVNDVFHLHAAIRRDTIYSEMFKRIFPAHRNFTEYDTMEDTWDALRKGEVDVIFASRRRLVIYTNYYELADFKLNLVFDHVFNSYFAYNKDAVILKSIVDKALRLVNVNNMANQWIYRTYDYRVKMAAAQRPWLIGSSVSFFIVLTLVTILLIKSRSSGKELEKLVALRTGALEFETSKLQSVLASIPDLMYTKDKDLRYTQCNHAYEKFMGASEEILLGKANSDGTWFPAEDVEKIQLTDEIVINENRIISHETRIHSPATGKEGFYETVKAPLIRDGKVVGIVSIIRDVTKRKEMERDLSLQTSLFKTMLSSLPDAVFCKNLDFKYTLCNNYLADLVGKQNEDMLGKDDISALGLSAETAKISFENDLKVVNEQERVAYEEPIPCADGVTRLFETVKSPLILDGDVVGIMAIGRDITRRKEMEEEALAANRAKSSFLANMSHELRTPLNVVIGLTDLTLEEDLETNTKENLVKINNAGTTLLSIVNDILDFSKIESGKLTLSPVEYYLSSLINDIITLVLTRLGEKPIKFKLNIKDDLPNKLLGDDLRVKQILTNLLTNAIKYTREGSIELIIRSTKINDKVWLDAAVCDTGLGIPEEDISSLFLDFYQGFLKRHPQHRGHGVGTSDYQKAC

SEQ ID NO: 63167 - DNA, 1014 bp, Unknown
  Obtained from environmental sample
  misc_feature (1)..(1014): n is a, c, g, or t
atgccgccgtctgcgataccggtttgggcatcccggaagaagacatctcaagcctgttccttgatttctatcagggtttcctcaaacgccacccgcaacatagagggcacggggttgggacttccgattaccaaaaagcttgttgaaatgatggacggggaaataggagtcgccagcgaatggggcaaaggctcgactttcagtttccgcataaagcagggttatgtggacgatacggtactgggagcggaagtttcggaaaaactccgcaccttcagcttctccgatgacaaacgcattatatccaaaaaacttataagggtgaatttaagctacatccgggtgcttgtcgtggacgacatgcagaccaacctggacgtcgccgccggaatcttgcgcaaataccagatgcaggtagatgtattaaccaacggacccgccgcgattgacaggatacgctccgggaccccggtctacgatctggtgtttatggaccacatgatgcccggaatggacggcatagaaacggcggacaatatccgcgctttagacacggaatacgccaaaaaactgccgattatagcccttacggcaaacgccatacagggaaccgaaaaaatattcttcgagcacggtttccaggcgtttgtgaccaaacccatagacgttatagagatggacaatgtattgcggaaatgggtgtatgatcccaaacgggaaggtactgttatttccaacgcgccttccgtggttgatgatgaaaaattgaataacataaaaatagagataccgggggtggacgtgaaaaaagccctttccctgtactcgggcgaagtcagtatttatctgcccctcttacgctcatacatcaccaacacgccggaaactttggagaaacttaaaattgtatcggcggaaaatttgcaaagctatgttatttccgtacacggggttaaagggaacgagcgccggcatcggagcggaacagatacgctctcaggctttggaacttga

SEQ ID NO: 63168 - protein, 337 aa, Unknown
  Obtained from environmental sample
  DOMAIN (5)...(74): Histidine kinase-, DNA gyrase B-, and HSP90-like ATPase
  misc_feature (1)..(337): Xaa is any amino acid
MPPSAIPVWASRKKTSQACSLISIRVSSNATRNIEGTGLGLPITKKLVEMMDGEIGVASEWGKGSTFSFRIKQGYVDDTVLGAEVSEKLRTFSFSDDKRIISKKLIRVNLSYIRVLVVDDMQTNLDVAAGILRKYQMQVDVLTNGPAAIDRIRSGTPVYDLVFMDHMMPGMDGIETADNIRALDTEYAKKLPIIALTANAIQGTEKIFFEHGFQAFVTKPIDVIEMDNVLRKWVYDPKREGTVISNAPSVVDDEKLNNIKIEIPGVDVKKALSLYSGEVSIYLPLLRSYITNTPETLEKLKIVSAENLQSYVISVHGVKGNERRHRSGTDTLSGFGT

SEQ ID NO: 63169 - DNA, 372 bp, Unknown
  Obtained from environmental sample
  misc_feature (1)..(372): n is a, c, g, or t
atggctgataaaaagaaaatagtcgcggtggacgataaccctgaaaaccttggggttctcaaaaacacattaaaagaaaagtacactatatttcccgttccttccgcggcggatatgtttgaactgttgagtcatataaaacccgatttaatccttttggacgttgaaatgcccgaaatgaacgggcatgaagcggcgaanaaattgaaaggcgacgacaacttaaaaacgatcccctttttattcctgacttccagagatgacgaggcaagtataaagaaaggtctggatttgggcgcagttgattatataccgaaacccattgtcgcccctgttctgcttgagcggatcgagaagcatttatcatcctga

SEQ ID NO: 63170 - protein, 123 aa, Unknown
  Obtained from environmental sample
  DOMAIN (5)...(118): Response regulator receiver domain
  misc_feature (1)..(123): Xaa is any amino acid
MADKKKIVAVDDNPENLGVLKNTLKEKYTIFPVPSAADMFELLSHIKPDLILLDVEMPEMNGHEAAXKLKGDDNLKTIPFLFLTSRDDEASIKKGLDLGAVDYIPKPIVAPVLLERIEKHLSS

SEQ ID NO: 63171 - DNA, 786 bp, Unknown
  Obtained from environmental sample
  misc_feature (1)..(786): n is a, c, g, or t
ttgattatataccgaaacccattgtcgcccctgttctgcttgagcggatcgagaagcatttatcatcctgaccacttacaagcggtcaggcaagaatataggagaaatggtgaaacagtttcaccgtttcaccgtaaatttggaggatataagattatggcaggagatcgaaaaaaaatcatcgtagtagatgataacccggaaaatctgaatgttctgaagaataccatgaaagaattatacatggtatatccctgtccctcggcggcggaaatgttcgagcttttggaacatgtaacccccgaattaatccttttggacgtggaaatgcccgagatgaacgggtatgaagccatacaaaaacttaaagccggcaaggacaaggatatacccgttatgttcattacctcaatgacggacgcgaaaagcgaactggaaggcttaagctacggagccgttgactatatcaggaagccctttgtcgcgcccctgctgctccagcgtataaaaacccagatttcaattgtggaacatcagatggaaatcaagcatctgcttgatttaaaaacagaagaagttaaaatgcgcttaaaggcggaacaagacgcggaaaatgcgtcccaagcaaagggcgacttcctttcccacatgagccatgaaatacgttccccgttaaacgccgttatcggaatgataaatatagcgaacgaggaaaaaaccgtagacggcataaaagtttatcttaaaaagcgggaacgcggcaaagcatgttcttggcgttattaa

SEQ ID NO: 63172 - protein, 261 aa, Unknown
  Obtained from environmental sample
  DOMAIN (58)...(170): Response regulator receiver domain
  misc_feature (1)..(261): Xaa is any amino acid
MIIYRNPLSPLFCLSGSRSIYHPDHLQAVRQEYRRNGETVSPFHRKFGGYKIMAGDRKKIIVVDDNPENLNVLKNTMKELYMVYPCPSAAEMFELLEHVTPELILLDVEMPEMNGYEAIQKLKAGKDKDIPVMFITSMTDAKSELEGLSYGAVDYIRKPFVAPLLLQRIKTQISIVEHQMEIKHLLDLKTEEVKMRLKAEQDAENASQAKGDFLSHMSHEIRSPLNAVIGMINIANEEKTVDGIKVYLKKRERGKACSWRY

SEQ ID NO: 63173 - DNA, 1422 bp, Unknown
  Obtained from environmental sample
  misc_feature (1)..(1422): n is a, c, g, or t
atgaaagagcctattgaagacgagtctgtattcctacggattgaggaatttaagaaggggctaatccagtttacggacagcactaacgccatgcgtcttgtcaaagagcatggccgggatattcgctacaatgccgcatggcgaaaatgggtagtgtggaacggcaagtattgggagatggacgagggcggcgttttaatccacgaaaaagggcttgaaatggtgcggaatatctatgacgagctaaagaaaaccgccgactacagggaacggatagacatagaaaaagcggcaatgatgagcgagagcgtgaggcggcgaaaggcttttgtagaggcggcgacatggatttccgctttaaggactaaaacagacgagctagactgccatccctggctgttgaatgtgaagaatgggactatagatattttaagcggcgaattcagggagcataggcaagaggacatgattaccaagattgccaatgtggaatatgacccgaaagcagactgcccgatgtggaagaaatttgtccgtgaaattatggactacaaaacggatataataaaatttgtccagactgcggcggggtggtctttgtccggagatatatcggagcaaacgatgtttattctgtacggtactggcgcaaacggtaagtccacttttttgaatacgataatgtacctgctgggcgattatgcaaccgcaacgcctacggaaacattcatgaaaaaagcgggagacaattattccaatgacgttgcccgtctgcggggcacacggtttgtaaccactacggaagttgagcagggaaggcggctttcagagcctttgataaaaaagataacgggcaatgacgaaatgacggcaaggtttttgcatggggagttttttaacttcaagcctactttcaagattttcatggcgaccaaccacaagcctgtcattaaaggcactgattacggaatatggcggcggataaagctaatacctttcaccgaaaggataccggaagaaaagcaagacaagcatttggagttgaaactgcgggaagaagcaagcggaattcttaactggctgttggaagggatagagaactggaaacaggaaaaattaagaacgtcgaaggctgtattgttcgctactgacgaatacagggggaaaatggacgttatcgggaattttattaaagaaaaatgtgagcaaaaacaggatgtggcgatagcgattaaaaagctatacaaggcatactctgattggtgcgaagaaaacaacgaacaccctgtaagcgaaaggttttttaccttgcggcttaaagagatgggttttgagcagggcaggacttcaacggaaaggttttgggtggggattgggctattggaatattccgttatttgcggttgcttttattactcataa

SEQ ID NO: 63174 - protein, 473 aa, Unknown
  Obtained from environmental sample
  DOMAIN (134)...(445): Poxvirus D5 protein-like
  misc_feature (1)..(473): Xaa is any amino acid
MKEPIEDESVFLRIEEFKKGLIQFTDSTNAMRLVKEHGRDIRYNAAWRKWVVWNGKYWEMDEGGVLIHEKGLEMVRNIYDELKKTADYRERIDIEKAAMMSESVRRRKAFVEAATWISALRTKTDELDCHPWLLNVKNGTIDILSGEFREHRQEDMITKIANVEYDPKADCPMWKKFVREIMDYKTDIIKFVQTAAGWSLSGDISEQTMFILYGTGANGKSTFLNTIMYLLGDYATATPTETFMKKAGDNYSNDVARLRGTRFVTTTEVEQGRRLSEPLIKKITGNDEMTARFLHGEFFNFKPTFKIFMATNHKPVIKGTDYGIWRRIKLIPFTERIPEEKQDKHLELKLREEASGILNWLLEGIENWKQEKLRTSKAVLFATDEYRGKMDVIGNFIKEKCEQKQDVAIAIKKLYKAYSDWCEENNEHPVSERFFTLRLKEMGFEQGRTSTERFWVGIGLLEYSVICGCFYYS

SEQ ID NO: 63175 - DNA, 882 bp, Unknown
  Obtained from environmental sample
  misc_feature (1)..(882): n is a, c, g, or t
atgatagaatctcaagccaaagccgccgattccgctctggcgacagtggagcaaacccgttcaatcgcaaaaattattaaaaattccaccgatgatatattcctttcgtcaaaagaaatttttattaacgcaaacaatcaggcggcaagcgttcatgaaattgaaagcacaattaaagaaaacacccaaatagccggtgatatttccgaaaaaacatccaatgtatcgaatattgccaacaaaatggaaaatgacgttattcacggattttcagttctggaacacaatattaaccagcttgaagatattaagaaaaagaatgacagcgtaattacaagcattataaaccttggaaacaagatattaaaaatacgcgatattgtaaaaaatattaatacaataacggatcaaacaaaagttatagcgttcaatgcggggttggaagccgcaagcgccggagaacacggcaagcgttttgccgttgtagcaaacgaagtaaaccgtcttgcggacgatgtcgcttctcttaccatgcaaatcaaagaacaagttgaggaaattcaagattcttcatcatcgttgataatttccagcgaagaaagcacggataaaatcagggaaggcaataaccttatcaaggaacttgacgatattttccgtgaaattcgttcgggggcggaaataacggctaatcaggcgcaaactatcacattatcaactcagaagcagttaaaatcaacagagcaaattaatgtggcaataactgatatttcaaagggactgtcaaattttattcaatcaaccagaaaggcgtcttcttccgctgaagaacttacagaaataattcatgaactagacgttattttaacgggacaactatga

SEQ ID NO: 63176 - protein, 293 aa, Unknown
  Obtained from environmental sample
  DOMAIN (31)...(288): Methyl-accepting chemotaxis protein (MCP) signaling domain
  misc_feature (1)..(293): Xaa is any amino acid
MIESQAKAADSALATVEQTRSIAKIIKNSTDDIFLSSKEIFINANNQAASVHEIESTIKENTQIAGDISEKTSNVSNIANKMENDVIHGFSVLEHNINQLEDIKKKNDSVITSIINLGNKILKIRDIVKNINTITDQTKVIAFNAGLEAASAGEHGKRFAVVANEVNRLADDVASLTMQIKEQVEEIQDSSSSLIISSEESTDKIREGNNLIKELDDIFREIRSGAEITANQAQTITLSTQKQLKSTEQINVAITDISKGLSNFIQSTRKASSSAEELTEIIHELDVILTGQL

SEQ ID NO: 63177 - DNA, 813 bp, Unknown
  Obtained from environmental sample
  misc_feature (1)..(813): n is a, c, g, or t
atggatataagaccgattttatttattgattcaggtattggcggactcccctactgcaaagattttttaaaacgcaacaagggggaagaaatctgctatcttgcggacagggctaattttccctacggacagcgcaaaaaagacgagctttcttctatattaatcggattaatagaaaaacttttaaaagcggcagacccaaagataattgtacttgcctgtaactccgctacagtttcctccatagaacatttaagacagcattttcccaacattccctttgtcgggacagtaccagcgataaagcccgcggctaacgcttccaagagcggaaaagtaggcgttcttggcacggcgcggacaatcgaagacccgtacaatcaaaaccttgccgatgaatgtgagaaaaagtgcgaaattataggcagagccgcgccggatttggttcaatttgtcgaggaacgttttgacacggctaacgaaaaagaaaagaaggaaattgtaagaaaatatatagagcttttttgcgccgaaggagcggatggtcttgtgcttgggtgtactcattttttatttttactcgatgaatttcaaagagaggcgagtccgcttataaagatattcagttctcttgacggggttacaaagagaattgagtacttgctggacgaaaattccggcgcgctgagagcggaaaaaagttttcagcctgttaacaggttagtgttgacgggagggagtcccgcggaagcttcatggaagaactgcgctaaagaaatgggctttgatctttatttattaaacgaactatga

SEQ ID NO: 63178 - protein, 270 aa, Unknown
  Obtained from environmental sample
  DOMAIN (5)...(223): Asp/Glu/Hydantoin racemase
  misc_feature (1)..(270): Xaa is any amino acid
MDIRPILFIDSGIGGLPYCKDFLKRNKGEEICYLADRANFPYGQRKKDELSSILIGLIEKLLKAADPKIIVLACNSATVSSIEHLRQHFPNIPFVGTVPAIKPAANASKSGKVGVLGTARTIEDPYNQNLADECEKKCEIIGRAAPDLVQFVEERFDTANEKEKKEIVRKYIELFCAEGADGLVLGCTHFLFLLDEFQREASPLIKIFSSLDGVTKRIEYLLDENSGALRAEKSFQPVNRLVLTGGSPAEASWKNCAKEMGFDLYLLNEL

SEQ ID NO: 63179 - DNA, 495 bp, Unknown
  Obtained from environmental sample
  misc_feature (1)..(495): n is a, c, g, or t
gtgagcgtgagcgtaccggtgccggtcttggctatactggccgatgttccggttatggcgccggatagagtcaaatttgtgttgtttaccgcgatgggaaccgccgtagtcccggaaagcgtgatcgcccccgtgatcgcgttgccggtggtggcggtgccttcgctgactatgccgccgcttgcccccgacacggtgatcgcgttggggagcgagatcccgccggaaaggtgcagattagccccggcggcaatgacggtcacggctccgccggtggttccgcccaaagcgcctgcgttagtcgctataagggtgccggcgctgatggttgtgccgccggtgtattcgttcgttccgctgagcgtgagctggcccttgccctctttggtcagagcgccgccggaaagcgcgctacttatggttgcgaccttaccggaatcgacaatcaccgccttggcggtgcctcggctgagcgtcccgccgcttatggtgtag

SEQ ID NO: 63180 - protein, 164 aa, Unknown
  Obtained from environmental sample
  misc_feature (1)..(164): Xaa is any amino acid
MSVSVPVPVLAILADVPVMAPDRVKFVLFTAMGTAVVPESVIAPVIALPVVAVPSLTMPPLAPDTVIALGSEIPPERCRLAPAAMTVTAPPVVPPKAPALVAIRVPALMVVPPVYSFVPLSVSWPLPSLVRAPPESALLMVATLPESTITALAVPRLSVPPLMV

SEQ ID NO: 63181 - DNA, 642 bp, Unknown
  Obtained from environmental sample
  misc_feature (1)..(642): n is a, c, g, or t
atgattcagcttgccgcctttttggggaacccgggctcaggatatgaacgaaacaggcacaacgcgggaaggatgcttgcaggggcccttcctttctacgcttctctttcatgggggaaaaagttcaaaggtttatacgcttcacgggaaaacagccgctttctgatgccggaaacatacatgaacctttcaggtgaatcagtttatgaagcggcgtcattttttaagcttaaaattgaggaaataatcgttgtccatgatgaacttgaactgccgcttggaacaatttcgttgaaattttcaggagggcttggtgggcacaacgggcttcgttcaatgaaaaaagttttcggaaacgcggatttttggcggcttcgtatcggcatcggccgccccgactcgcgcctgcccggagagggcggacatgcgggcaacggcgagggtgtatatgactgggtactgtccggcttttcggacgcggaacgggaaacgcttaatcccgcgcttgacgcaggggcggggcttttacagcagttgataacaaacgagcctgaacctttattgaatgaatggaagaaaaaaaacatatcgggggcttcgcctaaacgaaaaagcgatgagccttcggcggaggcggtatga

SEQ ID NO: 63182 - protein, 213 aa, Unknown
  Obtained from environmental sample
  DOMAIN (4)...(192): Peptidyl-tRNA hydrolase
  misc_feature (1)..(213): Xaa is any amino acid
MIQLAAFLGNPGSGYERNRHNAGRMLAGALPFYASLSWGKKFKGLYASRENSRFLMPETYMNLSGESVYEAASFFKLKIEEIIVVHDELELPLGTISLKFSGGLGGHNGLRSMKKVFGNADFWRLRIGIGRPDSRLPGEGGHAGNGEGVYDWVLSGFSDAERETLNPALDAGAGLLQQLITNEPEPLLNEWKKKNISGASPKRKSDEPSAEAV

SEQ ID NO: 63183 - DNA, 828 bp, Unknown
  Obtained from environmental sample
  misc_feature (1)..(828): n is a, c, g, or t
atgacaagcgatacaaccgtgagcgaatcatttaaggaactgtacgacatcatcataaagctgagaggaccgggcggctgtccgtgggatcaggagcagactccgaccacactgaggggagcgcttatcgaggaaacttacgaatgtcttgaggctatcgacgaaaatgatcctgatcatgtttgtgaagaattgggagatctgtttttgcttgtcaccatgatcgcctatatgcacgaacaggaaggcaagtttaccgtttccgacgcgctcaaaaaagtaagcgccaaattaatccgccgccatccccatgtgttcgcggacgtaaaagtcaaagacagcgcccaagtgcttgaaaactgggcggcgataaaagtgaatcaggagggccgcaagccgaaagattccgttctagacgaagtaaaaggcggtttccctcccatggaccgcgcctttaaactccagaaaaaagccgcaaaagttggctttgattggccggacgcgcaaggagttgttacaaaaataaaagaagaactgcaggaagtaaccgaagcggaaaacaatatagcgcgtaacggacaaacggaaaaaaaatcgcttcaagaagcggaactggaaaaagaactgggcgaccttttgttttcagtaatcaacctgtgccgttttcataaaatcgacccatcggcggcgcttcaccgcaccaacgtgaagttcactgaacgttttaaatatgtcgaatcaaagatgaaagaaacaggcaatgagatgaaaaaagaaaatctcgaaataatggacaaattctggaacgaagcaaaaaaccagaaatag

SEQ ID NO: 63184 - protein, 275 aa, Unknown
  Obtained from environmental sample
  DOMAIN (169)...(242): MazG nucleotide pyrophosphohydrolase domain
  misc_feature (1)..(275): Xaa is any amino acid
MTSDTTVSESFKELYDIIIKLRGPGGCPWDQEQTPTTLRGALIEETYECLEAIDENDPDHVCEELGDLFLLVTMIAYMHEQEGKFTVSDALKKVSAKLIRRHPHVFADVKVKDSAQVLENWAAIKVNQEGRKPKDSVLDEVKGGFPPMDRAFKLQKKAAKVGFDWPDAQGVVTKIKEELQEVTEAENNIARNGQTEKKSLQEAELEKELGDLLFSVINLCRFHKIDPSAALHRTNVKFTERFKYVESKMKETGNEMKKENLEIMDKFWNEAKNQK

SEQ ID NO: 63185 - DNA, 873 bp, Unknown
  Obtained from environmental sample
  misc_feature (1)..(873): n is a, c, g, or t
atgacgaattatccgccncacgacgcgcttgtaaaagtttatcagtcagttcacgccataaaatcgaacgcggtaattttggggctaaacgtcttcggaaacaaagttcataatctggaatcgaagattaaaaagttacgcgaacaggaaggcgaagtgccgtttgttgaaatgctgaacctgactgtagatatagaaaaaatatcgaatgaaagggaaggcttcaaagaaattctggacaaactccagtcttatgccggcggcggcggcggattagccggagtcggcggaacgggcggcgcgagacagaacgtaaaagttctggttgaatcccttacaaagaccacaacaagagtcgcggaagacatgggcaaaaaaataaaatttgccgcctccgaagtagacccggaagcattagataacagtccaaggcgcgttattaaagatattcttatgcagttaatccgcaactccgccgtacacggaattgaaactccggatgagcgcaagaagaggggcaagaacgagacaggcgttgtaaagctgtccattaaaatgtcggaagataaaaagcatgtccttgtaaaacttaccgatgacggaaacggccttgactacaagaagatcgccgtaaaagccgtacaaaagaagatgcttaagaaagaagaagctgtaaaaaaagacatgctgttaaaagtaatctttatgcccggcttcagcacagcggacacggaaaccgtccacggcggcaggggcataggtttaaatcttgtgcgcgacaggattaaagaagtaaacggcacaataaaaatcaaatccgaagacggcaaaggaacagtattccttatcacgcttcctgtgcagaagaaatag

SEQ ID NO: 63186 - protein, 290 aa, Unknown
  Obtained from environmental sample
  DOMAIN (146)...(288): Histidine kinase-, DNA gyrase B-, and HSP90-like ATPase
  misc_feature (1)..(290): Xaa is any amino acid
MTNYPPHDALVKVYQSVHAIKSNAVILGLNVFGNKVHNLESKIKKLREQEGEVPFVEMLNLTVDIEKISNEREGFKEILDKLQSYAGGGGGLAGVGGTGGARQNVKVLVESLTKTTTRVAEDMGKKIKFAASEVDPEALDNSPRRVIKDILMQLIRNSAVHGIETPDERKKRGKNETGVVKLSIKMSEDKKHVLVKLTDDGNGLDYKKIAVKAVQKKMLKKEEAVKKDMLLKVIFMPGFSTADTETVHGGRGIGLNLVRDRIKEVNGTIKIKSEDGKGTVFLITLPVQKK

SEQ ID NO: 63187 - DNA, 1665 bp, Unknown
  Obtained from environmental sample
  misc_feature (1)..(1665): n is a, c, g, or t
atggccgaggtgatcaagatcggcggcagaaacgcatacgtgcaggtgtttgaaagtacgcgcgggctctacgtcgggtgtacggcggagtttgccgggcacatgcttgaggtgacgctcggccccggtatgcttaaaaggaactacgacggtctgcaaaacgacctcgacgccatggagggggtcttcctcaagcgcggcgactataccaagccgctcgacgaggccaagaagtggcatttcacgcccctcgctaaggccggcgacaccgtccgcgcatccgactggctcggcaatgtgaaggaggggtggatagaccacaagatcatggtgccgttcaacatgagcggcagctacacgatcaagagcgtcgtctccgagggcgattacaatattaaggagaccatagcggttctctccgacggctctaaagattataacgtgaccatggctatgaagtggccggtgaaggtggaggtgggcggttacaagaacaagccgcgcccgttcaaggtcatggcgacgggcgtccgtactatagacacgctcaacccgatcaccgaaggcggtactgggttcatcccggggcctttcggttgcggcaagacggttatgcagcacgccctttccaaatacgccgaagccgacctgattatagtcgtggcttgcggcgagcgcgccaacgaggttgtggaaatcttcaccgagttcccggaactcgacgacccgcgcacaggccgcaaactcattgagcgtatgattattatatgcaatacatccaacatgcccgtcgcggcccgcgaggccagcgtttacacgggtatgactatcgccgaatactaccgtatgatgggcctcaaggttctgcttttggccgactcgacctcccgctgggcgcaggcgcttcgcgagatgtccaaccgtatggaggagctgcccggccccgacgcgttccctatggacttgccggcggttatctcgcagttctactcccgcgccggattcgtctacctgaacaacggcaatacgggctccatcaccttcatagggacggtcagccccgccggcggtaacttgaaagagccggtcaccgagtccacgaagaaggcggcgcgctgcttctacgcgctcggtcagggacgcgccgactctaagcgctatccggcggtcgatcctattgacagctattcgaagtaccttgagtacgacgaggtgatcgagtacctcgacaaggaaatagagccgggttgggtgaaaaaggtcgaagttctcaagaatacgctgttgcgcggcaaggaagcccgcgaccagatcaacatcttgggcgacgacggcgtgccgctcgactaccatataatcttcaacaagtctgaggtcatcgacttcgtgattttgcagcaggacgctttcgacaaaatcgactcgtgttcgccgctcaaccgccagcagtatatggtcaacaaggtgctgggcatcgttgacgcgaagtttaacttcgagggttttgaggagataggcaattactttaagaaggcgattaacttgatgcgccagatgaactatctggagtttcagagcgataaatttaacggactcgaaaaagaactcgacagcctgttggctgagcgggtatcggaacccaaggccggcgcggcgcacgcgtag

SEQ ID NO: 63188 - protein, 554 aa, Unknown
  Obtained from environmental sample
  DOMAIN (175)...(397): ATP synthase alpha/beta family, nucleotide-binding domain
  misc_feature (1)..(554): Xaa is any amino acid
MAEVIKIGGRNAYVQVFESTRGLYVGCTAEFAGHMLEVTLGPGMLKRNYDGLQNDLDAMEGVFLKRGDYTKPLDEAKKWHFTPLAKAGDTVRASDWLGNVKEGWIDHKIMVPFNMSGSYTIKSVVSEGDYNIKETIAVLSDGSKDYNVTMAMKWPVKVEVGGYKNKPRPFKVMATGVRTIDTLNPITEGGTGFIPGPFGCGKTVMQHALSKYAEADLIIVVACGERANEVVEIFTEFPELDDPRTGRKLIERMIIICNTSNMPVAAREASVYTGMTIAEYYRMMGLKVLLLADSTSRWAQALREMSNRMEELPGPDAFPMDLPAVISQFYSRAGFVYLNNGNTGSITFIGTVSPAGGNLKEPVTESTKKAARCFYALGQGRADSKRYPAVDPIDSYSKYLEYDEVIEYLDKEIEPGWVKKVEVLKNTLLRGKEARDQINILGDDGVPLDYHIIFNKSEVIDFVILQQDAFDKIDSCSPLNRQQYMVNKVLGIVDAKFNFEGFEEIGNYFKKAINLMRQMNYLEFQSDKFNGLEKELDSLLAERVSEPKAGAAHA

SEQ ID NO: 63189 - DNA, 300 bp, Unknown
  Obtained from environmental sample
  misc_feature (1)..(300): n is a, c, g, or t
atgttggatgtattgcatataataatcatacgctcaatgagtttgcggcctgtgcgcgggtcgtcgagttccgggaactcggtgaagatttccacaacctcgttggcgcgctcgccgcaagccacgactataatcaggtcggcttcggcgtatttggaaagggcgtgctgcataaccgtcttgccgcaaccgaaaggccccgggatgaacccagtaccgccttcggtgatcgggttgagcgtgtctatagtacggacgcccgtcgccatgaccttgaacgggcgcggcttgttcttgtaa

SEQ ID NO: 63190 - protein, 99 aa, Unknown
  Obtained from environmental sample
  misc_feature (1)..(99): Xaa is any amino acid
MLDVLHIIIIRSMSLRPVRGSSSSGNSVKISTTSLARSPQATTIIRSASAYLERACCITVLPQPKGPGMNPVPPSVIGLSVSIVRTPVAMTLNGRGLFL

SEQ ID NO: 63191 - DNA, 1296 bp, Unknown
  Obtained from environmental sample
  misc_feature (1)..(1296): n is a, c, g, or t
atgaatacaaaagcgtttcagaagatttacactcacatcgaaaacgtgaccaaggccacgtgcacggtgcacgccgacggtgtgaccaacgatgaaatggcgatggtggccgggcgtccggcgcaggtcgtgaagattgtaggcgaccgcgtgacgctccagatattccccggcacgcagggcatagccacgaacgccgaggtggtgttcctcggcaggccgcccgtcatcaaggtgtcggacgagctcaaggggcgcttcttcaacccctacggccagcctatcgacggcggcccggaggtcgagggcaaagagatagagatcggcggcccgtcggttaaccccgttcggcgcaaacagccctccgagctcatcgccaccggtatcgccggtatcgacctgaacaatacgctcgttacaggccagaagatcccgttcttcgccgactccgaccagccgtacaacgcggtcatggccgacgtggcgctcagagcgaaagccgacctcatcattcttggcggcatgggtatgtccaacgacgactacctgtactataggaagttgttcgaaaacgccggcgcgctcgaccgcatcaccgcgttcgtcaacacgaccgacaacccgccggtggagcgtctgctcgttcccgatatgtgcctgaccacggcggagcacttcgccgtagagcagaagatgaaggtgctggtgctgctcaccgacatgacgctgtacgccgacgcgctctccatcgtgtctaaccgtatggaccagattccctccaaagacagtatgcccggttcgctgtacagcgacttggcgaaaatatacgaaaaggccgcccagttcccggacggcggctcgatcacgatcatcgcggtcacgaccctctccggcggcgacatcacgcacgccatccccgacaatacggggtacatcaccgaggggcagttgtatttgcgccgcgataccgacgtgtcgaaggtcatcatcgacccgttccgcagcttgtcgcgtctgaagcagctcgttatcggcaagaagacgcggaaggatcacccgcaggttatgaactgcgccatccgactgttcgccgatgccgcgagcgctaagacgaagttggaaaacgggttcgatttgacggattacgacacgcggtcgttgcaattcgcgaaagagtattcgcgtgagttgctggcgatcgacatcaatatgaaatcgagcacatgcttgatacggcttggaagctgttcggcaagtactttacgcaggacgaggtgggtatcaagaaggagttga

SEQ ID NO: 63192 - protein, 431 aa, Unknown
  Obtained from environmental sample
  DOMAIN (127)...(337): ATP synthase alpha/beta family, nucleotide-binding domain
  misc_feature (1)..(431): Xaa is any amino acid
MNTKAFQKIYTHIENVTKATCTVHADGVTNDEMAMVAGRPAQVVKIVGDRVTLQIFPGTQGIATNAEVVFLGRPPVIKVSDELKGRFFNPYGQPIDGGPEVEGKEIEIGGPSVNPVRRKQPSELIATGIAGIDLNNTLVTGQKIPFFADSDQPYNAVMADVALRAKADLIILGGMGMSNDDYLYYRKLFENAGALDRITAFVNTTDNPPVERLLVPDMCLTTAEHFAVEQKMKVLVLLTDMTLYADALSIVSNRMDQIPSKDSMPGSLYSDLAKIYEKAAQFPDGGSITIIAVTTLSGGDITHAIPDNTGYITEGQLYLRRDTDVSKVIIDPFRSLSRLKQLVIGKKTRKDHPQVMNCAIRLFADAASAKTKLENGFDLTDYDTRSLQFAKEYSRELLAIDINMKSSTCLIRLGSCSASTLRRTRWVSRRS

SEQ ID NO: 63193 - DNA, 2109 bp, Unknown
  Obtained from environmental sample
  misc_feature (1)..(2109): n is a, c, g, or t
gtgcttttaccgcacttcagggacatgcccagttatgaggaaaaagtacacgccaacttctgcccgattacgcaggggcttccgtattatatagaaaaagctttccctgatgtcgataaaaaccgctggcttcctttggttgtaagtttcaagtacggcgagggaaaggcgttggaacttttccgcgaaatgacaaagcgtcttgacgttagcgaaagcgagacaaaagccgcttttgacaaagcgtgggcaaaacaacaggaatacttcagcgccgtgcaaaaaatgggggtagaggcgctggaagaggcgcgcaaggcaagccgtcctattatttgcaccttgggccgtccgtacaacgcgtttacaccggaagcgaatatgggtattccgcgtaaatttacgacgcgcggttactcgatcattccgtttgacattctgccgttccacgacgaggaaattttcccaaatatgtactggtattacggacagcaggacatgaaagcgtccgaactgcttaaaaaagaagaaaatatttacattgcgtttattacgaatttttcctgcgctcccgattcatttattctgcactatgttaaatggcttatggggcaaaaacctttccttgtgctggaactggattcgcattccgcggatgcgggaattgacacccgcgtggaggccttccttgacatcatagacggctaccgcgcgaagaaaaatgaaattgaggccgagcgttatgataacggctggcgttttgtttcggaaaaactgtcatccggcaaattcgatttacgcatagacaatgtaaagacgggcgagaaagttcccattgtaggcagtaagcgcgtaaaagttttgctctccaatatgggcaatattactaccgagtacatgggggcggctatacgggcgcttggcattaacgcgcgggcgttccctgtcgcgacaagcaagaccgttcaggttgcaagagcccacgcgtctggaaaagaatgtgtgccaagccatcttgttttaggaagcgcgctggaatttttcttcagcgataaataccgcaaggacgaactttatttgctgtttgtgccgataactacgggtccgtgcagaacaggtcagtattatgtgtactacgaaaacctcttccgcgatttacgacttgaaaatgtggtgatttttattttatcctcggacaattcatataccgaacttggttctgaattttcaaaacagatgtggattgggcttgtgttatctgactatctgaaggacattcagtgttcgctgaaggcgtgcgccgaagatcctgtaaaagccaatgaggaatatgaaaaatcgtggcgaaaggttatggacgccgtggaacataatcccaaaaaaatgtggaaggtattaaaagatgtcgcaagggatgtaaaaagaattccgttgaagaggaacgtccacgattgtccgcgcgttcttgtagtaggggagatttatgtgcgccgcgacgattttgccgtcggcgagctgatagaccttatgagcgagcgcggcattgttgtgaaagtcgcgggtataagcgaatggatacattatctggattatatgcgcgaatattctctaaacaaattgattaatctgcggccccgcggaaaaagaatgttctccgatccgtggaaaaaactcaaaattcttcaaattgaaaaatggtggaaacatcatatagagaaaaaaacgcttgctatattaaagccgacaaaactaataccggaaacgcctcacgatatgcgccatattatgtcatttacaagagagcactttgtaaaccttgaacttaattcagagatagcggtctcctccggctccgcggcggcggcgatggacgccggttattcgggcattgtaaacatcagcccgtttgcctgtcttatcgggcgcgtaattgagggcctgttcactccgtgggcgcgcgagcgcaattacccgattttatcggtggaagtagacggcaaccttctgccgccgaacatagtaaacaaactcaacatatttatggttaatgttctgcgctttaagggaggaagcgatctttcttctctggtggacggggcatcttcatga

SEQ ID NO: 63194 - protein, 702 aa, Unknown
  Obtained from environmental sample
  misc_feature (1)..(702): Xaa is any amino acid
MLLPHFRDMPSYEEKVHANFCPITQGLPYYIEKAFPDVDKNRWLPLVVSFKYGEGKALELFREMTKRLDVSESETKAAFDKAWAKQQEYFSAVQKMGVEALEEARKASRPIICTLGRPYNAFTPEANMGIPRKFTTRGYSIIPFDILPFHDEEIFPNMYWYYGQQDMKASELLKKEENIYIAFITNFSCAPDSFILHYVKWLMGQKPFLVLELDSHSADAGIDTRVEAFLDIIDGYRAKKNEIEAERYDNGWRFVSEKLSSGKFDLRIDNVKTGEKVPIVGSKRVKVLLSNMGNITTEYMGAAIRALGINARAFPVATSKTVQVARAHASGKECVPSHLVLGSALEFFFSDKYRKDELYLLFVPITTGPCRTGQYYVYYENLFRDLRLENVVIFILSSDNSYTELGSEFSKQMWIGLVLSDYLKDIQCSLKACAEDPVKANEEYEKSWRKVMDAVEHNPKKMWKVLKDVARDVKRIPLKRNVHDCPRVLVVGEIYVRRDDFAVGELIDLMSERGIVVKVAGISEWIHYLDYMREYSLNKLINLRPRGKRMFSDPWKKLKILQIEKWWKHHIEKKTLAILKPTKLIPETPHDMRHIMSFTREHFVNLELNSEIAVSSGSAAAAMDAGYSGIVNISPFACLIGRVIEGLFTPWARERNYPILSVEVDGNLLPPNIVNKLNIFMVNVLRFKGGSDLSSLVDGASS

SEQ ID NO: 63195 - DNA, 1587 bp, Unknown
  Obtained from environmental sample
  misc_feature (1)..(1587): n is a, c, g, or t
atggatatgactcttgacgacattgacagggtgcctgataccgcaaaggtatacccgctttccacgcgctgttccgtatttatgaaaagcgattgtacccaccgtcttaacaaacgcgaggcgacaaagaacgatattgtgctttcactctccgatgtcatggctgtaaaggttatcgacttcttaaaacgcgcgaaggtaacgtcgggcagggtagtgctctctggcggtataacgcttaacaggcacattatccgttttatccgcgaaaaagctccgcagattgaatttattattcccgagaccgccccggtgttcgaagcgcttggcgcttcaatccttgctttgcaatcggggagccgcctgcctcaggcgggtaagctgttaagacaaaacgatgtccgttttggcgtattgggcgcgttacgcgattggcagaacaaggtaaaattttttaataaaccggacggcaaagtacgatcggaccgttcttatatacttggagtagacggcggttctactacaaccaaagcatgtcttgtagatctaaaaaccgatgaaattgccgcgagtttttatgggcgtacccacggtgatcctgttaaagctcttaaagaatgtcttgcgaacattcaggaaaaagttattaacgatacaggcgggaagaatattgacatacgtcttgttgctacaacaggttcaagccgcgaaattttaggcgtttttctggaaactcccggcgtttataacgagatcatcgcccactcggtggggacaacttactttgacaaagaagtggaaactatttttgaaattggcggtcaggacgcgaagtatgttctgcttaaaaacggagtgccgattgattacgcgatgaacgaagcctgttccgcgggaaccggctcttttttggaagagtccgcctccggcgacctttcaattcacagcgcaaaggatataggccatattgcgttagatgcaaatgcgccgtgtaaattcggcgagcattgctctgcgtttatcaacagcgatatccgcaaggcggtacagcagggtgccggaagggaaaatattaccgcagggatcgtctgttccatagtggcaaattatcttaaccgcgttgtaggaaaccgcaccataggcgcgaaaatatttttgcagggcggggtcgccaagaatcctgcggttcctctcgcgtttgcgatgcttttggacaaggaaatccttgttcctccttcgccagaattaatggggtgttttggggtagctcttcttgcaaaacgaaaaaacgcagacggcctgcttgcggaaaagagcatagttatagacgacattattaaccgcgagatcggttacgagagggtttttaaatgccagtcttgcgaaaatttctgctcaattcaggtgttaaacgtaaacaacaacaagtatatgttcggcggacgctgtaacaaatataccaatatgcgcaaaaaggttgtggatgtgcctgtttttgattatgttgaaaaacggcagaagatgctgtttgatgaatatgccgctcctaanacttcgcctttcggtttttctaaaaatttctcgtag

SEQ ID NO: 63196 - protein, 528 aa, Unknown
  Obtained from environmental sample
  DOMAIN (167)...(426): BadF/BadG/BcrA/BcrD ATPase family
  misc_feature (1)..(528): Xaa is any amino acid
MDMTLDDIDRVPDTAKVYPLSTRCSVFMKSDCTHRLNKREATKNDIVLSLSDVMAVKVIDFLKRAKVTSGRVVLSGGITLNRHIIRFIREKAPQIEFIIPETAPVFEALGASILALQSGSRLPQAGKLLRQNDVRFGVLGALRDWQNKVKFFNKPDGKVRSDRSYILGVDGGSTTTKACLVDLKTDEIAASFYGRTHGDPVKALKECLANIQEKVINDTGGKNIDIRLVATTGSSREILGVFLETPGVYNEIIAHSVGTTYFDKEVETIFEIGGQDAKYVLLKNGVPIDYAMNEACSAGTGSFLEESASGDLSIHSAKDIGHIALDANAPCKFGEHCSAFINSDIRKAVQQGAGRENITAGIVCSIVANYLNRVVGNRTIGAKIFLQGGVAKNPAVPLAFAMLLDKEILVPPSPELMGCFGVALLAKRKNADGLLAEKSIVIDDIINREIGYERVFKCQSCENFCSIQVLNVNNNKYMFGGRCNKYTNMRKKVVDVPVFDYVEKRQKMLFDEYAAPXTSPFGFSKNFS

SEQ ID NO: 63197 - DNA, 906 bp, Unknown
  Obtained from environmental sample
  misc_feature (1)..(906): n is a, c, g, or t
atgcagactatacaggaactaaaaagtatattcggtaatacgtcggttggaatatcgcgcatggaaattcctcttttactttgttggcgtgatagtgattatgttgcattggcgaaactcattcaacatattcgtgcgcaatataattttactccaagtgaagatgttatttatgatcagtgtaaaataatgctaaatgtgataaatgcaaaaggtgagaatcgttttaaaaaatcaaatatattacatgaaatgccggatgaatttatacgaaaaatgcgtcttacaggacttatatcaattcgtggaaatggaagatttatagatattaatactttagaaacaacaaaaataaattatagtatagaacattatgcgttacagagcgctaattttgaaaccgcacgagaatattttgattacatgaaagaaatagatgtaaatcttgtatctatcgaaaccattcatgttattggcataagtgaacgagaaaaactttttcaaaaatgggtttcggagttttctcttgatatgttaaaaaacgagcttttaattgtttgtaatccacgtggaaattgtaagaatgagatactaaaatatatatccgaacctgttcgttttgaatttcttgtggcgctttctttggctaaagcatatcctaacttgaaagtacaagcaaattatgtaatagatgatgaaggattgcctacttcttttgcgccgggtggaaacgctgatatagtttgttatgatgatttgggtaatattttatttgaagttacattacttacaggaacaacacaaaatgcacgtgagatgcccgttatacatcggcatttggaagaaaaattaaaaccgtacctaatagttttagtattatgttatgtcctcgtgctccacagatag

SEQ ID NO: 63198 - protein, 301 aa, Unknown
  Obtained from environmental sample
  misc_feature (1)..(301): Xaa is any amino acid
MQTIQELKSIFGNTSVGISRMEIPLLLCWRDSDYVALAKLIQHIRAQYNFTPSEDVIYDQCKIMLNVINAKGENRFKKSNILHEMPDEFIRKMRLTGLISIRGNGRFIDINTLETTKINYSIEHYALQSANFETAREYFDYMKEIDVNLVSIETIHVIGISEREKLFQKWVSEFSLDMLKNELLIVCNPRGNCKNEILKYISEPVRFEFLVALSLAKAYPNLKVQANYVIDDEGLPTSFAPGGNADIVCYDDLGNILFEVTLLTGTTQNAREMPVIHRHLEEKLKPYLIVLVLCYVLVLHR

SEQ ID NO: 63199 - DNA, 564 bp, Unknown
  Obtained from environmental sample
  misc_feature (1)..(564): n is a, c, g, or t
gtgtataaaatggcacgaaagaaagaatataaaccgttattattaactacgacggttagaaatcctcgaagatataaattattacttagagttttatttgcctataatggcaaaattttagataacgatattattgataaagttgtttttgatctaatctcgcaaaaaatatatatacctatgtatataaaacacacagaacatcttaaaagtcaattaacagatgaagatacaaattttacaacagaagatacaaatgaaattatcgagaacagtcctcaacaacataaagaagctggttttgacgaaggctgggcatctcgttttgatacatggtataaattggcaaaagaattaggttttgtttattatgaaattaataaacctatagaattttctcaatcaggcattcaattgataaattctattgagcctgagtttgctcatttagaaaatcaaatttttcttaatgcttttgtaaaatacgagagaaataatatatataggcgagtcttaaatactaataaaccactaattcttttatgcagactatacaggaactaa

SEQ ID NO: 63200 - protein, 187 aa, Unknown
  Obtained from environmental sample
  misc_feature (1)..(187): Xaa is any amino acid
MYKMARKKEYKPLLLTTTVRNPRRYKLLLRVLFAYNGKILDNDIIDKVVFDLISQKIYIPMYIKHTEHLKSQLTDEDTNFTTEDTNEIIENSPQQHKEAGFDEGWASRFDTWYKLAKELGFVYYEINKPIEFSQSGIQLINSIEPEFAHLENQIFLNAFVKYERNNIYRRVLNTNKPLILLCRLYRN

SEQ ID NO: 63201 - DNA, 930 bp, Unknown
  Obtained from environmental sample
  misc_feature (1)..(930): n is a, c, g, or t
atggtaaaaaacgaatataacttaaaaaattctacggaagttcgacgttcgccatttttttatgtaggagataaatacaaacttgttccgcaattaaaggagaattttcccaaaacaatcaaacggtttatagaacctttttgtggcggtgggagtgtttttctaaatatagaagctgacgagtatctgctaaacgatattgataataacatgataatattacataaatattttaacgagcaaagcaaaaaaccggaatatttttgggatagcgtaagaaaaattattgaagattataatctttcggcaacttttttaaaacgtgatgtgccggaaattttgaaaaaagaatataaaaaaacttattttgcttgttataataaagaggcgtatactaaaatgcgttcggattataatcaagaaaaaacaaatatcatgcttctctatttattgcttatttatggttttaatagaatattgagattcaattcaaaaggcgaatttaatcttcctgttggtaatgttgattttaatattaaaacacaaaaagcaatcaatgattatttttcatttgttataaaaaaagaaattaaattttttagcgaagattttgaatattttttaaatcaactagaacttactcatgatgattttatatattttgatccaccatatttaattacattcagtgaatataataaattatggaacgaagatagtgaaattagattaattggtgttcttgataaactaaataatataggaatacgttttgcaatttcaaatgttttatggcatagagcacgatataacggtatatttaatgaatgggctcaaaaatataatataattcgaattaaaagtaattatattagttttaatgataatactgaaaaagatacttatgaggtactaataaaaaactattaa

SEQ ID NO: 63202 - protein, 309 aa, Unknown
  Obtained from environmental sample
  DOMAIN (21)...(292): D12 class N6 adenine-specific DNA methyltransferase
  misc_feature (1)..(309): Xaa is any amino acid
MVKNEYNLKNSTEVRRSPFFYVGDKYKLVPQLKENFPKTIKRFIEPFCGGGSVFLNIEADEYLLNDIDNNMIILHKYFNEQSKKPEYFWDSVRKIIEDYNLSATFLKRDVPEILKKEYKKTYFACYNKEAYTKMRSDYNQEKTNIMLLYLLLIYGFNRILRFNSKGEFNLPVGNVDFNIKTQKAINDYFSFVIKKEIKFFSEDFEYFLNQLELTHDDFIYFDPPYLITFSEYNKLWNEDSEIRLIGVLDKLNNIGIRFAISNVLWHRARYNGIFNEWAQKYNIIRIKSNYISFNDNTEKDTYEVLIKNY

SEQ ID NO: 63203 - DNA, 594 bp, Unknown
  Obtained from environmental sample
  misc_feature (1)..(594): n is a, c, g, or t
atgaatatctggttcgccacaaataacacccacaaaaaaaaagagcttgaagcagtgcttggaacaaaattacaaataccagccgaatacgcaattgcctttaaggcggaagagaccgcaatgactttccgcgaaaacgcccttataaaagcccgtgaattaaaaaaactcatcaataaaaacgagcctgtaatagcggacgactcgggactttgcgttgacgctcttgacggaagacccggcgtcttttcggcgcgttacggagaaacaaacggccgcaaacttacaagaggagagcaaaaccttcttcttcttgaagagatgaataatagccaaaaacgaagcgcgcgctttgtatgcgcgatggttcttctttttgactacgaccgcttttttatcgttcaggaaacccttgaaggcgaaattgtaaaaggcgcttgcttcgcaaagggagacggcggattcggctacgacccgatttttcttttacccgaatcagggcgcacgcttgccgagctttccgctgaagaaaaaaacaacataagccaccgaggaaaagcggggaaacagattgcggcgatattaggaaaataa

SEQ ID NO: 63204 - protein, 197 aa, Unknown
  Obtained from environmental sample
  DOMAIN (3)...(195): Ham1 family
  misc_feature (1)..(197): Xaa is any amino acid
MNIWFATNNTHKKKELEAVLGTKLQIPAEYAIAFKAEETAMTFRENALIKARELKKLINKNEPVIADDSGLCVDALDGRPGVFSARYGETNGRKLTRGEQNLLLLEEMNNSQKRSARFVCAMVLLFDYDRFFIVQETLEGEIVKGACFAKGDGGFGYDPIFLLPESGRTLAELSAEEKNNISHRGKAGKQIAAILGK

SEQ ID NO: 63205 - DNA, 2067 bp, Unknown
  Obtained from environmental sample
  misc_feature (1)..(2067): n is a, c, g, or t
ttgtcaaaacttaacattgaagcggaattaaacgagccgcagattcaggctgtgcgtttaactgaagggcccgtattgatcatagcgggggctggctcaggaaaaacccgcgttatcacataccgtatcgctcatatgcttgaaaagggaattccgcaatcggcgatactcgccctcacattcacaaacaaggccgcccgtgaaatggaaacaagggtcagggagcttacgggaaacaaactccaaagccttaccgtatgcaccttccacgctttcggtttgaaaataatcagggacgaagctgaactgcttgggtacagaaaaaacttttcagtctacgatgaaaccgacaagtttgcgctgataaaagaatcccttcgggaatgcaaactctattcgcccaagattgatatttacgcgcttggacagcatttttcaaaaattaaaacagggctcgctgactgggaaatctccgacatgaagcctgtttatgacgagtaccagcagggattgaaaatttacaacgctgtggattttgacgatctattaacaattcctcttgaactttttgaaaagaacgacgacatccttaaaaaataccgcaaaaagtaccgctacatcatggtggacgagtttcaggatacaagtgtcattcagtaccgtctgatgaagcttttggcgggaaaacaaaacgccaatgtctgcgtagtaggcgatgacgatcagtcgatttattcatggcggggagcgaattatgaaaatattttactgtttgaaaaagacttcccctcaagaaccgaaataaaacttgagcaaaattaccgctccacatccacgattcttgacgccgctaacggcgttatttcacataacacaggcaggaaggagaaaaacctttggtcgcatgaaaaaagcggcagacccgtagaaatcttccaccctgaaaacgagagcgaggaagccgattttattgccggacaaatcaggcatttaatgataacggaagattacaaataccatgacttcggagttcttacaagaacgaactcgcttgcgcgtaacatagaggaagcgtttcttgccgataacattccataccgtgtatcaggagggacaagtttcttccagcgtaaggaaattaaggacattatttcatatttgcgcgtaatcgcaaatcccgacgacgatgtaagcctcctgcggattattaacacgcctcgcaggggcataggaaaaactacaatcgcttcgttaagcgaaatagcgaaaaagaacaaatgcggtatctggagcgccctatcccgccttaattacgcgaaatctcagggacagcaggggctttttcaggaaaaaggagcggcgaccgagcttgaggagttttccgccatgatagaaaatttcaggctgcttatgcttgaacgaaagtcagaacccggcaggaagtggtccctttcccaatgcgtgcggatgttagtcgataatattgattactggagctaccttgttcttgaacacggaaaagatgaaaaaaaagcaaggtggaagtacggcaatatcgaatattttataaggatgattgaattttgggagaacgatcctgataaccttgacgcggggcttttcccttggcttaaccgtatcagtcttataacacgggacgaaggtgatgatgaaaacgaaggtaaggttaacctttctacaattcacgcggcaaaggggcttgaatacccggttgtttttattgccggcgcggaaaacggtctgctccctcacgaaaaaagcattgaaaagcctgataaaaatgaagaagaggatgaagccggcaacgttgaagaggagcggcggcttttctatgtagccataacgcgcgcaagggaaaaattgtacataacaagctgccgtcagcgccgccgtatgcaaaataccgttgactgcgaaccttcaccgtttctttcggaaattccgcaggagttgattaagtaccatgaaaaaacggaagaatcaaaaatggcagacgacgagcaggcggaaaaatttatttcgcagatgaaagctatgttcggctaa

SEQ ID NO: 63206 - protein, 688 aa, Unknown
  Obtained from environmental sample
  DOMAIN (10)...(477): UvrD/REP helicase
  misc_feature (1)..(688): Xaa is any amino acid
MSKLNIEAELNEPQIQAVRLTEGPVLIIAGAGSGKTRVITYRIAHMLEKGIPQSAILALTFTNKAAREMETRVRELTGNKLQSLTVCTFHAFGLKIIRDEAELLGYRKNFSVYDETDKFALIKESLRECKLYSPKIDIYALGQHFSKIKTGLADWEISDMKPVYDEYQQGLKIYNAVDFDDLLTIPLELFEKNDDILKKYRKKYRYIMVDEFQDTSVIQYRLMKLLAGKQNANVCVVGDDDQSIYSWRGANYENILLFEKDFPSRTEIKLEQNYRSTSTILDAANGVISHNTGRKEKNLWSHEKSGRPVEIFHPENESEEADFIAGQIRHLMITEDYKYHDFGVLTRTNSLARNIEEAFLADNIPYRVSGGTSFFQRKEIKDIISYLRVIANPDDDVSLLRIINTPRRGIGKTTIASLSEIAKKNKCGIWSALSRLNYAKSQGQQGLFQEKGAATELEEFSAMIENFRLLMLERKSEPGRKWSLSQCVRMLVDNIDYWSYLVLEHGKDEKKARWKYGNIEYFIRMIEFWENDPDNLDAGLFPWLNRISLITRDEGDDENEGKVNLSTIHAAKGLEYPVVFIAGAENGLLPHEKSIEKPDKNEEEDEAGNVEEERRLFYVAITRAREKLYITSCRQRRRMQNTVDCEPSPFLSEIPQELIKYHEKTEESKMADDEQAEKFISQMKAMFG

SEQ ID NO: 63207 - DNA, 345 bp, Unknown
  Obtained from environmental sample
  misc_feature (1)..(345): n is a, c, g, or t
gtggggcggggaatcgaacagtctttttgttttcttgtttattcggatgaatatacggaagacggaaaaacaagacttatgacaatgttaaaaagcagcgacggctttgtcattgcggaagaagaccttaaactccgcggaccgggacagattgccggaaccgaacagtcgggctaccttgcgctgggtctggcgaatccaatccgtgattttgaggaactccagcgcgccagaacagacgctttttcaatcttggaaagagaccccgatcttttactggaaaataaccgtgttatcgcaagagttttggaggaagcgccgccgtttgcgggcgttgcgctttag

SEQ ID NO: 63208 - protein, 114 aa, Unknown
  Obtained from environmental sample
  misc_feature (1)..(114): Xaa is any amino acid
MGRGIEQSFCFLVYSDEYTEDGKTRLMTMLKSSDGFVIAEEDLKLRGPGQIAGTEQSGYLALGLANPIRDFEELQRARTDAFSILERDPDLLLENNRVIARVLEEAPPFAGVAL

SEQ ID NO: 63209 - DNA, 663 bp, Unknown
  Obtained from environmental sample
  misc_feature (1)..(663): n is a, c, g, or t
gtgtatccccttgaaaaagaacgtgagtttgtcgcgctgcttagaaggggaaaaaaacaagaggcggaaaaactccttgatgaactgttatctgtgattatattctgcaatcaggatcatttcagatatattcaacttagagcgattgagctggcggtgcttattgcacgcatcggaacaaattcccttggcagcgccgggatggaaaataaagcccgctatataaaacaaatccaggacgcaaaaaccgttgaggaacttgcggcaatcctgcacagtatggtggaaaaaatagccgttcagatagttttgtttcagggcattccccacgcttcagccatgagaaaagcggagttttttatcaaagaaaattttacccgaaaaatcagcctgcatgaagtcgcgaaaatagccggtctttccgcgccctatttcagcactatttttaaagaggaaatgggcgaaaacctttccaaatatataaacaggcaaagggtgcagaaggccggcaggatgcttttggaaacagacctttccctgtccgatatatcaaacgcctgttgttttgaggatcaaagctggttctccaaaatattcaaaagctttaccggcatcagcccaagcaagtatcgcagtcagggcgggaaaatcaacatagcttga

SEQ ID NO: 63210 - protein, 220 aa, Unknown
  Obtained from environmental sample
  DOMAIN (116)...(162): Bacterial regulatory helix-turn-helix proteins, AraC family
  misc_feature (1)..(220): Xaa is any amino acid
MYPLEKEREFVALLRRGKKQEAEKLLDELLSVIIFCNQDHFRYIQLRAIELAVLIARIGTNSLGSAGMENKARYIKQIQDAKTVEELAAILHSMVEKIAVQIVLFQGIPHASAMRKAEFFIKENFTRKISLHEVAKIAGLSAPYFSTIFKEEMGENLSKYINRQRVQKAGRMLLETDLSLSDISNACCFEDQSWFSKIFKSFTGISPSKYRSQGGKINIA

SEQ ID NO: 63211 - DNA, 375 bp, Unknown
  Obtained from environmental sample
  misc_feature (1)..(375): n is a, c, g, or t
ttgataaaatactcgctttcgcctgaacggtacagccgccgttttatctccacttcgggcatatccagcggtaaaaggccggtctcgttggcaagggtaagcgttacctccgccacgttgagggccttgcgggtttccgtgccgttaaagataatgtcttccattttttccgcgcgcagggacttggacgcctgttcgcccagcacccatttaaccgcgtcaaccacgtttgattttccgcagccgttaggcccaagcagggcagtaatgccatcagcgaattcgacctcggtacggtcggcaaaagacttaaatcccaatatggaaaggtgttttagaaacaaagtgtactccacaagcttaatttatagttga

SEQ ID NO: 63212 - protein, 124 aa, Unknown
  Obtained from environmental sample
  misc_feature (1)..(124): Xaa is any amino acid
MIKYSLSPERYSRRFISTSGISSGKRPVSLARVSVTSATLRALRVSVPLKIMSSIFSARRDLDACSPSTHLTASTTFDFPQPLGPSRAVMPSANSTSVRSAKDLNPNMERCFRNKVYSTSLIYS

SEQ ID NO: 63213 - DNA, 1935 bp, Unknown
  Obtained from environmental sample
  misc_feature (1)..(1935): n is a, c, g, or t
gtggagtacactttgtttctaaaacacctttccatattgggatttaagtcttttgccgaccgtaccgaggtcgaattcgctgatggcattactgccctgcttgggcctaacggctgcggaaaatcaaacgtggttgacgcggttaaatgggtgctgggcgaacaggcgtccaagtccctgcgcgcggaaaaaatggaagacattatctttaacggcacggaaacccgcaaggccctcaacgtggcggaggtaacgcttacccttgccaacgagaccggccttttaccgctggatatgcccgaagtggagataaaacggcggctgtaccgttcaggcgaaagcgagtattttatcaattcccagttagtcaggctgaaggaattaagggagctgttttgggataccggcgtgggaaagacggcctactcggtaatggaacagggaaaaatcgaccaggtgctttcctcaaagccggatgaacggcgctacctgtttgaggaggccgccgggataacccgcttcaaggtgaggggcgcggaagtcgaacggaatctaaccaaaacaagcgagaatatgcaccaggtcgagctagttctgaacgaggtaaaacgctcctacgacacgctcaaagtccagtccgaaaagaccctgaaataccgcgccctccgcgatgaaatcttcaactgcgagctggatattcaactgctcagactaaagcatttcaagtatgaacgggacgaacgtaacgaaacgctcaggaggcgcaccgccgacagggatcgaatccgccagcaaatggaagaggaaagcaaggctcttgacgctcacatggacgaggtgaactccatggaggcgcggcttgtagagatgcagagaaacatctacggccttgccctggaaaaaaacgccaaagaaaacgaggcgcggcttttgggcgaacggcgcaacgaaggcaaaaccaagatagaacagagcgaagtaagggaaaaacagataaataacaagatagaagagctaaatgatgacgccgcggggcaagatgaagttgtgtctgaattgagacaaaagtctgcaagcattgaagataacatcaaatcctttgaggaaaacatccaacttgcctcaacccgcataagtgacaatgaaaaagccatacataaggccgaatccgagatacacggccttgaaaaagagcagtcccaatttgaagtacagttagcgcagataaccgatgacatcgtagcggagttggacgcggggctgaaaaaagcaggttactcggcttcggagcgccgcaatatagaagcggcccttaacgaaaccttgaacaggctgcgaacagtgcttacaggcaggggaacgcttatccgcgacctttccgccgcctcttccgttgaggctgccgagcttcagcgcattgccggaactctggcgacggaacttgccaacgccgcggcggacgcggaaaaagcccttaccctgtttgaaagctatcgaagccattcgcccctgttccttgacgagtttttggctccgcagggtatcatcaccaggaagcgggaactggacggaaaaatccggggcgcgaaagacggcatagaggaacgccgccaaaggataaaaaccctgcaagcagataatgcgtcgctggcggcgaagatcaacgaataccgcgccacgctggaggatctgcgggtaaacctcgccaggatgaacgctcanggcaaatccgccgaggagcaggccaaactgatacggcgggagcttaccgggcaggaagccatgctcaaaatatccgcgatgaattgcacgccgaccgcaagcggctggaggagacaaatgagcgcattgcagatacccattcagaaatcgccgaaattgagcaaaaaggaaaagcgcttaccgctgagcttgaaaagctggaaaaggatataa

SEQ ID NO: 63214 - protein, 644 aa, Unknown
  Obtained from environmental sample
  DOMAIN (6)...(542): RecF/RecN/SMC N terminal domain
  misc_feature (1)..(644): Xaa is any amino acid
MEYTLFLKHLSILGFKSFADRTEVEFADGITALLGPNGCGKSNVVDAVKWVLGEQASKSLRAEKMEDIIFNGTETRKALNVAEVTLTLANETGLLPLDMPEVEIKRRLYRSGESEYFINSQLVRLKELRELFWDTGVGKTAYSVMEQGKIDQVLSSKPDERRYLFEEAAGITRFKVRGAEVERNLTKTSENMHQVELVLNEVKRSYDTLKVQSEKTLKYRALRDEIFNCELDIQLLRLKHFKYERDERNETLRRRTADRDRIRQQMEEESKALDAHMDEVNSMEARLVEMQRNIYGLALEKNAKENEARLLGERRNEGKTKIEQSEVREKQINNKIEELNDDAAGQDEVVSELRQKSASIEDNIKSFEENIQLASTRISDNEKAIHKAESEIHGLEKEQSQFEVQLAQITDDIVAELDAGLKKAGYSASERRNIEAALNETLNRLRTVLTGRGTLIRDLSAASSVEAAELQRIAGTLATELANAAADAEKALTLFESYRSHSPLFLDEFLAPQGIITRKRELDGKIRGAKDGIEERRQRIKTLQADNASLAAKINEYRATLEDLRVNLARMNAXGKSAEEQAKLIRRELTGQEAMLKISAMNCTPTASGWRRQMSALQIPIQKSPKLSKKEKRLPLSLKSWKRI

SEQ ID NO: 63215 - DNA, 981 bp, Unknown
  Obtained from environmental sample
  misc_feature (1)..(981): n is a, c, g, or t
ttgcacgccgaccgcaagcggctggaggagacaaatgagcgcattgcagatacccattcagaaatcgccgaaattgagcaaaaaggaaaagcgcttaccgctgagcttgaaaagctggaaaaggatataaaaaagagatcaggtgatgttgcgggcaagcaggagatcatcaaaaagcgtactgcggaactcggcaaagtgcaggaagccctggataagattcatctggaactggtacagtccgaaacagaaatcaaaaacatccaggaaaatttccgcgagacccattcccgcgacctgatggaatttgaggagcgtgtttttaccataaccgcccacccggctgatctgcgggagaaacttgcacaggcgcgttcccaaatgaaagacctgggctcggtgaacctgatggccccggaagaatttgccgaaactaaagaacgctacgaatttttaagcagccagatggcggatgtcctaaaagcccgcaaagaccttgaggaccttaccacggagatacgcacggaatcttctgaattgttcatcaaaacatacaaccgcatcagaaagaattttcacaatatgttccgccgtctttttggcgggggcagggcggaactacagctttccgacaacaaccacgtgcttgaatcgggcatagaaattttcgcccagccgcccggcaaaaaactggaacatatctccctcctttcaggcggcgagcgttccatgaccgccgtggccctgctttttgccacatacatggttaaacccagccccttctgcctgttggacgaaattgacgccgcgctggacgaggccaacgtaggccgctttgtccagcttttacgtgagttcagcactaccagccagttcatcgttatcactcacaacaggaaaacagtagccggcgcgggaaccctccctcggcgttacaatggaagagtccggcgttacaaagatgatctccgtgcggcttga

SEQ ID NO: 63216 - protein, 326 aa, Unknown
  Obtained from environmental sample
  DOMAIN (6)...(320): RecF/RecN/SMC N terminal domain
  misc_feature (1)..(326): Xaa is any amino acid
MHADRKRLEETNERIADTHSEIAEIEQKGKALTAELEKLEKDIKKRSGDVAGKQEIIKKRTAELGKVQEALDKIHLELVQSETEIKNIQENFRETHSRDLMEFEERVFTITAHPADLREKLAQARSQMKDLGSVNLMAPEEFAETKERYEFLSSQMADVLKARKDLEDLTTEIRTESSELFIKTYNRIRKNFHNMFRRLFGGGRAELQLSDNNHVLESGIEIFAQPPGKKLEHISLLSGGERSMTAVALLFATYMVKPSPFCLLDEIDAALDEANVGRFVQLLREFSTTSQFIVITHNRKTVAGAGTLPRRYNGRVRRYKDDLRAA

SEQ ID NO: 63217 - DNA, 1185 bp, Unknown
  Obtained from environmental sample
  misc_feature (1)..(1185): n is a, c, g, or t
atgaaagaagaaaatgaagttctatcaacctatatgcaggcgaccggaagcaatgtgcaaatttttgactgtaactcccagccttgtgagctggaaggctcgttcagcattgaacaaaatatttgccgttattgcaagggcttttcctgcggcagtgataactgccacggcaactgccgggaaatgcatgcaaacaaaatccgggaaatcagccgaaacggcagatcgctaatttaccagtgcgatctgggattgatgttctggatcagcccgatatacgacgaaggaaaattttccggcgccctgcgcggttcgggttttctgaagggcggcaacgccggcccggccggcggggacggagtctcaattttagaaaaatatgatgacggatacaaggaaacggtttcaccggaagaatttaaacggcgtatccttgcttttccgccctgtgatgatgagaaaattaattccctctccgaaatgctgcacttgtgcgcggaaaacctgtcaacgggcaatgaaaactaccacgaaatgctcagccttcgttttgaacaacaagcctcgctttccgcccttattgacgatctaaaaacaaaatatcccaagggttccggctttccggtgtatcctcttgaaaaagaacgccagcttgtcgcgctgctccggaggggaaataaacaagaagcggaaaaactccttgatgaactgttgtccgtgattattttctgcaatcaggatcatttcaggtatattcagctcaggacgattgaactggcggtgctgctcgcccgcgtcggggcaaattccgtcggggggatggaaaacaagacccgctacatcaaacaaatccaggaggcaaaaaccgttgaagagcttgcgtcaatcctgcactgcatggtggaaaatatagtcgtccagatagttttgtttcagggcattccccacgccgccgccatgagaaaagcggaatcttttatcaaaacaaactttacccggaaaatcagcctgcgggaagtcgcgaaaatagccggcctttccgcgccctatttcagcactattttcaaagaggaaatgggggaaaacctttccaaatatattaacaggcagagggtggaaaaggccagcaggatgcttttggaaacggacatttccctgtccgaaatatcgaacgcctgtgtttga

SEQ ID NO: 63218 - protein, 394 aa, Unknown
  Obtained from environmental sample
  DOMAIN (322)...(368): Bacterial regulatory helix-turn-helix proteins, AraC family
  misc_feature (1)..(394): Xaa is any amino acid
MKEENEVLSTYMQATGSNVQIFDCNSQPCELEGSFSIEQNICRYCKGFSCGSDNCHGNCREMHANKIREISRNGRSLIYQCDLGLMFWISPIYDEGKFSGALRGSGFLKGGNAGPAGGDGVSILEKYDDGYKETVSPEEFKRRILAFPPCDDEKINSLSEMLHLCAENLSTGNENYHEMLSLRFEQQASLSALIDDLKTKYPKGSGFPVYPLEKERQLVALLRRGNKQEAEKLLDELLSVIIFCNQDHFRYIQLRTIELAVLLARVGANSVGGMENKTRYIKQIQEAKTVEELASILHCMVENIVVQIVLFQGIPHAAAMRKAESFIKTNFTRKISLREVAKIAGLSAPYFSTIFKEEMGENLSKYINRQRVEKASRMLLETDISLSEISNACV

SEQ ID NO: 63219 - DNA, 519 bp, Unknown
  Obtained from environmental sample
  misc_feature (1)..(519): n is a, c, g, or t
atgggcgcggtcaggatcaaggagggtgaaaaaaatattacttttatcggacggaatgatttatattatacaaaaattaggaggatgactatgtcccgtaattggttcgaagacgcgattttctaccacgtctatacattttcgctcgcccaagcgccgttccaaaacgactacgctttccaggggcacgcgctttcggagattgagcgttggctgccgcatatcaagcggctcggttgcgacgcggttctgttcagccccgtcctaaagtcgcgctcccacggttacgacgttaccgactatttcaacgtagacaaccgcgtgggtaccaacgacgagtttcgggcgcttgtccaagcgtttcacaagaagggcgtgcgggtggtgctcgacagcgtttttaaccactgcgggcgcgatttcttccgtttgaggagttgcgcaatggcaccgcggctacgccggatggttttcgggggtggatttcaatcgtcaaagcccgatgggcgatccgtttaa

SEQ ID NO: 63220 - protein, 172 aa, Unknown
  Obtained from environmental sample
  misc_feature (1)..(172): Xaa is any amino acid
MGAVRIKEGEKNITFIGRNDLYYTKIRRMTMSRNWFEDAIFYHVYTFSLAQAPFQNDYAFQGHALSEIERWLPHIKRLGCDAVLFSPVLKSRSHGYDVTDYFNVDNRVGTNDEFRALVQAFHKKGVRVVLDSVFNHCGRDFFRLRSCAMAPRLRRMVFGGGFQSSKPDGRSV

SEQ ID NO: 63221 - DNA, 939 bp, Unknown
  Obtained from environmental sample
  misc_feature (1)..(939): n is a, c, g, or t
gtggatttcaatcgtcaaagcccgatgggcgatccgtttaactatgacacttggagcgggtactacgaactgcccaagtttaacctgcaaaacggcgacgtgcgaaagcacctgctggacgcggctcggttttggattgagcagtttgatatagacggtatgcgtttggactcggccaacgtgctggacttcgggtttatgcgggagcttcgcggcgtaacaacctctatgaagcctgatttttggctcatgggagaggtcgtcggcggcgaatattcgagatgggtgaacgcggagacgttacacagcgttaccaattatatactctacaaaagtttgttctccagccacaacgacaataatctctatgaactggcgaacagcgtacagaattcaaaaccgtcaaacgggttgccgctatataattttttagacaaccatgaccaaccgcgcatagcaagcaacatcaaaaatcccgcgtttctgagcacgctctacgcgctgctgtttaccctgcccggccttccctccatatactacggcagcgagtggggcattcacggcgtgaaggacaaagggtcggatcaaccgttgcggccatacattgatatcaaaaaaccgccgaaagacgttcctgagtttgaaggctacatccgccgactcgccgacctaaggcgcaagcacgacgcgctgaagtacggcggctaccggcaggtttacctcgaataccgccgtccgtttatttttgagagattcgccgataacgagcgtatttttgtcgcggtcaatgtcggggacggcggcgacgccttaaacttgaacaaatatcacggcggcggcttcgcggatttattatccgacgagcggattccagcctccggcgcaagcgctataccgatagagcctcacagcgtacgtattattagagcggaggcctaa

SEQ ID NO: 63222 - protein, 312 aa, Unknown
  Obtained from environmental sample
  DOMAIN (2)...(225): Alpha amylase, catalytic domain
  misc_feature (1)..(312): Xaa is any amino acid
MDFNRQSPMGDPFNYDTWSGYYELPKFNLQNGDVRKHLLDAARFWIEQFDIDGMRLDSANVLDFGFMRELRGVTTSMKPDFWLMGEVVGGEYSRWVNAETLHSVTNYILYKSLFSSHNDNNLYELANSVQNSKPSNGLPLYNFLDNHDQPRIASNIKNPAFLSTLYALLFTLPGLPSIYYGSEWGIHGVKDKGSDQPLRPYIDIKKPPKDVPEFEGYIRRLADLRRKHDALKYGGYRQVYLEYRRPFIFERFADNERIFVAVNVGDGGDALNLNKYHGGGFADLLSDERIPASGASAIPIEPHSVRIIRAEA

SEQ ID NO: 63223 - DNA, 1122 bp, Unknown
  Obtained from environmental sample
  misc_feature (1)..(1122): n is a, c, g, or t
atggtcggtctgtccgcgttgctcgtnaccacgagcaagcagatgggggagtgcgtcaaggagtttgcccgtcttgggcttgacgtgccgattatcataggcggcgcggcggtcaacaaagatttcgcgtcacgcatatcaatacttgatgatggtaacaagtacgcccccggcgtatattacgcaaaggatgcttttggtgtggtgaagatattcgattcgttggtcggcggtaaggggatcgatactaatgttactaatgatgtcaacaaaggtattaataccgatagtcccgataatcagtccaacggcggcaaagcgaaatcatcatccaaaaaagacgctcccaagtcaacaacccgaaaagccgtaaagcacgactacataatggaacccccgttctacggcacaagcgagatactgacattcgacgcgtccgctctgcttgccggaatagaccgcgaaaaactcttcaagacccgcttcggcggcggcaaactcgacgcgtccgcctacgccgacgcgcggcggaacgagtttgaaccggcctttgagcgtctttccgccgacatcgtaaaaggttcgctcttagaggcgcgtggcttctacggcttccttccggttatagcggacggcgagacggtggttatcctcgacccatccgactaccacaccgagcgtctgtcgtacctcttcccgcgcatggagaggagcggcgtctctttggccgactacatccgtcctgagggcgacatagtctccccgcaagccgtaacgataggcgcgaagatcggcgaacttagccgcgaacttctcgtgaagcagagccgttacagcgacggttactacctaaacggtatatgcaactatttggtagaggatgttgcggacaaactgtccgctgaaatccgccgcgccctcggcctgccgcgtgacagcggtcggcgctacagtttcggctatccgggtatgccctcgcttgaggagcaagccggcctgctggagtttttgggtgcggaagagcgtctcggcataaccctgacgccggggttccaaatgcagccggagcactcgaccgttgcgatttttgtgcatcaccccgacgcggaatatatatcttaa

SEQ ID NO: 63224 - protein, 373 aa, Unknown
  Obtained from environmental sample
  DOMAIN (250)...(373): Vitamin B12 dependent methionine synthase, activation domain
  misc_feature (1)..(373): Xaa is any amino acid
MVGLSALLVTTSKQMGECVKEFARLGLDVPIIIGGAAVNKDFASRISILDDGNKYAPGVYYAKDAFGVVKIFDSLVGGKGIDTNVTNDVNKGINTDSPDNQSNGGKAKSSSKKDAPKSTTRKAVKHDYIMEPPFYGTSEILTFDASALLAGIDREKLFKTRFGGGKLDASAYADARRNEFEPAFERLSADIVKGSLLEARGFYGFLPVIADGETVVILDPSDYHTERLSYLFPRMERSGVSLADYIRPEGDIVSPQAVTIGAKIGELSRELLVKQSRYSDGYYLNGICNYLVEDVADKLSAEIRRALGLPRDSGRRYSFGYPGMPSLEEQAGLLEFLGAEERLGITLTPGFQMQPEHSTVAIFVHHPDAEYIS

SEQ ID NO: 63225 - DNA, 648 bp, Unknown
  Obtained from environmental sample
  misc_feature (1)..(648): n is a, c, g, or t
atggcacgagatcagagggataaccgaaatttagcggcggattgccttttcgggctttcacaggaagaaaaaaaagacggcagccccaaagtcctagacgcgttctcctatacaggctgcttcggaattcacgctgccagagccggagccgaatcggtggtctgcgtggatgtttccgcagccgccctggaaactgtcaaggtaaacgctgcccttaacggcgtgagtgacaggatcaaaacggtagaagccgatgtctttgaatatctcagggcagcggaacggagaaaagaacgctacgatctggtcattctggatcccccagctttcgcgaaaaccaggtcgtcgctggaaagcgcgatccggggctacaaagaaatcaacctccgggcaatttcgctactttcaaaaagtggtgtccttgtaacttcttcctgcagccaagcgatggacgaaaccaatttcaaaaagatgatcactgaagcggcaactgatgctggaaggcggcttgtcgaaacagactttcgccgccaatctgctgatcacccgattctggtgggctacgatgaatctttctatcttaaatgtgggttttatagggcgtgtcctgcccacgctgaacttgcagttttagacctgagcttataa

SEQ ID NO: 63226 - protein, 215 aa, Unknown
  Obtained from environmental sample
  DOMAIN (8)...(172): Conserved hypothetical protein 95
  misc_feature (1)..(215): Xaa is any amino acid
MARDQRDNRNLAADCLFGLSQEEKKDGSPKVLDAFSYTGCFGIHAARAGAESVVCVDVSAAALETVKVNAALNGVSDRIKTVEADVFEYLRAAERRKERYDLVILDPPAFAKTRSSLESAIRGYKEINLRAISLLSKSGVLVTSSCSQAMDETNFKKMITEAATDAGRRLVETDFRRQSADHPILVGYDESFYLKCGFYRACPAHAELAVLDLSL

SEQ ID NO: 63227 - DNA, 312 bp, Unknown
  Obtained from environmental sample
  misc_feature (1)..(312): n is a, c, g, or t
gtgggcaaaagaaaaaggtatactgccgaagaaaaaattaagattctcagagaggtacttgaggacgggaagtctataagccaggttgctgaacagtacggacttcacccgaataatatatttaactggcggaagcagctatttgagggaggagtacagaccttccagatacagagaccagatatctcaggcaaagccgaggaacggaaaataacggtgcttgaggacaaaatcaaacagaaggacgaagtaatagcggagcttgccgaagagcttttggccttaaaaaaaaagaactttggcctgaggtag

SEQ ID NO: 63228 - protein, 103 aa, Unknown
  Obtained from environmental sample
  DOMAIN (4)...(95): Transposase
  misc_feature (1)..(103): Xaa is any amino acid
MGKRKRYTAEEKIKILREVLEDGKSISQVAEQYGLHPNNIFNWRKQLFEGGVQTFQIQRPDISGKAEERKITVLEDKIKQKDEVIAELAEELLALKKKNFGLR

SEQ ID NO: 63229 - DNA, 957 bp, Unknown
  Obtained from environmental sample
  misc_feature (1)..(957): n is a, c, g, or t
gtgagccttgaagtacgccagacagccgagcgggaaatacaacgataccaggctaaaaccgggctgcccataaatacccttttgaagtatgcggggataccggaacggacatggtatgaatggtcagagcggtgcggggccgagacgaagcacaacaacaacatccccaaggcatattacttgacgccggaagaaatcaaggcgatagtcgcttattgcaccgacaaccccctgaaaggctaccggatgcagtgttgggaaatggtagaccaaaatgtggcgtttgtgtcctgtagcagcgtctataacgtcataaaacgccataatttggacaaaaaatgggcggaattggctgaagaggcgaagaaaggttttgaccagccgcgggcggttcacgagcagtggcacatagatttttcttacgtcaagatacaaaactcgttttattattttataggcatccttgacggctacagccggaaaatacttaactggaggctctgcaaaaacatggagggggttaacgccgagatactggttgccgaaaccaaggagatgtacccgcaagcggccagcccgcggctgataagcgacaacggcagccagttcatatcaaaagattttgaagagctgcttgctcttttggaattcgggcatacgcttacatccccgaaccacccgcagagcaacggaaagctggagcggttccaccgcaccttgaaaaccgaacacgtaaggaggtcatcgtatttagaataccaggacgcctgcataaggctggcaaaatggatcgcgtattacaactgcgagaggcttcacagcgcgatctggtacttaacgccgaatgacgtattccacggcaggacggcggtacggcttgcagagcgcaaagaaaagttgcatactgcatatatcaagagacaggaatactggcgtacacgtaacgccggttcctga

SEQ ID NO: 63230 - protein, 318 aa, Unknown
  Obtained from environmental sample
  DOMAIN (127)...(286): Integrase core domain
  misc_feature (1)..(318): Xaa is any amino acid
MSLEVRQTAEREIQRYQAKTGLPINTLLKYAGIPERTWYEWSERCGAETKHNNNIPKAYYLTPEEIKAIVAYCTDNPLKGYRMQCWEMVDQNVAFVSCSSVYNVIKRHNLDKKWAELAEEAKKGFDQPRAVHEQWHIDFSYVKIQNSFYYFIGILDGYSRKILNWRLCKNMEGVNAEILVAETKEMYPQAASPRLISDNGSQFISKDFEELLALLEFGHTLTSPNHPQSNGKLERFHRTLKTEHVRRSSYLEYQDACIRLAKWIAYYNCERLHSAIWYLTPNDVFHGRTAVRLAERKEKLHTAYIKRQEYWRTRNAGS

SEQ ID NO: 63231 - DNA, 894 bp, Unknown
  Obtained from environmental sample
  misc_feature (1)..(894): n is a, c, g, or t
gtgatagcggcgctgaaagacaagcttcccttgaccgctgctgccaaagcggcaggatcggcggcgattccatcaatcggatccggcatgggcgggcgggttacgttggcggacttggccgtctccccgctccccactcctcagtccccactcccatcggagggtacaattaccgaaactcccatcaagggtatacgcaaagttatttctgacaggatgcttaagtccctttcggaaagcgcccagtttaccattaacgcttccgcgccggctgcgaagcttcaggaattccgtataggggtgaaatctcagggcagccttgccgaggaactcggtctttcaaaaatcacgataaacgaccttatactttttgctgttgccagaactctcccgcgtttcccttatatgaacgcccataaaatcggggaaacgatcaaaacctttgagcgtgttcacctggctttcgccgtggacagcccaagggggcttatggtacccgttatacgaaacgccaatctgctttcgctggcgcggatttcctcggaggcaaaacggctggcaacggcctgtcagaacggtaccgttaacccggatgaactttcaggttcaactttttcggtgtccaatcttgggagttttggcgtcacaagcttcacgccggtgctaaatatgccggaagtagccgtccttggcgtttgcggcattgaactgaagccggttgctgtttcggcgggagattcaaacgcgggcaattgcgctgtccgctttgagccgcatatcggttttagcctgaccatcaaccaccaggtggtagacggcgctccggcggcccgtttccttaaggggctatgcgaggccgtggcgcatatagacctgcttttggcggcagggtag

SEQ ID NO: 63232 - protein, 297 aa, Unknown
  Obtained from environmental sample
  DOMAIN (54)...(295): 2-oxoacid dehydrogenases acyltransferase (catalytic domain)
  misc_feature (1)..(297): Xaa is any amino acid
MIAALKDKLPLTAAAKAAGSAAIPSIGSGMGGRVTLADLAVSPLPTPQSPLPSEGTITETPIKGIRKVISDRMLKSLSESAQFTINASAPAAKLQEFRIGVKSQGSLAEELGLSKITINDLILFAVARTLPRFPYMNAHKIGETIKTFERVHLAFAVDSPRGLMVPVIRNANLLSLARISSEAKRLATACQNGTVNPDELSGSTFSVSNLGSFGVTSFTPVLNMPEVAVLGVCGIELKPVAVSAGDSNAGNCAVRFEPHIGFSLTINHQVVDGAPAARFLKGLCEAVAHIDLLLAAG

SEQ ID NO: 63233 - DNA, 441 bp, Unknown
  Obtained from environmental sample
  misc_feature (1)..(441): n is a, c, g, or t
atggcgcggcgaagcaagggggcctgctccttgtccataaagggaacaatctcgtccatcatttcgattaccgttacttccgctcccagcgcggaaaaaagtccggcaaattccacgccgataaccccgccgccgataaccgtaagacgcctgggtacgctttcgacagccaaaagccccgtggaatccacaagcaggggattgtccttagcgcccggtatgggaggcagaacgagaacagaacccgtcgatatgaggatcgtctttccctcatgctcggcatttccgttaggcgtaacagatctgacctttgccagcttttcaccggaaggcgcgctgagtatctctcccctgccgtttatcacttccacgccgaatcttttcatctggctttcgatgccaccacggagtttagttatcacctcggctttccagctttga

SEQ ID NO: 63234 - protein, 146 aa, Unknown
  Obtained from environmental sample
  misc_feature (1)..(146): Xaa is any amino acid
MARRSKGACSLSIKGTISSIISITVTSAPSAEKSPANSTPITPPPITVRRLGTLSTAKSPVESTSRGLSLAPGMGGRTRTEPVDMRIVFPSCSAFPLGVTDLTFASFSPEGALSISPLPFITSTPNLFIWLSMPPRSLVITSAFQL

SEQ ID NO: 63235 - DNA, 735 bp, Unknown
  Obtained from environmental sample
  misc_feature (1)..(735): n is a, c, g, or t
atgcaacgagcaaggtgccaccgcaagtcctttcactatttacagcggtcttttgaacataagcgagcaagaggcaagggctttgaatatagtgaagataaatgttggatattgatttttttactactttttaacaaaatgttaggtgtttttgattcaggttttggcggtttaaccattctcaaagagttggtgaaggttctgcctaattacgattttgtgtatttgggagataatgccagagcaccttacggcagtcgcagttttgatagcatataccgctattcgcttcaagcggtgaattatctgttttccatcggctgcccccttattattttggcctgcaacacagcatctgcaaaagcacttcgcacaattcagcaaaaagatttgcaaaaaatagcccccaataatagggtgcttggcataatccgcccacttacagaagagataggcaaattcacagaaactaaatgcgtgggcattttaggcacggaagggacaatagcctcaaagagctatttattggaaatagcaaaattctggccggatttgcacatagagcaagaggcttgcccaatgctcgttcccttggtggaaaacgccctgctggaacaccccgccacagaggtatttgttagggaatatactcaaaaaattttggcaaaaaatccccaaatagacaccttagtccttgggtgcacccactaccccctgctccaggggattttttga

SEQ ID NO: 63236 - protein, 244 aa, Unknown
  Obtained from environmental sample
  DOMAIN (47)...(244): Asp/Glu/Hydantoin racemase
  misc_feature (1)..(244): Xaa is any amino acid
MQRARCHRKSFHYLQRSFEHKRARGKGFEYSEDKCWILIFLLLFNKMLGVFDSGFGGLTILKELVKVLPNYDFVYLGDNARAPYGSRSFDSIYRYSLQAVNYLFSIGCPLIILACNTASAKALRTIQQKDLQKIAPNNRVLGIIRPLTEEIGKFTETKCVGILGTEGTIASKSYLLEIAKFWPDLHIEQEACPMLVPLVENALLEHPATEVFVREYTQKILAKNPQIDTLVLGCTHYPLLQGIF

SEQ ID NO: 63237 - DNA, 705 bp, Unknown
  Obtained from environmental sample
  misc_feature (1)..(705): n is a, c, g, or t
atggaaaaaatcagaaccgacctcaactacagcgatacttggcttttggaagaaataaacccagacgaaaatttaccctgggacattatagatgcaggtataagcaaaaaatttttgcaaagagaatgggaaaaagcgcacaacccgaatgcggaacccgtgccaaattgcaaatggggcaaatgcgttgcctgcggaattccaggcaacggcaaagacaccattttgggcaaaattccacaaaaacacacaatcaccaccataaaggcaaccgtacataattgccactatccatacaaaatcattttccgcaaaaccaaaagcagccgttttttaccgcaccaaaacacattatcatttttcgaaagggcatttgtaaaactaggaattccaataaaattcagcgaaggatttagccccaaacctcgcatagcaaacacaggtgcattgccgctgggcttggaatctctttgcgaagttatttccattgagcttttggaaaagctggatttggagaataaaaaagcagagcttgtgaaaagcataaacgaaatttttccgcaaggtttggagattgtctcaatagagcctctgaaaataaagctatcggcacaggttcccaaatccacggactattgcatggcaggcgaatatccaagcgggttaggcaaaaaaaagagaaaaacgaactccctgtgtttttaa

SEQ ID NO: 63238 - protein, 234 aa, Unknown
  Obtained from environmental sample
  misc_feature (1)..(234): Xaa is any amino acid
MEKIRTDLNYSDTWLLEEINPDENLPWDIIDAGISKKFLQREWEKAHNPNAEPVPNCKWGKCVACGIPGNGKDTILGKIPQKHTITTIKATVHNCHYPYKIIFRKTKSSRFLPHQNTLSFFERAFVKLGIPIKFSEGFSPKPRIANTGALPLGLESLCEVISIELLEKLDLENKKAELVKSINEIFPQGLEIVSIEPLKIKLSAQVPKSTDYCMAGEYPSGLGKKKRKTNSLCF

SEQ ID NO: 63239 - DNA, 477 bp, Unknown
  Obtained from environmental sample
  misc_feature (1)..(477): n is a, c, g, or t
ttgccctcgcttagagttagcagttttggcagcagccttgcaaataaggtttatgaactcaaaggtgggcgtagcgcaacgcttgcacccgaaagcggctccgagcggctacgaaaattcataaacaaaaccataacaaatgcagatattgaaaccgcaactcaaagtgcgtttcaaaacggattcaacaaaataaaactatatataatggttggctttcccaccgaaacagaagaagacatacaagacttggtaaaactaacggaacgccttttggaaatagggcttgcttgcaacaaaaaatgccaaataaatttgagcgttggaatttttattccaaaagcctggactcctttgcaatgggcaccattcgtgaaaaaagaaaaagcaatagcgcacataaaaattttaagagacaaattttataagcataaaaacgtgaaagtttcgtggaattcctgggaaaccgcgcattag

SEQ ID NO: 63240 - protein, 158 aa, Unknown
  Obtained from environmental sample
  misc_feature (1)..(158): Xaa is any amino acid
MPSLRVSSFGSSLANKVYELKGGRSATLAPESGSERLRKFINKTITNADIETATQSAFQNGFNKIKLYIMVGFPTETEEDIQDLVKLTERLLEIGLACNKKCQINLSVGIFIPKAWTPLQWAPFVKKEKAIAHIKILRDKFYKHKNVKVSWNSWETAH

SEQ ID NO: 63241 - DNA, 972 bp, Unknown
  Obtained from environmental sample
  misc_feature (1)..(972): n is a, c, g, or t
ttgcggtttttcatatattgcaaggtaatatataaatttctaccttacactcatcaaatgcagctcttggaaaaactaggcaaaatcctgccctttgtggaaaatcctgcccgatatatggggggagaagctaatagcataataaaaaataaaagcgagattctggcgagcatggctctcatttttccagacctttatgaaattggaatgtcaaataacggaatgcgaattttatataacgctataaacaaagaagcaggtttgttttgcgaagtagcttttgcaccttggaacgatatggcaaaacttatgcaagaacataacattcccctttacacgcacgcctcttatagcgaggtaaaaagttttgatgctttggggataacagtacaaaccgaactcaatttcacgaatatcccatatattttggaactcgcaaacatcacggcttttgtcgcaaacagaaatgaaaatgaacccattgtgatagcgggcggcccagcaatggcaaaccctatgccaatagcagatttttttgactgcctctgcataggagacggcgaaattttggcacccaaagctctacgcataattggcgaggcaaaaaaagcaggtaaaaacaaagcggaagtcttggagcaaatagcaaaactggaaggcttttacgtgccggcaattcacaaagagataaaatccgttaaaagaacctatgttgaaaaactcgcaaaagaacttttcccgacaaaaaatttaatagcgaatatgccgcttgtgcacgaccgtttttgcgtggaagttatgcgaggctgcacccaaggttgccgtttttgccaagccggatattggtacagaccaactagggaattagatgcagacgatgttttagacattgccaaagaagggctaaaagccacccggcgaccgccactttgggcttttatcgcttccacccgcagattattcccctgttga

SEQ ID NO: 63242 - protein, 323 aa, Unknown
  Obtained from environmental sample
  misc_feature (1)..(323): Xaa is any amino acid
MRFFIYCKVIYKFLPYTHQMQLLEKLGKILPFVENPARYMGGEANSIIKNKSEILASMALIFPDLYEIGMSNNGMRILYNAINKEAGLFCEVAFAPWNDMAKLMQEHNIPLYTHASYSEVKSFDALGITVQTELNFTNIPYILELANITAFVANRNENEPIVIAGGPAMANPMPIADFFDCLCIGDGEILAPKALRIIGEAKKAGKNKAEVLEQIAKLEGFYVPAIHKEIKSVKRTYVEKLAKELFPTKNLIANMPLVHDRFCVEVMRGCTQGCRFCQAGYWYRPTRELDADDVLDIAKEGLKATRRPPLWAFIASTRRLFPC

SEQ ID NO: 63243 - DNA, 2511 bp, Unknown
  Obtained from environmental sample
  misc_feature (1)..(2511): n is a, c, g, or t
atggcgagtctcacgcgggcgttgcagagggtgttcaacatagtcggcaatcagaggcttacggcgtatgtttggataagcgagtcggggacgtacacgctcgcgccggggaacggcgtcggttaccagtggcgcgtcaagcggttttacatcaccgcgccgcaaaactacagtccgccgaattggacaaacgggcgcgggagcgtttcgctttcgcagggattgcacgaagttgagatagcgcccggcgacaacaaggggggcgcggagttttcgttcggcggcggctctagctggaagaagtcgccggagcagcaaaacgagaggggccgttccaaagtgacgcttgggccgtttgatctcaagaaaaaccgcttgtaccgtttctacttcaacgcgataccgttggagctggcctccgtaattgtggataagtacccgccgccggtaaaggagaacgtctcggatgtgtacctgacgggcgccgccgccgacaaagcggactcggcgtcgtcgaagacgtcgcagacgttggagcttgcgatgggcgttccgcgctacgtaactcttaacaaacgcggctcggcggactacaggttcaagataaaggaattgggtatctacaggatggagacgacaggccgtttgcatactaagctgacgttgcgcgaccgtttcggcgggttgagcaagtcgcagtcgggcaacggcgtggggcgcaacgcgctcgtgacggagttctttctgccgggtgattatctcgcggtagtcgagacggtgggcgaatcggcgggccgtatgggcgtcgtgctgagcaaaggggagttgcgtaagggcggcacgcttcaggacggcgttgacaagcgagcggcggtaaaagcgaacagcgctatcgtatacgattttaaagcgagcaagaaggcgcgctatcgctttgagtcgtttggggcggcgggaagccaggagatgaggcttgaggactcggacggctggccgcttttaagccacggcgcggaggcgccgcaggaggcggtgttggaaaagggggcgtataaactttactcgctgccctgcccatacgagaactataggataacgcgcgttgacgtagtgaaagagccgctcaagttcaacggcccgggcccgcacaacatcgccgtaaacgagcctatatcggcggtttggttagagagcggcgcgccggcgcgtttcctctttgaggtgtcggcgccgatagacgctaagatatcgctgacgccggattttaaggggactctcaaacaacaggggaacaaggacgccacgccgataaacgtgagcggcggatacggcggcgtactgcaaaagggcaagtacgagattgccgtaacgcccgtaaaaccacagaactacagtccgtacgagttgtcggtaacaacgaccgatctagccgccggtatcggctacgatgttaccaaagatcagacgctgcgcgtgcaggtaggcgagcggggcgggtacgacatcttctcgcaaggtcgtagcgaggtcgcggcgcggctatacgcgagcgacaaaaagacggagatcgcccgcagcggcggcgaccagttggattggaacttcttcatctcggagcggttggactccgggagttatcatctgcagttgacggggttcaattcgaatgacgacccgccggcaaaggtgtttatgcgccgcgtggcggacaccgtgttatcgcaggtaaagattagcgacgcaaccgcccaaaggaggagcgtgccgttgtcgttgaagcaggtcgttatcccaatcgtgagccaatacggcgacgtgcttagcatctcggccagcagcggttcgcggatagtgtgcgacttagaggctacggacaagccgcccgccgcgaaacagacgggcgctaacgccggccgccgccgaggcaagcaggtcaatatgtcagccgtcatagagaagggcgcggcgtatacgctgagaatttggtctgaggatagggtagacgacgcggccgtggttgaaattcgggcggcggaggcggcgccgctcttcttcgagaaggcgcagagcggcgttacaggtcatgcatcgaaggagggggggaataccgttttctacaagttagacggcattgacgccggtccggggcactacgagttgatagcggttgaaaacgagatagtccgcgtatccggcgcgagcggggcatcggcctcggggatattcgaggaagatgagggcatgataatcgcgagcgccggacggcaactctttattggggcgacgtttaagtcgccggacaaattcgtattccgaatgaccccggtgctggtctccgatataaaggacattcaggataagaatgcggggaagtttgagacgtccgacaagtatcgcggctcccaaagccagataaagtatacggagagggatgagttgtcggttgtgataaagcacggcgacgacaaggttttgccattgacgcgccggcgcaaaggctgggcgtggtaa

SEQ ID NO: 63244 - protein, 836 aa, Unknown
  Obtained from environmental sample
  misc_feature (1)..(836): Xaa is any amino acid
MASLTRALQRVFNIVGNQRLTAYVWISESGTYTLAPGNGVGYQWRVKRFYITAPQNYSPPNWTNGRGSVSLSQGLHEVEIAPGDNKGGAEFSFGGGSSWKKSPEQQNERGRSKVTLGPFDLKKNRLYRFYFNAIPLELASVIVDKYPPPVKENVSDVYLTGAAADKADSASSKTSQTLELAMGVPRYVTLNKRGSADYRFKIKELGIYRMETTGRLHTKLTLRDRFGGLSKSQSGNGVGRNALVTEFFLPGDYLAVVETVGESAGRMGVVLSKGELRKGGTLQDGVDKRAAVKANSAIVYDFKASKKARYRFESFGAAGSQEMRLEDSDGWPLLSHGAEAPQEAVLEKGAYKLYSLPCPYENYRITRVDVVKEPLKFNGPGPHNIAVNEPISAVWLESGAPARFLFEVSAPIDAKISLTPDFKGTLKQQGNKDATPINVSGGYGGVLQKGKYEIAVTPVKPQNYSPYELSVTTTDLAAGIGYDVTKDQTLRVQVGERGGYDIFSQGRSEVAARLYASDKKTEIARSGGDQLDWNFFISERLDSGSYHLQLTGFNSNDDPPAKVFMRRVADTVLSQVKISDATAQRRSVPLSLKQVVIPIVSQYGDVLSISASSGSRIVCDLEATDKPPAAKQTGANAGRRRGKQVNMSAVIEKGAAYTLRIWSEDRVDDAAVVEIRAAEAAPLFFEKAQSGVTGHASKEGGNTVFYKLDGIDAGPGHYELIAVENEIVRVSGASGASASGIFEEDEGMIIASAGRQLFIGATFKSPDKFVFRMTPVLVSDIKDIQDKNAGKFETSDKYRGSQSQIKYTERDELSVVIKHGDDKVLPLTRRRKGWAW

SEQ ID NO: 63245 - DNA, 2154 bp, Unknown
  Obtained from environmental sample
  misc_feature (1)..(2154): n is a, c, g, or t
atgtttatacttcttttgtttttacgcaacataaaagcgaccgttatcataggtctttcaattcccatctctataatgctcacccttatgtcaatgtcgattttcggttttacccttaacctgcttactatgaccggtcttatcatgggattgggcatgaccatggacgcttccatagttattatcgagaacgtccacagttaccgcgtgcgcggcgcaaaaccggaaatcgcggctattttgggaagccgcgaaatgttacgcgcaattatagcgtcgtccgccactaccctttgcgtatttgtcccgcttattatctataaaaacgatttgaaagacatgggccttatgttcagcgatctaatttttaccgttgtaatatcgcttacggtctccctttttgtcgcgattacccttgtgccaagcctttcgggcgcggtattaaaactgaacacaagggttcaaaaaccgataaaaaaccgttttttgcgctttattgacgataaaacagaggcttttatctgcggcatggaaaacaaatatcataccgcgcttgaatactgcctttcgcacaggctgataattattctgcttgtcatagtaattctcgctttctccctcagccaattctcgggcggaatgaatatgtacgtccgcatgcgtacggacgacaacgtaaccatcaatgtcgcgatgccgcgagggacggccatagacgttaccgaaaaaaccttatttgaaattgaggaaattgtaaaaaaagaagtgcaaggctacagaaacatcgttcttaccgcgacgcggagcgggaacaatcagggctcgatacagattaccctgccccctcccgcaagacagattgacactcccgatacaattatccgcaaacttactccctatttgaatacaattcccggcacaagaataagtttccgggcagggcgcggcatgggaagcgccgaccctattgaaatcgctattagttcaaaagattataacgctattatggcgaccgccgaagaaattcaaaatataatgagaagatatcttcctgaaattgaaaaccctgtgataaacgtagacgagggcgccccccagcttcagattgaaattgaccgcgaccgcgcggcaagtttcggagtgtcgcttgcggcaatcgcttcggaaatacgcaccgccatggacggggacaccgctaccacaatgagcaggggcaaccgtttgttaaacgtacaggttcgtcttagagaggaagacaggcagggaatgcctaaccttgactcgatttccgtagtcagccgcagcgggacaagggtgtctctttccaacgtggcaagaatagcggaagggcgcgcgccttcgtcaataagaagggaaaggcaggagcgcgtaattcgcgtaacgggcgggcttgcgccaggcattgcggctaccgattaccagaaacagcttatcaatacggttaaccaatatcttgtcaagcgcgagggcgttacagtacgtttcctcggtgaagcgcaggaaattcaatcctacacggggcgttatattttgatcattgttacgccggtttttctggttttcggcgttatggcaagccagtttgaatcatttgtcgatccattgatcattttcttttctataccgcttttgtttataggtgtcatctggatatataaattcggcaatcagacaatgtcaatgttttccattgtcggcattgtcgcccttgtcggcgttgttgtaaacaacgggattgttctggtagattacacaaacaccctgcgcgcccgcggaatgaaggtgcgggaagcgtgcgttgaagccgggaaaagacgtttgcgcccgattttaatgacaagccttacgacgattctcgggatggctcctattgcgttcttccccggagccggcgcggataccattcagcctataggaaaaacctttgtcggcggccttcttgtcagtacgataatgacaatctttgttactccggtaatgtactcggtattaaattcaaggcacgacagggtaaaagtaaaaacttccgaacctcaatcgagttcgcaggccgttgaaccggagcttagcggttcccctcttgaaccagcggcatcgcctgtaacggcagagaataatccggctaaggtatga

SEQ ID NO: 63246 - protein, 717 aa, Unknown
  Obtained from environmental sample
  DOMAIN (1)...(672): AcrB/AcrD/AcrF family
  misc_feature (1)..(717): Xaa is any amino acid
MFILLLFLRNIKATVIIGLSIPISIMLTLMSMSIFGFTLNLLTMTGLIMGLGMTMDASIVIIENVHSYRVRGAKPEIAAILGSREMLRAIIASSATTLCVFVPLIIYKNDLKDMGLMFSDLIFTVVISLTVSLFVAITLVPSLSGAVLKLNTRVQKPIKNRFLRFIDDKTEAFICGMENKYHTALEYCLSHRLIIILLVIVILAFSLSQFSGGMNMYVRMRTDDNVTINVAMPRGTAIDVTEKTLFEIEEIVKKEVQGYRNIVLTATRSGNNQGSIQITLPPPARQIDTPDTIIRKLTPYLNTIPGTRISFRAGRGMGSADPIEIAISSKDYNAIMATAEEIQNIMRRYLPEIENPVINVDEGAPQLQIEIDRDRAASFGVSLAAIASEIRTAMDGDTATTMSRGNRLLNVQVRLREEDRQGMPNLDSISVVSRSGTRVSLSNVARIAEGRAPSSIRRERQERVIRVTGGLAPGIAATDYQKQLINTVNQYLVKREGVTVRFLGEAQEIQSYTGRYILIIVTPVFLVFGVMASQFESFVDPLIIFFSIPLLFIGVIWIYKFGNQTMSMFSIVGIVALVGVVVNNGIVLVDYTNTLRARGMKVREACVEAGKRRLRPILMTSLTTILGMAPIAFFPGAGADTIQPIGKTFVGGLLVSTIMTIFVTPVMYSVLNSRHDRVKVKTSEPQSSSQAVEPELSGSPLEPAASPVTAENNPAKV

SEQ ID NO: 63247 - DNA, 1896 bp, Unknown
  Obtained from environmental sample
  misc_feature (1)..(1896): n is a, c, g, or t
atgaaaaaattaaaagccgccgttatcggccttggacgcatcgcgtccctgcttgaagaagacactctccgtgaaaagccatgcacccactccggcgccatcgccgtcaataatgactgcgttcttgccgccggctgcgacattgacgaggaacgccgcaatctctttgcggaaaagtggaaagttcccgtttacaaagacgccgccgaaatgcttaatgttcacaaacctgatattttatcgatagcgactcatcccgacagccactacagttactgccgccttgccgcaggcttcggcgttcctgtcgtcatctgcgaaaagccgcttgcggacaacattcttgaagcgcgaaaaattgcaaaactgtctgaaaaagagaaaacaattatcattacaaaccatgagcggcgttattcgcaagattacatcaacgcgaaagccgttcttgatgaggagaaactagggcggcttttacttgtacgcgcctgcctttacatggggaaaagcaggcgacttattgatcagctttggcacgacggaacccatcttgcggacgctattatgttccttacttcatccaagttgaaacacaagcggctctggggcgataaactcaaatcaaaaagcggaaccgcttggctggaaggggaactgcgaaaggataaatccgcgcagccttttcccgttctcatggaaataggcgcgggacgcgatcatcttgtttttgagattgagttttcctgcgaaaaaggcagattacgcatcggaaacggagtttatgaagtttgggagagcgtaccaagcccctacgcagaacagttccgctctttgcaaaacacgggcgcgcaattcagcgggcctacgggatatttcgccaatatgctgaaagatgcggttctttgcgctaaggacccgaagcgaaagccgcgctcatgcgcgcaagacggtctgcgtgttattgaatatttgaacagcgtaagaagtggcggtagatttcttgttatgcgctatataaacatacaaaattatataaatcggttaaaaaatataaaaatatcaagaaggaagattgtaatatttgtttctttgttaattgtggtnatctattcgagtgtttcttgtacttcaatatcttcaaaaacatataaaatagagacaaataagttagagaaacaagagagcataaaaatcgccttaatctctgatctgcatagtacaatctacgggaaagatcaaagcgtattaattaataaagttaaggatattaatcccgatttaatagtattatcgggtgacatttttgacgatgtagttccaatgaaaggaactcaattgcttttatcgggtatttcaagccttgcgcctattttttatgttacgggtaatcatgaatattggagtcataatatacaaggtataagggatgaacttgcttcttacggggtaattattttatcggatacttatacgataatagaaacaaacgatactaaaatagttatagcgggaatagaagatcctgacaaaaagaaatatgaaacggcaaattataatcaaaaagacagtatggaaaaagcgttcagggaattggatgaaataaaattatataaaatattaattgcgcatcgccctgaattaatcgaaaattataaattatattcatttgatttggttttatcgggacatacgcatggggggcaagtaagacttccttttataaacggattatacgctccggatcagggactttttccgaaatactccggcggaatttataaacatggaaatttaacgcatattataagcagagggctttcgattaatccaaggcttccccgaatatttaatccgcctgaattggtaattgttatgattgagtcaaatgcaaaataa

SEQ ID NO: 63248 - protein, 631 aa, Unknown
  Obtained from environmental sample
  DOMAIN (4)...(135): Dihydrodipicolinate reductase, N-terminus
  misc_feature (1)..(631): Xaa is any amino acid
MKKLKAAVIGLGRIASLLEEDTLREKPCTHSGAIAVNNDCVLAAGCDIDEERRNLFAEKWKVPVYKDAAEMLNVHKPDILSIATHPDSHYSYCRLAAGFGVPVVICEKPLADNILEARKIAKLSEKEKTIIITNHERRYSQDYINAKAVLDEEKLGRLLLVRACLYMGKSRRLIDQLWHDGTHLADAIMFLTSSKLKHKRLWGDKLKSKSGTAWLEGELRKDKSAQPFPVLMEIGAGRDHLVFEIEFSCEKGRLRIGNGVYEVWESVPSPYAEQFRSLQNTGAQFSGPTGYFANMLKDAVLCAKDPKRKPRSCAQDGLRVIEYLNSVRSGGRFLVMRYINIQNYINRLKNIKISRRKIVIFVSLLIVVIYSSVSCTSISSKTYKIETNKLEKQESIKIALISDLHSTIYGKDQSVLINKVKDINPDLIVLSGDIFDDVVPMKGTQLLLSGISSLAPIFYVTGNHEYWSHNIQGIRDELASYGVIILSDTYTIIETNDTKIVIAGIEDPDKKKYETANYNQKDSMEKAFRELDEIKLYKILIAHRPELIENYKLYSFDLVLSGHTHGGQVRLPFINGLYAPDQGLFPKYSGGIYKHGNLTHIISRGLSINPRLPRIFNPPELVIVMIESNAK

SEQ ID NO: 63249 - DNA, 1059 bp, Unknown
  Obtained from environmental sample
  misc_feature (1)..(1059): n is a, c, g, or t
atggttcagaatcggcacgaggagcatggacttcaggctctggacgttgcgcgggagagggaaaagttagctgatattggcgaaaaggccggcgatgatattcgttctttcgcgtatatcctgtacacaacgctgtttgaaatcagccgcgcccatcaggtgaatatcataaacgccgagtccgacctcaataagattatctccgaggcggtggaacacacggaacgggtcttcccgcagcacgcccttgttgcctgtcagggcgtggaaggcgcgtattcgcagatcgcctgcgacaggctgtttgccgatccgaatattttgtatttcacggggtttgacggcgtgttttcggcaatccgggacggtctttgccaatacggaatattgcctttggaaaacagcacagccggctctgtcaatatggtatacgaccttatgatgaagcacagtttcaagatcgcgcggagcgtgcggcttaaaatcgatcacaacctgctcgcgaaggcgggcgtaaaaaaagaaaacatccgcgaaattttctcgcatgagcaggcggttcaacagtgcgcggggtacctgaaagggcttggcaagaacgtgaaagttaccaccgtcaccaataccgccgaagccgcgaaaatggttgcggaatccgaccgaaacgacgttgcggcccttgcatcccattcgtgctgcgatctgtacgccctgaaatgtctggaaagctcggtacaggacagaggcaataactatacgcggttcatttgtatctccaaaaacctggaaatataccccggggccgaccgtaccagtattatgctaaccacatcgcacaagcccggctcgctttacaaggtgcttggccttatatacgcccttggcgtgaacgtcgtaaaacttgaaagccgcccgatacccgaccgcgattttgagttcatgttctatttcgatcttgaaacatcggtatattcaaaaaaattcagccagcttatgtgcgagcttgaaaatttgtgcgaggaatttcactatctcggcagttataccgaaattgtttaa

SEQ ID NO: 63250 - protein, 352 aa, Unknown
  Obtained from environmental sample
  DOMAIN (84)...(263): Prephenate dehydratase
  misc_feature (1)..(352): Xaa is any amino acid
MVQNRHEEHGLQALDVAREREKLADIGEKAGDDIRSFAYILYTTLFEISRAHQVNIINAESDLNKIISEAVEHTERVFPQHALVACQGVEGAYSQIACDRLFADPNILYFTGFDGVFSAIRDGLCQYGILPLENSTAGSVNMVYDLMMKHSFKIARSVRLKIDHNLLAKAGVKKENIREIFSHEQAVQQCAGYLKGLGKNVKVTTVTNTAEAAKMVAESDRNDVAALASHSCCDLYALKCLESSVQDRGNNYTRFICISKNLEIYPGADRTSIMLTTSHKPGSLYKVLGLIYALGVNVVKLESRPIPDRDFEFMFYFDLETSVYSKKFSQLMCELENLCEEFHYLGSYTEIV

SEQ ID NO: 63251 - DNA, 699 bp, Unknown
  Obtained from environmental sample
  misc_feature (1)..(699): n is a, c, g, or t
gtgcgaggaatttcactatctcggcagttataccgaaattgtttaagatcagaacgtatgaaaaaaacattcggtttgttaggtgaaaagcttggacacagtttttccccgctgatacacgggtatctcggcgaatatgattattcgctgtacgaggtttccgccgttgatcttgattcgttcatgactgaaaggcgcttcgacggtataaatataaccatcccctacaaacaacaggtaattcattactgcgctaccctttcacacgaggcgcaaataataggcagcgtaaacacgatcataaaggatgaaaacggcgcgctgcacggacacaacacggactatcacgggtttaaccagatgcttgaacagggcggaatcgatccgaaaggaaagaaagtcctggtgttgggcgacggcggatcggcgcggacagtgagggctgctcttgatgggctgggcgcgcgtgaaaccgtgacgatctcccgtcgtggagagaaccactatggcaacattgagcgtcattatgacgctgatatcatcgtaaacaccacgcccgttggaatgtaccctgacaacggcagcagtccgttgcgcctaactgggttccggcagttaacgggcgtggcggatttgatctacaatcccacgcgcactaactcctgcttgaagccgcggagcttggtattacccgcgtaa

SEQ ID NO: 63252 - protein, 232 aa, Unknown
  Obtained from environmental sample
  DOMAIN (26)...(100): Shikimate dehydrogenase substrate binding domain
  misc_feature (1)..(232): Xaa is any amino acid
MRGISLSRQLYRNCLRSERMKKTFGLLGEKLGHSFSPLIHGYLGEYDYSLYEVSAVDLDSFMTERRFDGINITIPYKQQVIHYCATLSHEAQIIGSVNTIIKDENGALHGHNTDYHGFNQMLEQGGIDPKGKKVLVLGDGGSARTVRAALDGLGARETVTISRRGENHYGNIERHYDADIIVNTTPVGMYPDNGSSPLRLTGFRQLTGVADLIYNPTRTNSCLKPRSLVLPA

SEQ ID NO: 63253 - DNA, 573 bp, Unknown
  Obtained from environmental sample
  misc_feature (1)..(573): n is a, c, g, or t
atgcttgttgcccaggctgagatggcaagcagattgtttttgaatgggcctgcccgtcctgaattggtgaataaaatttacaacgcgattctcaaaagaacgcaaaacatcgcccttatcggcatgcccggctgcggaaaaagcactgtcggcaggctgctcgctgataagatggggcggccctttgcggatattgacgcacagattgaggctgccgcggggaaaaaaatcccgcagattttcgccgaagacggagaagagacattccggcaactggaaacgcgcgtactcgctgaagaagcaaaaaaaagcggcatggtactggcgacaggcggaggcgcagtgacacggcctgaaaatcttgatctgctcagacagaacagtttaatcgtgtatttgaaacgagaactaaccgatctcataacagacggccgtccgctttcacagggcgttgggattcaagcccttgcagaaaagcggctgcctttatacgaagcatggagtgattacgccgttcaggttgaagcgaagcctgaacaaacggcggcacagatagaggaggtaatacaatga

SEQ ID NO: 63254 - protein, 190 aa, Unknown
  Obtained from environmental sample
  DOMAIN (43)...(190): Shikimate kinase
  misc_feature (1)..(190): Xaa is any amino acid
MLVAQAEMASRLFLNGPARPELVNKIYNAILKRTQNIALIGMPGCGKSTVGRLLADKMGRPFADIDAQIEAAAGKKIPQIFAEDGEETFRQLETRVLAEEAKKSGMVLATGGGAVTRPENLDLLRQNSLIVYLKRELTDLITDGRPLSQGVGIQALAEKRLPLYEAWSDYAVQVEAKPEQTAAQIEEVIQ

SEQ ID NO: 63255 - DNA, 432 bp, Unknown
  Obtained from environmental sample
  misc_feature (1)..(432): n is a, c, g, or t
atgaaggtacttgtaattaacgggccgaacatcaatctgctcggtctgcgggagccggatatatacggcattaaaagttatgcgtcattgctggaattcatacgggatgtggccgcacagcacaacgtggaagcggaatgtatgcagtcgaaccatgagggtgcgatcgtggacacaatccaggctgcttacggccgttttgacggcatcattatcaatccggcggcatatacgcacacaagcatcgccatcctcgacgcgctgaaggcggtcgggcttcctgcggtagaagtgcatttatcggatatccacgcacgcgaagctttccgtaaaatatcctatgcgggactggcctgcgaaaagacattcgccggtatgggctttgaaggttacgcagaagcgatacgttatcttgcggggaaggaggggtga

SEQ ID NO: 63256 - protein, 143 aa, Unknown
  Obtained from environmental sample
  DOMAIN (1)...(142): Dehydroquinase class II
  misc_feature (1)..(143): Xaa is any amino acid
MKVLVINGPNINLLGLREPDIYGIKSYASLLEFIRDVAAQHNVEAECMQSNHEGAIVDTIQAAYGRFDGIIINPAAYTHTSIAILDALKAVGLPAVEVHLSDIHAREAFRKISYAGLACEKTFAGMGFEGYAEAIRYLAGKEG

SEQ ID NO: 63257 - DNA, 330 bp, Unknown
  Obtained from environmental sample
  misc_feature (1)..(330): n is a, c, g, or t
atgtccaggagggaaacatggacaaaagaaaaaggtatactgcccgaagaaaaagtaaaaattctcagagaggtaattgaggacgggaagcaagtaagccaagtagcagaacaatatggccttcaccctaacaatatcttcaactggcggaagcagctttttgagggaggggtccagaccttccaaataaagaggtcggacatctcaggcaaagccgaggagcggaaaatcactgcccttgaggaaaagattaagcagaaagatgaagtgatagcggaacttgccgaagagctcttgggattaaaaaaaaagaactctggccgtccgtag

SEQ ID NO: 63258 - protein, 109 aa, Unknown
  Obtained from environmental sample
  DOMAIN (4)...(101): Transposase
  misc_feature (1)..(109): Xaa is any amino acid
MSRRETWTKEKGILPEEKVKILREVIEDGKQVSQVAEQYGLHPNNIFNWRKQLFEGGVQTFQIKRSDISGKAEERKITALEEKIKQKDEVIAELAEELLGLKKKNSGRP

SEQ ID NO: 63259 - DNA, 957 bp, Unknown
  Obtained from environmental sample
  misc_feature (1)..(957): n is a, c, g, or t
atgagccttgaagaacgtgaaattgcggaaaaggaaataacgcgcctaagaaacaagacgggaattcctttggaaacccttttgggatatgccggcattcggcagcggacatggcgcgaatggggccagcggcggggcattgagacaaagcataacaacaacatccccaaggcatattacttgacgccggaagaaatcaaggcgatagtcgcttattgcaccagcaatccactgaaaggctacaggatgcagtgttgggagatggtagaccaaaatgtggcgtttgtatcctgtagcagcgtctataacgtcataaaacgccacaatttggacaaaaaatgggcggaattggctgaagaggcgaagaaaggctttgaccagccgcgggcggttcacgagcaatggcacatagatttttcatacatcaagatacaaaactcgttttattatttcatcggcatccttgacggctacagccggaagatgcttaactggaggctttgtaaaaacatggagggcattaacgctgaaatactgattgccgaaaccaaagagatgtacccacaggcggtctgcctgcggctgataagcgacaacggaagccagttcatatcaaaagattttgaagagctgcttgtgcttctggaattctcccacacatttacatccgcgaaccatccgcagagcaacggcaaactggagcggttccaccgcactttgaaaactgaacacgtaaggagggcatcgtatctggaataccaagacgcctgcataaggatggcggaatggatcgcgtattacaacagcgggaggcttcacagcgcgatctggtatttaacgccgaatgacgttttttacggcagggcggctagacggcttgcagaacgcaaagaaaagttgcatgctgcatttaacaagagacaggaatactggcggacacaaaagtctgcatcctga

SEQ ID NO: 63260 - protein, 318 aa, Unknown
  Obtained from environmental sample
  DOMAIN (127)...(286): Integrase core domain
  misc_feature (1)..(318): Xaa is any amino acid
MSLEEREIAEKEITRLRNKTGIPLETLLGYAGIRQRTWREWGQRRGIETKHNNNIPKAYYLTPEEIKAIVAYCTSNPLKGYRMQCWEMVDQNVAFVSCSSVYNVIKRHNLDKKWAELAEEAKKGFDQPRAVHEQWHIDFSYIKIQNSFYYFIGILDGYSRKMLNWRLCKNMEGINAEILIAETKEMYPQAVCLRLISDNGSQFISKDFEELLVLLEFSHTFTSANHPQSNGKLERFHRTLKTEHVRRASYLEYQDACIRMAEWIAYYNSGRLHSAIWYLTPNDVFYGRAARRLAERKEKLHAAFNKRQEYWRTQKSAS

SEQ ID NO: 63261 - DNA, 348 bp, Unknown
  Obtained from environmental sample
  misc_feature (1)..(348): n is a, c, g, or t
gtgaatgcaattggcgctttatgcaatggggagcattctgccataaaatgctaccgccatacgacagacagcgcgttttttgaagcctggtttgaagacaatttgcttaaagaattgcccaaaggctatacggtaataatggacaatgccgcctttcacaggaaaaagagactgcggaaaatagccagggggaaagcacggctgttgttccttcctccttattcgccggactacaacccgatagaaaaatcctgggcaaacatgaaacgtttccttcgcgataactcgaaagactttcaatctgtcgtttccggtatctatggttatttcggatttatagaaagctaa

SEQ ID NO: 63262 - protein, 115 aa, Unknown
  Obtained from environmental sample
  misc_feature (1)..(115): Xaa is any amino acid
MNAIGALCNGEHSAIKCYRHTTDSAFFEAWFEDNLLKELPKGYTVIMDNAAFHRKKRLRKIARGKARLLFLPPYSPDYNPIEKSWANMKRFLRDNSKDFQSVVSGIYGYFGFIES

SEQ ID NO: 63263 - DNA, 1269 bp, Unknown
  Obtained from environmental sample
  misc_feature (1)..(1269): n is a, c, g, or t
atggcgaatcccatagttggaattttcagggtaaaagaacttcgcgaaagaataattttcaccatcggtatgctggtgatattcagggtaggcgcggtgtttcccatacccggaattaatgtccgcgagttggcgcgttacttctacgatcaggtaaattcaggaaacccgatagttgattatttggacttctttgcgggcggcgcgttctccaatttctccgtgttcatgcttggcattatgccgtatatctcaatgtcgattatcatgcagttgttgctcatcgttttcccctcgcttaaaaaaatctcgcaggaagacggcggccggaaaaagattcagcaatggcagcgttacgggacagtcgttgtttgtcttatacaatcttacgcggttacccagtacgcgcaggcaatatcgcgtagtgtggatcacctgcttaatatcaatcctttgccttttaccctgcttgccatgcttaccgttactaccggaaccatgttccttatgtggataggtgagcagatcacaaaacgcggaataggcaacggtatttcattgttgattttcgccggtatcgtcgcgcgtcttcctcacgcggtttgggaactgngcggcagggtgcgcgacgggcagcttaacctggtgtttgtcatcgtggttctgctgatgttcgtggcggtggttgccctggttgtgtttgagcagcagggccagcgaaagatacccgttaattacgccaaacgggtggtcggaaggaaaatgtacggggctcagaacacctacatacctttcaagatcaacccctccggagttattccggttattttcgcctcgtcgattctcacgttccccctgcagatagccacgaccatcggaggcaacgtgccctggctcgcgtcagtggcccgtgtgttaagcccccgcgggacggtttacaatatatcgtatgttttgttgataattttcttcgcgtatttctacactcaggtgtcgcttaaccccatagagatcgcgaagcagattagggagaacggcggttccattcccggaatcaggacggagcgcattgaagagtaccttaccaggattctgaaccgcatcgtcctgccgggttcgctttatttggcgtttatcgcggttattccgaccattatacaatgggcgtttaagttcccctcgtcaatttcatacctgttgggaggcacttccctccttatcatggtaggcgttgacctggacaccatgagccagatcgaggggctttga

SEQ ID NO: 63264 - protein, 422 aa, Unknown
  Obtained from environmental sample
  DOMAIN (74)...(418): eubacterial secY protein
  misc_feature (1)..(422): Xaa is any amino acid
MANPIVGIFRVKELRERIIFTIGMLVIFRVGAVFPIPGINVRELARYFYDQVNSGNPIVDYLDFFAGGAFSNFSVFMLGIMPYISMSIIMQLLLIVFPSLKKISQEDGGRKKIQQWQRYGTVVVCLIQSYAVTQYAQAISRSVDHLLNINPLPFTLLAMLTVTTGTMFLMWIGEQITKRGIGNGISLLIFAGIVARLPHAVWELXGRVRDGQLNLVFVIVVLLMFVAVVALVVFEQQGQRKIPVNYAKRVVGRKMYGAQNTYIPFKINPSGVIPVIFASSILTFPLQIATTIGGNVPWLASVARVLSPRGTVYNISYVLLIIFFAYFYTQVSLNPIEIAKQIRENGGSIPGIRTERIEEYLTRILNRIVLPGSLYLAFIAVIPTIIQWAFKFPSSISYLLGGTSLLIMVGVDLDTMSQIEGL

SEQ ID NO: 63265 - DNA, 504 bp, Unknown
  Obtained from environmental sample
  misc_feature (1)..(504): n is a, c, g, or t
atggcgcacgattttaatttgcacgctccggcgggcgcgaacaaaaagaaaaaaatactcggacgcggacagggtaccggcaggggcactaccgcgggcaagggtaacaaagggcagaaagcgcgctcgggcggaaagacctatgtcggctttgagggcgggcagatgcctttgtaccgcagactcgcgcacagaggtttctcaaattatccttttaagaaagaatggcagattgtaaacctttgcgatattgaaaagttttttaatgccggagaaaccgttgaccttgcttccctgaataaaaaagggcttgtaaaaggcgcggaacctgtaaaggttcttggtaacggcgatttctcaaaaaaattaaacttcaatgtcgcggctgtctctgccggagcgaaagaaaaaattgaaaaggcgggcggcagcatcactcttaatcctcctttaccgcgcaagaggccgaaagtaaacaagaaaaaaacaggcgggaaaaaataa

SEQ ID NO: 63266 - protein, 167 aa, Unknown
  Obtained from environmental sample
  DOMAIN (112)...(143): Ribosomal protein L15
  misc_feature (1)..(167): Xaa is any amino acid
MAHDFNLHAPAGANKKKKILGRGQGTGRGTTAGKGNKGQKARSGGKTYVGFEGGQMPLYRRLAHRGFSNYPFKKEWQIVNLCDIEKFFNAGETVDLASLNKKGLVKGAEPVKVLGNGDFSKKLNFNVAAVSAGAKEKIEKAGGSITLNPPLPRKRPKVNKKKTGGKK

SEQ ID NO: 63267 - DNA, 837 bp, Unknown
  Obtained from environmental sample
  misc_feature (1)..(837): n is a, c, g, or t
ttgaggctggtaagggacaatgaccgcccaattcagcttattttcgccggcaaggcccacccccacgacatgcccggcaaggacattatccgcgagatcgtccattttgccgaaagatacgatgtcacaagccgcattgtgtttgtggagaactacgacatgactgtcgccaagtaccttacatcgggcggcgatatatggctcaatacgccgcggcggccgatggaggcgtcgggcaccagcggcatgaaggccgcgctgaacggcgtccttaactgctctatcctggacggctggtgggacgaagcttacaatccggaagtgggctgggccattggccacggcgagcagtatgccgacgagagactccaggacgatgtggaaagcaaggaactgtacgatcttcttgaacgggacataatcccactcttttaccagcgcggcagggacggacttccccgcgaatggataaagaggatgaaggactgcatgcgccagatagggcaatccatgtcatgtcacaggatgttgatggattattccaacaacttctatttccccgcccttaaaaactaccgcaaactgataaaagatgattatgctgacgcaaaatcccttgcggcatattttggcaaactgcgtgattcctgggacagcctcagaatcgtaaagatcgaggccaataccaagccggtaatgcagcgcggagattcgctcaatgttacagcccacattgacctcggcaaaatgtcgcctaacgatttgcttgtggaactatactacggcgcggtgtcgaaccagagcaacgaaataccaatgcccacagaatcgagatga

SEQ ID NO: 63268 - protein, 278 aa, Unknown
  Obtained from environmental sample
  misc_feature (1)..(278): Xaa is any amino acid
MRLVRDNDRPIQLIFAGKAHPHDMPGKDIIREIVHFAERYDVTSRIVFVENYDMTVAKYLTSGGDIWLNTPRRPMEASGTSGMKAALNGVLNCSILDGWWDEAYNPEVGWAIGHGEQYADERLQDDVESKELYDLLERDIIPLFYQRGRDGLPREWIKRMKDCMRQIGQSMSCHRMLMDYSNNFYFPALKNYRKLIKDDYADAKSLAAYFGKLRDSWDSLRIVKIEANTKPVMQRGDSLNVTAHIDLGKMSPNDLLVELYYGAVSNQSNEIPMPTESR

SEQ ID NO: 63269 - DNA, 693 bp, Unknown
  Obtained from environmental sample
  misc_feature (1)..(693): n is a, c, g, or t
atgtttccatctcaatcacctaagtcctcttacaggtactttgatgtgttaatgacattttttgtcgtcgttctcgttctgagcaatatcgcttcatcggcgaaaattgttgacttgggtttttcaattttcggaatccccatggcgtttgacggcggtactttactgtttccgctggcttatgtactcggagatatactaacagaagtgtacggatttaaggccgcgaagcgggttatatggacaggctttgcggtactggctttttcatcgctggtgtttcttgtccttcggctgcttcccggcgaaagctcatgggaagccgagaccggttccgccgcgtataacgccattctgggcggtatgagctcaggcggcattgtcctcgcaagcctcgcaggataccttgtgggagaattatccaattcagctgtgctgtcaaagatcaagtttatgatgaatggccggtggctctggttcagggctatggtttccagccttgtcggggaactcctggacagtttaatttttgtgttcatcgcctgcctcaccggggtttttggctggaatcttttccttagcctcgcgctgaccaactatatactgaaatgcctcatcgaagcgctggtactgcctcttacatatacggcggtaaggctgctgaaaaaaggcgagggatcagacgtgagctaa

SEQ ID NO: 63270 - protein, 230 aa, Unknown
  Obtained from environmental sample
  DOMAIN (43)...(204): Uncharacterized ACR, YhhQ family COG1738
  misc_feature (1)..(230): Xaa is any amino acid
MFPSQSPKSSYRYFDVLMTFFVVVLVLSNIASSAKIVDLGFSIFGIPMAFDGGTLLFPLAYVLGDILTEVYGFKAAKRVIWTGFAVLAFSSLVFLVLRLLPGESSWEAETGSAAYNAILGGMSSGGIVLASLAGYLVGELSNSAVLSKIKFMMNGRWLWFRAMVSSLVGELLDSLIFVFIACLTGVFGWNLFLSLALTNYILKCLIEALVLPLTYTAVRLLKKGEGSDVS

SEQ ID NO: 63271 - DNA, 636 bp, Unknown
  Obtained from environmental sample
  misc_feature (1)..(636): n is a, c, g, or t
atgagcgaaaactccccccttatcagcgttaataccccgcggtacaaacgtaacgcgtcggtcggccttccggtaagctatacagaagtaaaaatcattaatacaacgccggatggcattggagaaattgcggttaaatctccgtcggtcatgctgggctattttgagaacgatgaagcgaccaaagagacgataaacgaagacggttatctgttgacaggcgaccttggctatcgcgacgaggacggctttatctacattaaaggccgcaagaaaagcctgatcgtaacttccggcggcaaaaacatctatccggaagaaatcgaaattcaatttaataattcccgtgtaatcggggaagcgcttgttattggccgcagggaatctgctcacggaggcgagcagattatcgcggtaactgttcctaactatgagatgatcaaggaagatcatcccggcagggaaaaggatgaaatttttatcagaaatttgataaagaaagccgttgatgaagcaaaccgtaacttgccaagttacaagaagatcaacaacttcatattacggaaagaaccctttgagaaaaacgcccagcagaagatacgaaggttcatgtacaaggaatatgaaaatccttag

SEQ ID NO: 63272 - protein, 211 aa, Unknown
  Obtained from environmental sample
  misc_feature (1)..(211): Xaa is any amino acid
MSENSPLISVNTPRYKRNASVGLPVSYTEVKIINTTPDGIGEIAVKSPSVMLGYFENDEATKETINEDGYLLTGDLGYRDEDGFIYIKGRKKSLIVTSGGKNIYPEEIEIQFNNSRVIGEALVIGRRESAHGGEQIIAVTVPNYEMIKEDHPGREKDEIFIRNLIKKAVDEANRNLPSYKKINNFILRKEPFEKNAQQKIRRFMYKEYENP

SEQ ID NO: 63273 - DNA, 459 bp, Unknown
  Obtained from environmental sample
  misc_feature (1)..(459): n is a, c, g, or t
ttggccggggcttcctctccgggtaccgtcaaccgaagccgcccgttcggcggcacggcttcttccccggcgacagggctttacggcccgaaggccttcgtcgcccacgcggcgttgctgcgtcaggcttccgcccattgcgcaaaattccccactgctgcctcccgtaggagtctgggccgtgtctcagtcccagtgtggccgatcgccctctcaggccggctactgatcgtcgccttggtgggccgtcaccccgccaacaagctaatcaggcgcaggcccctccggcagcgccgggcccgaaggtccccggctttcgccgcgcgccaccatgcgcgcggcctcatgcggcattgtcgcccctttcgggacgttattccccactgctgggcaggtcgcccacgcgttactcacccgtccgccatgcgcgtttccgcacatccgacttgcatgtgttaa

SEQ ID NO: 63274 - protein, 152 aa, Unknown
  Obtained from environmental sample
  misc_feature (1)..(152): Xaa is any amino acid
MAGASSPGTVNRSRPFGGTASSPATGLYGPKAFVAHAALLRQASAHCAKFPTAASRRSLGRVSVPVWPIALSGRLLIVALVGRHPANKLIRRRPLRQRRARRSPAFAARHHARGLMRHCRPFRDVIPHCWAGRPRVTHPSAMRVSAHPTCMC

SEQ ID NO: 63275 - DNA, 447 bp, Unknown
  Obtained from environmental sample
  misc_feature (1)..(447): n is a, c, g, or t
gtgcgccgcctggggagtatgcccgcaagggtgaaactcaaaggaattgacgggggcccgcacaagcggtggagcatgtggtttaattcgatggtacgcgaggaaccttacctgggtttgacatggaggcggacgcgccagagatggcgcggcgcagcaatgcgcgcctctgcaggtgctgcatggctgtcgtcagctcgtgccgtgaggtgttgggttaagtcccgcaacgagcgcaacccctaccgccagttaccagcaggcaaagctggggactctggcggaactgccggcgacaagctggaggaaggcggggatgacgtcaagtcatcatggcccttatgtccagggctacacacgtgctacaatggccggcacaaagcgaagcgagcccgagagggcgcagcgaaccgccgaaagccggccgtagtccggattgaagtctga

SEQ ID NO: 63276 - protein, 148 aa, Unknown
  Obtained from environmental sample
  misc_feature (1)..(148): Xaa is any amino acid
MRRLGSMPARVKLKGIDGGPHKRWSMWFNSMVREEPYLGLTWRRTRQRWRGAAMRASAGAAWLSSARAVRCWVKSRNERNPYRQLPAGKAGDSGGTAGDKLEEGGDDVKSSWPLCPGLHTCYNGRHKAKRAREGAANRRKPAVVRIEV

SEQ ID NO: 63277 - DNA, 486 bp, Unknown
  Obtained from environmental sample
  misc_feature (1)..(486): n is a, c, g, or t
gtgaggccccctagtccatccagtgctctacctgcgcaaggttttggcgaggctgtccctcaaggcatttcggggagagccagctatttccaagtttgtttagtctttcgctccgagccaccggtcatccctgccttttttaacagactagggttcggccctccacccggtttcacccgggcttcagcctgccgatggctagatcacttggcttcgggtccatggcatgcaactggtgcgaacttgcgttcgctttcgcccttttcagactcggtttccctccggctccgggactcccatcccttagcctcgctgcataccatgactcgcaggctcattctacaaaaggcacgccatcatccaatcgctcggactttgacatgttgcgggtccacggtttcaggttctctttcactcccctcgccggggttcttttcgcctttccctcacggtacttctgcactatcggtcgtatctagtatttag

SEQ ID NO: 63278 - protein, 161 aa, Unknown
  Obtained from environmental sample
  misc_feature (1)..(161): Xaa is any amino acid
MRPPSPSSALPAQGFGEAVPQGISGRASYFQVCLVFRSEPPVIPAFFNRLGFGPPPGFTRASACRWLDHLASGPWHATGANLRSLSPFSDSVSLRLRDSHPLASLHTMTRRLILQKARHHPIARTLTCCGSTVSGSLSLPSPGFFSPFPHGTSALSVVSSI

SEQ ID NO: 63279 - DNA, 339 bp, Unknown
  Obtained from environmental sample
  misc_feature (1)..(339): n is a, c, g, or t
atgacagatcggccgagtattatacctgaattctctcttccgctccctccagcatatcttccaatacgccttcgtcggtctgcggaatgctcccctaccaaccatacattgctgtatgattccgcggcttcggttgcatgcttagccccgttacattgtctgcgcgccgtgactcgaccagtgagctgttacgcactctttcaaggaatggctgcttctaagccaacctcctggctgtctatcgccagggcacatcatttcacactcagcatgctatccgggaccttagccggcggtcagggctgtttccctctcgaccacggaccttgtcgcccgtag

SEQ ID NO: 63280 - protein, 112 aa, Unknown
  Obtained from environmental sample
  misc_feature (1)..(112): Xaa is any amino acid
MTDRPSIIPEFSLPLPPAYLPIRLRRSAECSPTNHTLLYDSAASVACLAPLHCLRAVTRPVSCYALFQGMAASKPTSWLSIARAHHFTLSMLSGTLAGGQGCFPLDHGPCRP

SEQ ID NO: 63281 - DNA, 2325 bp, Unknown
  Obtained from environmental sample
  misc_feature (1)..(2325): n is a, c, g, or t
atggagtcttcgtttcagaccagccatgattcaacagtttcctatcactttgaacgccagcgcttgaacaatttatttctggaagctgtaaaatatccgctggctgttgtatgcgccggagcaggttatggcaagaccagcgcggttcacgatttcttaaaagggtttaatggggctaaggcatggattcagctttccgaacgcgataatgtcggggggcgcttttgggaaaattacgctcattccatagcaacggttaacgcgcccctggccgcggcgttttccaagattggttttcctgatacgaaagagaagctgcaccggtacaaggcaatattaaacgattacattgttgtggaaaaacggatacttgtaatagacgactttcattgcattgaagacaggtcagtgcttcgtttcatggaagaaggtttctttaaaaatatgctgccggggacaacggtgtttctgatttcccgttccatatcccgcgtaaatacggcggacatgttttcccgcgatcaaatattcaatataaacgaaagcgatttccggtttacggaaaacgaactcagccggtatttccgcggtattggcatttcattccagccggacagcctgcgcgagatcatgcaggacaccgaaggctgggccttcgcgatcaaccttattgcgcgctcctgccaaaaagctcccgggtacggcggctatgtgcgtaacgcgatgaaacggaatatcttccggcttctggaaacggaaatatgggacgggcttccggaacaaatgcagatttttttggtccgcctttcgctcatcgatcatctgtccgttgacttgatcgcccagttggcgggaggggaaggtttgatcgcggggctggagaagcaaagcgcctatgtgcgccgggacaactatatcaacgcgtacttcattcaccctttgtttctggaatttttaagcacgaagcaggaaatcctttcggaagaacaaaaaagggaaacctacgccatttcaggcgattggtgcgcccgtaacggttttaagatagacgccttattctaccatgaaaagacgggaaactatcaatcaatactgttaactttaaccgggttaaccactcaaataccgcaggatattgcgaagtatgcggcagctattcttgaccgcgcgcctgaggacgcgtttgacaaggtggaattccttgcggatatgcacttgcgtacctatatatgccagggatttttgcaaaaatcacttgagttggtgaaatactacgaagcaaaattcctgaaactgccggaaaatgaccctataagaaaacgcaccctgacaagactctatatttgctggacgtacatacgctgtttgatgagcgtgacagatgacatctttgattttgatacttatgttgaaaaggcctgtgagtgcgcgcgtgaggaggactcgggcaaactggatatttattatccgggagcgtggatcaacttcgccggttcttcaaggaagggaagccctgaggaatgtattgcctcctttgcccgtaataaggagcatatacaaaagagttatatgaaaggattcatggcgggagaattggaactggcccgaggcgaactggaattctaccggggcgaaacttcttccgcggagccttatatcgtgcttgcggtgaagcaggcgcgggcggaaaaacagttcggacttatgcacagggctttgttatacgccatgcgtattgccgccgcgcagggagattttacccttatggaacagacgctaaaagatataaaagcccagcttgatgaaccctcgtaccttcaccgttttatggattacgatatatccctttcatggtatttctgttttttgggcctgccggaaaagacgtctgagtggcttcaggaagatttttcgtcttacagccatgccgcttttatcgaaaatttcgggaatcagataaaggcgcgtttcttctactcggcaagggattttgcccctcttctggcgtatatcgaagaaatgaaaacgcgggaatctttcctgtttgaaaggatagaaatgctggtgatggaagcctgtatacattacaaaaataaaaacaaggaaaaggcttttaacgcgctgcgtgaagcatatacaaacgcggctcccaatgggatcgtaatgccctttattgagatgggaaaagatatgcgcacccttgcctcggctttcctgaaggaaaaaggcacaactatccccaaagcatggctggaagacatcaaccgcaagtcagcttcctacgccaaacgccgctcccatgtcattgcggaatacgcgcagtaa

SEQ ID NO: 63282 - protein, 774 aa, Unknown
  Obtained from environmental sample
  misc_feature (1)..(774): Xaa is any amino acid
MESSFQTSHDSTVSYHFERQRLNNLFLEAVKYPLAVVCAGAGYGKTSAVHDFLKGFNGAKAWIQLSERDNVGGRFWENYAHSIATVNAPLAAAFSKIGFPDTKEKLHRYKAILNDYIVVEKRILVIDDFHCIEDRSVLRFMEEGFFKNMLPGTTVFLISRSISRVNTADMFSRDQIFNINESDFRFTENELSRYFRGIGISFQPDSLREIMQDTEGWAFAINLIARSCQKAPGYGGYVRNAMKRNIFRLLETEIWDGLPEQMQIFLVRLSLIDHLSVDLIAQLAGGEGLIAGLEKQSAYVRRDNYINAYFIHPLFLEFLSTKQEILSEEQKRETYAISGDWCARNGFKIDALFYHEKTGNYQSILLTLTGLTTQIPQDIAKYAAAILDRAPEDAFDKVEFLADMHLRTYICQGFLQKSLELVKYYEAKFLKLPENDPIRKRTLTRLYICWTYIRCLMSVTDDIFDFDTYVEKACECAREEDSGKLDIYYPGAWINFAGSSRKGSPEECIASFARNKEHIQKSYMKGFMAGELELARGELEFYRGETSSAEPYIVLAVKQARAEKQFGLMHRALLYAMRIAAAQGDFTLMEQTLKDIKAQLDEPSYLHRFMDYDISLSWYFCFLGLPEKTSEWLQEDFSSYSHAAFIENFGNQIKARFFYSARDFAPLLAYIEEMKTRESFLFERIEMLVMEACIHYKNKNKEKAFNALREAYTNAAPNGIVMPFIEMGKDMRTLASAFLKEKGTTIPKAWLEDINRKSASYAKRRSHVIAEYAQ

SEQ ID NO: 63283 - DNA, 882 bp, Unknown
  Obtained from environmental sample
  misc_feature (1)..(882): n is a, c, g, or t
atgcttaatatagataagttgtttaagagagtggctgagaagggacatgtttgcgtgggactggatacgtcggcggaatatgttcccgatactgaaagattcaaagctaacagcgacgcttccgcggttctggcttttaataaagcgattattgacgccgtttacgacgtatgcgcctgttttaaggtgcagattgcctattacgaggaaatgggtcttgaaggactgcgcgtctactctgagacgttaaagtacatacacagtaaagactgccttgtaattgccgacataaaacgcggcgatattgccgatacggctttacgctacgcaaaagcccacttttcaggcgactttgaggctgattttgtcactttaagcccgtatatgggtatggattcaatcgaaccgtggctgaaagaagcgaaaaaatccggtaagggcgcgtttgttttaatgagaacaagcaacgccggaatgagggactttgagtatcttgaaattggcggcggaaaacgtgtatacaattctgtaggcgataaattggcgtctcttgaggcgaatactttgggagaagacggttacaggctttttggagtcgttgccggttgtacggaaagcgatgaagcggcggaaatccgcagcgcttacaaggatctgttttttctgataccgggatacggcgcgcagggaggaagcgctaaaaacgcaagtcttttgctgcgaaacggaaacggcggggttgtaaacgcatcaagatcaattatcacctcatggaaagaacagtccggctgtgataaagcggataatctttttgccgcagagtccgcaagacgcgccgtaattaaaatgagagatgaaatcttaattgaggcaaggaaatga

SEQ ID NO: 63284 - protein, 293 aa, Unknown
  Obtained from environmental sample
  DOMAIN (15)...(267): Orotidine 5'-phosphate decarboxylase / HUMPS family
  misc_feature (1)..(293): Xaa is any amino acid
MLNIDKLFKRVAEKGHVCVGLDTSAEYVPDTERFKANSDASAVLAFNKAIIDAVYDVCACFKVQIAYYEEMGLEGLRVYSETLKYIHSKDCLVIADIKRGDIADTALRYAKAHFSGDFEADFVTLSPYMGMDSIEPWLKEAKKSGKGAFVLMRTSNAGMRDFEYLEIGGGKRVYNSVGDKLASLEANTLGEDGYRLFGVVAGCTESDEAAEIRSAYKDLFFLIPGYGAQGGSAKNASLLLRNGNGGVVNASRSIITSWKEQSGCDKADNLFAAESARRAVIKMRDEILIEARK

SEQ ID NO: 63285 - DNA, 1371 bp, Unknown
  Obtained from environmental sample
  misc_feature (1)..(1371): n is a, c, g, or t
ttggagaataaaatgagtgaagattcgccttttagcattcccgctaaaataaaagaaccacaagataagctaccagatttttctattgaagatttgccgccttgcctacaggaaacccttaaagagctaggctggaacgaattgatgcctgtgcaaaaaaagaccatcccctacatgatgcaaggtagggatatgctgatccagtctaaaacaggttctggaaaaaccggagcgtttttgctgcctctcttgcaggttatagttaccgagcatgtttacccgcaggctcttattttggttccaacccgtgagctggcattgcaggttcatggcgaggcagagctgctctccaaggggcttggcgttcgctcctgcgcaatttttggcggggttggctttgagaatcaaattcacgctttgcgcaacggggtgcatataatagttgcaacgccgggccgcttgctagaccacgctcagaggggcaacatagatttcagaagcatccgcgatttggtcatggacgaggcagacgaaatgctgggcatgggattctatcccgatatgcagcgcattcgccgctacttgccaaaggaaatttcctgcaccatgttcagcgccaccattcctcaaaccgtaaaaagccttgccagggaatttcaacgcccaaatgcggattttctctcgctttcttacgaccaagttatagcgaaaaatctggaacaccgctattacgccgccgatgccatgggcaaagattccctgctcataaaaatcttggaatgggaaaaccccgaaagctgcatgattttttgcaatacaaaaaaagacatagcatatctggagcaagttttgcgggactacggtttccctgtaaaagctctttctggggatatttcccaagccgagcgcgagcgggttctgggcgagttcagagagaataaattaaaacttttgctatgcacagatgttgccgctcgtggcatagatgttacccatgttacgcacgtcatagtttacgaccatcccagcgaccacgaggtttacgtgcacaggagcggacgcaccgcaagagcgggacgtagcgggcttgcgatttctttaatcactccggtagaagaaattgaaattcaaaaaaccgctgcggattttggcataaacttcattaaaatgcaacccataaatgaagacgaattggcaagccgcattcgccaaagagcggaagcaaagctggacagggaacgcagattgctggggcaaaagcaaaacgagagaatgcggcgctacctacctttggtggaagagctttcgcaaaacacggaagggaaagacctgctcgcatatctgctggattcgcattattggagagtctga

SEQ ID NO: 63286 - protein, 456 aa, Unknown
  Obtained from environmental sample
  DOMAIN (283)...(359): Helicase conserved C-terminal domain
  misc_feature (1)..(456): Xaa is any amino acid
MENKMSEDSPFSIPAKIKEPQDKLPDFSIEDLPPCLQETLKELGWNELMPVQKKTIPYMMQGRDMLIQSKTGSGKTGAFLLPLLQVIVTEHVYPQALILVPTRELALQVHGEAELLSKGLGVRSCAIFGGVGFENQIHALRNGVHIIVATPGRLLDHAQRGNIDFRSIRDLVMDEADEMLGMGFYPDMQRIRRYLPKEISCTMFSATIPQTVKSLAREFQRPNADFLSLSYDQVIAKNLEHRYYAADAMGKDSLLIKILEWENPESCMIFCNTKKDIAYLEQVLRDYGFPVKALSGDISQAERERVLGEFRENKLKLLLCTDVAARGIDVTHVTHVIVYDHPSDHEVYVHRSGRTARAGRSGLAISLITPVEEIEIQKTAADFGINFIKMQPINEDELASRIRQRAEAKLDRERRLLGQKQNERMRRYLPLVEELSQNTEGKDLLAYLLDSHYWRV

SEQ ID NO: 63287 - DNA, 537 bp, Unknown
  Obtained from environmental sample
  misc_feature (1)..(537): n is a, c, g, or t
atgccatttaaattttctatttgcccaatttccgggttgtttgaaatacaaccaaaagtgatcggagacaatcgcggatatttcatggaaagttattcgcaaaagaactacgaggaagccggcatagccgccacctttgtgcaggacaaccagtccagctccgtaaaaggcgtactgcgcggtcttcactaccagaaaaaacgcccgcaaggcaaactggtacgcgccattgaaggtgaaatctttgatgtagccgtagacatccgcccccgctcccccacatgcggccaatggtattccgttatcctaagcggaaaaaaacagaaccagtttttcatcccggaaggttttgcccacggttatcttgtgttaagcgacaccgctctcgttgcgtataaatgcaccgatttttataatcctgaagacgaaaaaggaattatctggaacgatccggacattgccattaaatggccggacataggcatggaatacatactttccgacaaagacaaggcgtacccggaatttaatcagtga

SEQ ID NO: 63288 - protein, 178 aa, Unknown
  Obtained from environmental sample
  DOMAIN (5)...(178): dTDP-4-dehydrorhamnose 3,5-epimerase
  misc_feature (1)..(178): Xaa is any amino acid
MPFKFSICPISGLFEIQPKVIGDNRGYFMESYSQKNYEEAGIAATFVQDNQSSSVKGVLRGLHYQKKRPQGKLVRAIEGEIFDVAVDIRPRSPTCGQWYSVILSGKKQNQFFIPEGFAHGYLVLSDTALVAYKCTDFYNPEDEKGIIWNDPDIAIKWPDIGMEYILSDKDKAYPEFNQ

SEQ ID NO: 63289 - DNA, 693 bp, Unknown
  Obtained from environmental sample
  misc_feature (1)..(693): n is a, c, g, or t
gtgacagataacgccggtcttatctggcttattggcagtaaaggaatgttggggacggagctttcccaactttttgaaaagacggaacttccctttaccggaaccgacagggaagttgacattaccgatatggcggcgcttacaacagccgccgcgaaacttgccgaaaaacaaccggtaaaatggataatcaacagcgccgcctacacagcggtagacaaagccgaagatgatgtcgatatttgccgcgcgctgaatacgcggggagcggcaaatatagccgctatcgcaaaaaatatcgaagcccggctgattcacatttccaccgattatgtttttgacggaaagggagaccgtccctaccgcgaagacgacgcgacagcccccacaggcgtttacgggttgacaaagagagacggggaaatcgctgtattggaaaacgccccccgctcgtacataatccgcaccgcgtggttatacggcaagcacggcaataattttgtacacaccatgttaaggcttatgaatgagcgggacgaagttaaagtagttaatgaccagcgcggcagccccacatggacttttgatcttgcctccgtgatattaactttgataaaaacagttgattccggcaaagaaatccccttttggcatttaccattttacaaacgagggaaacataacatggtttga

SEQ ID NO: 63290 - protein, 230 aa, Unknown
  Obtained from environmental sample
  DOMAIN (8)...(225): NAD dependent epimerase/dehydratase family
  misc_feature (1)..(230): Xaa is any amino acid
MTDNAGLIWLIGSKGMLGTELSQLFEKTELPFTGTDREVDITDMAALTTAAAKLAEKQPVKWIINSAAYTAVDKAEDDVDICRALNTRGAANIAAIAKNIEARLIHISTDYVFDGKGDRPYREDDATAPTGVYGLTKRDGEIAVLENAPRSYIIRTAWLYGKHGNNFVHTMLRLMNERDEVKVVNDQRGSPTWTFDLASVILTLIKTVDSGKEIPFWHLPFYKRGKHNMV

SEQ ID NO: 63291 - DNA, 417 bp, Unknown
  Obtained from environmental sample
  misc_feature (1)..(417): n is a, c, g, or t
atggaaaagaaaataatagcgggagacgtggtcgtcatccgttacgaggggccaaagggcggtcccggcatgaaggaaatgctcgcccccaccgccgcccttgccggcatgggccttgacgacaaggtcgccctgatcacggacgggcgtttctccggcgcatccaagggcgcgtctatcggccacgtttcgccggaagccgcgaccggcgggaacatcggtattatcaacgagggcgacatcattgccatcgacattgacggtctttccataaacgtaaagataagcgatgaagaaattgagaagcggcggaaaaactggaagcctctttccaagcagaccgccggttaccttgcccgctacgccgcgcaagtcggctccgccgcgcaaggggcggtctttggtaaaggagattaa

SEQ ID NO: 63292 - protein, 138 aa, Unknown
  Obtained from environmental sample
  DOMAIN (1)...(135): Dehydratase family
  misc_feature (1)..(138): Xaa is any amino acid
MEKKIIAGDVVVIRYEGPKGGPGMKEMLAPTAALAGMGLDDKVALITDGRFSGASKGASIGHVSPEAATGGNIGIINEGDIIAIDIDGLSINVKISDEEIEKRRKNWKPLSKQTAGYLARYAAQVGSAAQGAVFGKGD

SEQ ID NO: 63293 - DNA, 765 bp, Unknown
  Obtained from environmental sample
  misc_feature (1)..(765): n is a, c, g, or t
atgaaaagcgattctgtaaacaagggcattgcccgcgcgccgcaccgttcactttttaaggcgttgggatttatcgaggaagaatttaaaaggccccttatcgggattgcctgcgccaagagcgagatagtgccggggcatttgcacctggacaacattgcgcgcgctgtggcggacggcgttcgcatggcgggcggtgtgcctgtaacatttcctgtaatcggcgtatgcgacggaatcgcgatgggtcacgagggaatgagatactccctgccgacaagggaacttatcgccgactctgttgagtgtatggcgacagctcacgcatttgacgcccttgtcttaatcccaaattgcgacaagatagtaccgggtatgctgatggcgtcggcccggcttaaccttccttccgtttttgtttcaggcggccccatgcttgccgggcgcaaggacggtaaaccgttaacgcttaccacaatgtttgaggcggtaggcactcacgccgccggaaagatcagcgaggccgagcttgaagaacttgaaaatctttcgtgcccgggctgcggatcatgcgcgggaatgtttacggcgaactcgatgaactgcgtaaccgaagcgcttggtatggctctgccgggtaacggcactatcccagccgtcatggctgagcgtattcgtctcgccaagaaaacaggaatgttgatcatggacgttcttaaaaaagatctgcgtccgaaaatatacttactcaagcggcgtttatga

SEQ ID NO: 63294 - protein, 254 aa, Unknown
  Obtained from environmental sample
  DOMAIN (31)...(253): Dehydratase family
  misc_feature (1)..(254): Xaa is any amino acid
MKSDSVNKGIARAPHRSLFKALGFIEEEFKRPLIGIACAKSEIVPGHLHLDNIARAVADGVRMAGGVPVTFPVIGVCDGIAMGHEGMRYSLPTRELIADSVECMATAHAFDALVLIPNCDKIVPGMLMASARLNLPSVFVSGGPMLAGRKDGKPLTLTTMFEAVGTHAAGKISEAELEELENLSCPGCGSCAGMFTANSMNCVTEALGMALPGNGTIPAVMAERIRLAKKTGMLIMDVLKKDLRPKIYLLKRRL

SEQ ID NO: 63295 - DNA, 1161 bp, Unknown
  Obtained from environmental sample
  misc_feature (1)..(1161): n is a, c, g, or t
ttgtttatgtatggtacaggcattgttgatcttcgtaaaattgcggaaaaccagtggaaggcgaaatatcagggcaattacggtgtttacaccataaaaattactactgatgggaagaagacagtcaaatattcctgttcctgtcccagcgattattctccctgtaagcacatccatatgatcgaggaagccatcgcaaaaaaaatagcggcagacgataaaaaagaaaattccagcggaatacggttggaagattttatcggaagtgtttcagcagaaaaacttcgcaactttatcataacccaggcaaaatacaatgacgaactaaaaaatgcagttctgctcgaattctcaacgaatgtagggaacgccaaaggtgataaatactcaaagctcataaggacaaccctcgcgtctgtcccccatgatgaagatgattattattgtgaagaatgtctcaatattgacgttttagaccaatggattggcaaagcccgaaattgtgtacgcttgaaacaatacgatgaggcgatactcatctgcaaagccgttattgaagaatactcccagtggctgtataacgttggggaagatgtttccatgattttttccggtgagtaccaatctgttccttttgacattattaaagatacaacagaacacatcgataaaaaagaattgttcaattactgcctcgcggaaatgaaaaagaaaaaatatgaaaatactaatttttatgatggtttccaacggctattggagaaccttgcggtaacggttgatcccgatgcgttcattaccttacaagataaattacttgccgatgtagaagataaaagttcctatgaagctgaaaccattctgaaacggaaaatcagcttttacctgcgcctcggtcagaagaagaaagcatgggagctcatcaaagaaaatatgcagatagaatctttccgcctgaaagcagtaaaacgaaagattgaaaaacaaaactataagacagcgaaaaaactcattaacgaatttatcaatgattatattaattcccatgtgaaagacccggaaaagtatcttaacggcacatggcacggattgctccttgatatcgcccaaaaagaaaacgatatacccgttgtgcgaaagcntgtcatacaggtttattga

SEQ ID NO: 63296 - protein, 386 aa, Unknown
  Obtained from environmental sample
  DOMAIN (30)...(66): SWIM zinc finger
  misc_feature (1)..(386): Xaa is any amino acid
MFMYGTGIVDLRKIAENQWKAKYQGNYGVYTIKITTDGKKTVKYSCSCPSDYSPCKHIHMIEEAIAKKIAADDKKENSSGIRLEDFIGSVSAEKLRNFIITQAKYNDELKNAVLLEFSTNVGNAKGDKYSKLIRTTLASVPHDEDDYYCEECLNIDVLDQWIGKARNCVRLKQYDEAILICKAVIEEYSQWLYNVGEDVSMIFSGEYQSVPFDIIKDTTEHIDKKELFNYCLAEMKKKKYENTNFYDGFQRLLENLAVTVDPDAFITLQDKLLADVEDKSSYEAETILKRKISFYLRLGQKKKAWELIKENMQIESFRLKAVKRKIEKQNYKTAKKLINEFINDYINSHVKDPEKYLNGTWHGLLLDIAQKENDIPVVRKXVIQVY

SEQ ID NO: 63297 - DNA, 936 bp, Unknown
  Obtained from environmental sample
  misc_feature (1)..(936): n is a, c, g, or t
ttgcgactgtgcgttttactcccatttgggaacgccttgccgtttcagccgttatgcgaaaaggccatgattgaagggcttcttaacagcgcggccccgctcatgctggccggcctgggcgcacttatctcggatctttccggcgcgctggcgatttttttagaaggcttcatggtgattggctcgttcttctcctggatatttaccgattggacaggctcggtgttcctggggacattactaagcgcattgcttgcggctctcgccggctgggctttggcgcgttttgtcaggctcagtggggcaaatccgtttatcgcggggctcgccctgaacctcgcggcatcgggagtcacgctttcactttccgcggtctggtttggaacaaaaggagttctgcaaaacccagccataaaaattccgcagcttgtacgcatacctttaattgacggcatccctgttataggaaagatcatctcagggcagagcccattcacatacacagcctgggcttgcgctttgattctggctatagggcttaaaaaaaccgttgtcggtttcaggctccgtgcggtaggcctttcatacgatgccgccgtggaaagaggcatccacagcggtttataccgcgaaggggcctgggccattgctgcgtttctcgccgcacttgcaggagcggccttaaccttccgcgccggttcttactcccccggtggaatagcgggaaggggctggatcgcgcttgctgcggtttatctgggtttcagaaatgtttggggagttgtgcttgcctccctcgtttttaccctggctgagcgtctcggatttagcttgcagaattttggcagtctgagcgccaccgcgcttttgggtctgcccttcgcattggctttgttgttttatttcttttcgctggttgtagggaaacggcggtaa

SEQ ID NO: 63298 - protein, 311 aa, Unknown
  Obtained from environmental sample
  DOMAIN (23)...(298): Branched-chain amino acid transport system / permease component
  misc_feature (1)..(311): Xaa is any amino acid
MRLCVLLPFGNALPFQPLCEKAMIEGLLNSAAPLMLAGLGALISDLSGALAIFLEGFMVIGSFFSWIFTDWTGSVFLGTLLSALLAALAGWALARFVRLSGANPFIAGLALNLAASGVTLSLSAVWFGTKGVLQNPAIKIPQLVRIPLIDGIPVIGKIISGQSPFTYTAWACALILAIGLKKTVVGFRLRAVGLSYDAAVERGIHSGLYREGAWAIAAFLAALAGAALTFRAGSYSPGGIAGRGWIALAAVYLGFRNVWGVVLASLVFTLAERLGFSLQNFGSLSATALLGLPFALALLFYFFSLVVGKRR

SEQ ID NO: 63299 - DNA, 1071 bp, Unknown
  Obtained from environmental sample
  misc_feature (1)..(1071): n is a, c, g, or t
atgaaacttaaaaagcccctgctgaaaattgttgcctcgccgcttctgggccctgtcattgccataggatcggcggttttattagcggtgatactaatccttattaattctgctcgtccggagaaaaccttggccgcttttttcctggggccttggtcttctccgtggttctttggcaataccctggatggaattgccctgctcttaacagcttcgctgggcgcggcaatagcgctgcgcgggggaaccttcaaccttggtggagaagggcagatctacataggcggtttgaccgcttcggtggttttgcttacgcgctcgccttttccgccagtaattctgcttttattcgccgcgttagccgctatgctggctggcagcattatgggtggcatttccgggcttttaaaaaaatacctggacatgaacgaactcatcacttcttttttgttttcttccgccctcatccccctggctgactacctgattagggggccttggcgggattccaccgggaatcttttagcgcttccacccattccgcaaaacctgcttcttgcgcgattgttaccaccttcgaacctttcagtttcgtttgtcttagccctgcttttggttttctccgggcacattttcataaataaaactgtctggggataccgtttcaggatatccggcgctgtccccgactttgctttttacggcggttttgaaagcaagcaggtgtggacgccagctatggccgcgtcaggagccttgtcagccatggcaggatttttcgcggtcgcgggaacttacggtcgctgccacgcgggtttctcaggcggtcttggctggagcgccatcgcagtggcgcttgtcgcggggaatagaccacttgcgttgatacccgctgcgctggtattcggttggctcaagtcaggttccgattttgccctgcttgctgcaggtctcaatatcgaaacctcttcactaattcaggcggcagttctgctttttgcgactgtgcgttttactcccatttgggaacgccttgccgtttcagccgttatgcgaaaaggccatgattga

SEQ ID NO: 63300 - protein, 356 aa, Unknown
  Obtained from environmental sample
  SIGNAL (1)...(25)
  DOMAIN (57)...(335): Branched-chain amino acid transport system / permease component
  misc_feature (1)..(356): Xaa is any amino acid
MKLKKPLLKIVASPLLGPVIAIGSAVLLAVILILINSARPEKTLAAFFLGPWSSPWFFGNTLDGIALLLTASLGAAIALRGGTFNLGGEGQIYIGGLTASVVLLTRSPFPPVILLLFAALAAMLAGSIMGGISGLLKKYLDMNELITSFLFSSALIPLADYLIRGPWRDSTGNLLALPPIPQNLLLARLLPPSNLSVSFVLALLLVFSGHIFINKTVWGYRFRISGAVPDFAFYGGFESKQVWTPAMAASGALSAMAGFFAVAGTYGRCHAGFSGGLGWSAIAVALVAGNRPLALIPAALVFGWLKSGSDFALLAAGLNIETSSLIQAAVLLFATVRFTPIWERLAVSAVMRKGHD

SEQ ID NO: 63301 - DNA, 375 bp, Unknown
  Obtained from environmental sample
  misc_feature (1)..(375): n is a, c, g, or t
ttgaggcgtggacggatggcccgtgtttgccccaaactgttccaaagacacaagggcaacttccagattgacagcaatatgctgcaggacggcgacccaaaagcgttcagccaatcacaagcgaacaacctagagcgcgtcagcatggaatatggcgacaaagacgccgattggctgcgtgaacagacgcattctgaagatccttggaaaatagcccgcagcggcctgtcggctgacgagcgcagcaacaatgtcgtgaccaaggagtccatgcgcctctactacgggggctttttgccagatgaagaagtagaggctatctctaggcagatcatggcggacaacagggaatgctacaaagtcctagcccaatga

SEQ ID NO: 63302 - protein, 124 aa, Unknown
  Obtained from environmental sample
  misc_feature (1)..(124): Xaa is any amino acid
MRRGRMARVCPKLFQRHKGNFQIDSNMLQDGDPKAFSQSQANNLERVSMEYGDKDADWLREQTHSEDPWKIARSGLSADERSNNVVTKESMRLYYGGFLPDEEVEAISRQIMADNRECYKVLAQ

SEQ ID NO: 63303 - DNA, 513 bp, Unknown
  Obtained from environmental sample
  misc_feature (1)..(513): n is a, c, g, or t
atgctacaaagtcctagcccaatgaaaaagctggcaagaaaacagattttggccatgcacacagaattgatcgccgagcatgggggaatagacggcctgcgtgatgaggccttatttgaatcggccctagcggccccattccaaggattcggcggtcaagacctatttgcaatcaaaagagcttcttgcaacccccctatcatttttgaactgcgaagcttcgttgcgctgctgaacaccgcacgtgctcggagggcgcaacctgataacttggctcgtacaccgccggatcatggagttcgcccgaatgtcgaatcatacgccaggcaaccccattatgccgattgggttccgcagcgcggtcatgcgccgcttgagctcgggacgaacatacttgcggcctgttgcgttttgtgccggggtttggaaaagcttcccgaatgctcactggggattcgctcgggtcccactcgcatgcgagcggcccccctcgctgccccccagaccccctga

SEQ ID NO: 63304 - protein, 170 aa, Unknown
  Obtained from environmental sample
  misc_feature (1)..(170): Xaa is any amino acid
MLQSPSPMKKLARKQILAMHTELIAEHGGIDGLRDEALFESALAAPFQGFGGQDLFAIKRASCNPPIIFELRSFVALLNTARARRAQPDNLARTPPDHGVRPNVESYARQPHYADWVPQRGHAPLELGTNILAACCVLCRGLEKLPECSLGIRSGPTRMRAAPLAAPQTP

SEQ ID NO: 63305 - DNA, 528 bp, Unknown
  Obtained from environmental sample
  misc_feature (1)..(528): n is a, c, g, or t
gtgatagagatcgccaaactgccgctagatggcctgcgaatagaaggctctagcgagtttgtgcctcttgaagaaaaggaagcgctgaggggcctctcttggcaactgtttctcatgccgacggacaaagacggctacaaggattttttcttcgacatacgagccgaggccgtctatgagggcttctgctgcagatgccttgaacccattgacacgtctatggcactgcgggcgcagttcttgggcagctccgaccccaatcttgtggccaggggctcgtacatgctaggcgcccaagacctagacgttgtctatctgccagagggtactttggacgaggcggctttggtggcagaacagtttgtgctgcagcgccccatgcatgccctatgcgcggaagactgcaaagggctatgccctcagtgcggcaagaacttgaacaagggccaatgcgcctgccgccccgccggcaatgccccaaatggcgcactggccaaggcgctggcgcaatttgcaattgacagttga

SEQ ID NO: 63306 - protein, 175 aa, Unknown
  Obtained from environmental sample
  DOMAIN (4)...(166): Uncharacterized ACR, COG1399
  misc_feature (1)..(175): Xaa is any amino acid
MIEIAKLPLDGLRIEGSSEFVPLEEKEALRGLSWQLFLMPTDKDGYKDFFFDIRAEAVYEGFCCRCLEPIDTSMALRAQFLGSSDPNLVARGSYMLGAQDLDVVYLPEGTLDEAALVAEQFVLQRPMHALCAEDCKGLCPQCGKNLNKGQCACRPAGNAPNGALAKALAQFAIDS

SEQ ID NO: 63307 - DNA, 1827 bp, Unknown
  Obtained from environmental sample
  misc_feature (1)..(1827): n is a, c, g, or t
gtggaagaaaaaagcaaattaatacgcaacatcgcgattatcgcgcacgttgaccacgggaaaacaacgttggtcgaccagatattgaagcaatgtggggcgttccgcgaaacggaagaagttaccgagcggattatggattcaaacgatttggaacgcgagcggggtataaccattttatctaagaacgcgagcgtattctacaacgagcatcgcataaacgttgtggacactccggggcacgcggattttggcgggcaggtggagagagtgcttggcacggtggatggcgtgcttttggtggtggatgcttttgaagggccaatggcgcagactcgttttgtgactcaaaaagccattgaacttgggcttattcccatagttgttataaataaaatagacagggatggttgcgacccaactggtgctctgaataaagtttttgaccttttctgtgacttgaatgcaaatgaagaacaactagaattcggggttgtttttgcaagcggcagaaagggaacttgccgcttgagcatggacgatgcagacacggatttacggcccttgatggacatgattttaaaacggattcccgctcctacaggcgacccaaaaggaactccgcttttgcaaatagcatcacttgaatattcatcgtttttgggcaggctcgcagtaggcagaatatccaggggaacttggaaaactggaatgaccgtttctcaatcgttgccaaacggaaagttcaaaatcattcgcattcaaaaagttcttcgctacgaaggcattgccccaatgcctgtggaaaatgcaatccccggcgatattgttctgctttcgggtttggataattttgacataggcgatacgctctcttccgttgataatccagaatcgatgcctcgcatacaaattgacccgcctactatttcaatgctgttcaccgtaaacacctcgccacttgcgggcaaaggcggcggaaaattcttgacgggcaatcatcttttggaacgtttggaaagagcgcgcatggcagaccctgcattgctcgttgaaaaaacagatggcgcaagcgcattcaaggtgagcgggcgtggcgttatgcacttaaccatactcatcgaaaatatgcggcgcgagggttatgaatttacaataggcagcccgcaggtgatttttcataaagacgaaaacggcaaggttttggaacccattgagcagttcaaggtggaagttcctgccgagttcagcggtgccgtcatcgaggaattggggaagcgcaggggcgaaatggtgaacatgatccaagacgacagcaatcgtgtttttttggaatacaatgtaccgagcagaggtttgatagggataaggagcttgctgctttcgctttcaaaaggctatgcgatatcacaatctatttttcttgaataccaaccccacaaaggagaaatcccaagcaggacaaacggtgttttaatagcaaaagaccccggcgttgcaagtgcctacgccttgtggaaactggaagaccgcggctatatgattattccgccaggttcggaagtttatgctggaatgattataggcgagcacaacagagacgtggatataatagtaaatgttataaaatcaaagcatttaacgaatatgcgcgccgcaggcagcgatgagaatattctgctgaccccatatcgcaaaatgagccttgaagaatgcgtgactttcataaacgaagatgaatgcgtagagataacgcctaatgtgttacgcgttcgcaaaattgagttgagcgagcataagagaaaagcggcggctaaagaggaatag

SEQ ID NO: 63308 - protein, 608 aa, Unknown
  Obtained from environmental sample
  DOMAIN (9)...(134): GTPase of unknown function
  misc_feature (1)..(608): Xaa is any amino acid
MEEKSKLIRNIAIIAHVDHGKTTLVDQILKQCGAFRETEEVTERIMDSNDLERERGITILSKNASVFYNEHRINVVDTPGHADFGGQVERVLGTVDGVLLVVDAFEGPMAQTRFVTQKAIELGLIPIVVINKIDRDGCDPTGALNKVFDLFCDLNANEEQLEFGVVFASGRKGTCRLSMDDADTDLRPLMDMILKRIPAPTGDPKGTPLLQIASLEYSSFLGRLAVGRISRGTWKTGMTVSQSLPNGKFKIIRIQKVLRYEGIAPMPVENAIPGDIVLLSGLDNFDIGDTLSSVDNPESMPRIQIDPPTISMLFTVNTSPLAGKGGGKFLTGNHLLERLERARMADPALLVEKTDGASAFKVSGRGVMHLTILIENMRREGYEFTIGSPQVIFHKDENGKVLEPIEQFKVEVPAEFSGAVIEELGKRRGEMVNMIQDDSNRVFLEYNVPSRGLIGIRSLLLSLSKGYAISQSIFLEYQPHKGEIPSRTNGVLIAKDPGVASAYALWKLEDRGYMIIPPGSEVYAGMIIGEHNRDVDIIVNVIKSKHLTNMRAAGSDENILLTPYRKMSLEECVTFINEDECVEITPNVLRVRKIELSEHKRKAAAKEE

SEQ ID NO: 63309 - DNA, 1272 bp, Unknown
  Obtained from environmental sample
  misc_feature (1)..(1272): n is a, c, g, or t
atgaggaagcgttttaaggaggcgtgcgttccctctcccgagtttattgtaatagataacaaaagcagtgaaaccggagaagcgcccgctctttccttttcctggcctgtggttgtaaagccggttgataacatgggctcgaggggctgccgaagggtggacggcaaggcggagcttaaagccgctgttgccgaggcgatggccttctcccgttcgggccgcgtgatagtggaagagtacatggaaggcccggagttttcggttgacgcgctggtttaccgcggggaaataaccatctgcggttttgccgacaggcatattttttttccgccttattttatcgagatgggacatactataccttcttcgctcgatccgaccgtaatgcgctcattgatcgaaacctttaataaaggggtaaaagcccttggtattaccaacggcgcggccaagggggacgtcaagctgacatcccgcggacccatgattggggagattgccgcccggctttccgggggctttatgtccggctggacttttccctactcttcgggggtcttgccgacccgtggcgcgattgagatagcccttgggacccaacccagcggccttgaaaataaatggaactggacaagcgccgagcgggcttttatctcgattccgggcaaggtgctttccattgagggcatcgaaacggcgaaagtcatgccctttgtaagggatgttttttcgcgggtaaaaaagggaatggcggtgacttttccggagaacaacgtcacaaaatgcgggaacataatcagcgcagctcccgacagggaaaccgctgttaaagccgcagaaaacgccgcccgctcaattttgatacgcctgcaagcgccaaatgaagaaactgcggcctttttggctgtcccaccatcggaaaagccggtatttccccccgacgccttcgccgttggtaaaaaccttctgtcccttcttgcggccctgccagatacggcgaattttcccgctgaaaagaaacctgtacttttgccctttcccgaattcgtcgaatcggggcttttggactatatgggcaggagcgtaaaagaatcccttgacgcggtgaggcttctgaccggccttagcctgcctatggcttcaaaagaatccctgtcagggggggccacgtctcctgtcttggggcgttccttctggcaggctcttattcgcgggggctatcagggtgtggtgtactacattgattcgataaccaagggagccaatgactaa

SEQ ID NO: 63310 - protein, 423 aa, Unknown
  Obtained from environmental sample
  DOMAIN (1)...(172): D-ala D-ala ligase C-terminus
  misc_feature (1)..(423): Xaa is any amino acid
MRKRFKEACVPSPEFIVIDNKSSETGEAPALSFSWPVVVKPVDNMGSRGCRRVDGKAELKAAVAEAMAFSRSGRVIVEEYMEGPEFSVDALVYRGEITICGFADRHIFFPPYFIEMGHTIPSSLDPTVMRSLIETFNKGVKALGITNGAAKGDVKLTSRGPMIGEIAARLSGGFMSGWTFPYSSGVLPTRGAIEIALGTQPSGLENKWNWTSAERAFISIPGKVLSIEGIETAKVMPFVRDVFSRVKKGMAVTFPENNVTKCGNIISAAPDRETAVKAAENAARSILIRLQAPNEETAAFLAVPPSEKPVFPPDAFAVGKNLLSLLAALPDTANFPAEKKPVLLPFPEFVESGLLDYMGRSVKESLDAVRLLTGLSLPMASKESLSGGATSPVLGRSFWQALIRGGYQGVVYYIDSITKGAND

SEQ ID NO: 63311 - DNA, 495 bp, Unknown
  Obtained from environmental sample
  misc_feature (1)..(495): n is a, c, g, or t
atgacggaaaaaagtctttttgctggatttggtggtcaaggagtaatatcattaggtcaactttgggtctattttgccatgcaggaagggaaaaatgttactttctttccattttacggggcggaaaagcgcggaggcatcgccagagcgggtgtaatcgtctccgatgatgaaattgcaagccctcttgtgacaattcccgactctgcgctggttatgaactcggattctctgcccgtttgcgagaaaattctcaagaaagacggtctgatcgtgataaattcgactcttgttaaggaagctccgtccagatcagacctaaaaatcgtaaaaatcgacgcttccggcatcgcggaacagataggaaatctgctttttgccaatatggtagctctcggagcgatggcaaagctaacgaaagccctgaatttgaccgatattgaaggtgtgttaaagaaattctttccgtccgacaaacaccagttcgaccaataa

SEQ ID NO: 63312 - protein, 164 aa, Unknown
  Obtained from environmental sample
  DOMAIN (11)...(163): Pyruvate ferredoxin/flavodoxin oxidoreductase
  misc_feature (1)..(164): Xaa is any amino acid
MTEKSLFAGFGGQGVISLGQLWVYFAMQEGKNVTFFPFYGAEKRGGIARAGVIVSDDEIASPLVTIPDSALVMNSDSLPVCEKILKKDGLIVINSTLVKEAPSRSDLKIVKIDASGIAEQIGNLLFANMVALGAMAKLTKALNLTDIEGVLKKFFPSDKHQFDQ

SEQ ID NO: 63313 - DNA, 759 bp, Unknown
  Obtained from environmental sample
  misc_feature (1)..(759): n is a, c, g, or t
atgaaaaaattatacggacaccccgaaagtttaaaaacggtgcagaccaaatactgcggcggctgcggacacggaataatccacagaattcttacaagcataatagatgaaatgggtttaagagaaaagacaatcataacccaccctgtaggctgcgccatttgggcggatttgtactttgatttcgattcggtacagccgccgcacggacgcacgcccgccgccgcaaccggcgtaaagcgcgttcactccgatcaccttgtaatttgttatcagggagacggcgacatggcggctatcggaacggcggaaatggttcacgccgcaaaccgctctgaaaaatttacaacgatttttgttaacaacgcgatttacggcatgacaggcgggcagatggctcccactacattgattggtcaaaaagcggcgaccgccccacgcggacgcgacgctgacaaagcgggaatgggctacccaatcagggtttgcgaacttcttgccactttggaagggacgcgctacatcgccagaggctccgtccacaacgcggcgaatatccgcaagaccaaacagtacataaaaaaggcatttgaagcgcagatggcgggaattggaagcacaatggtagaaattctttccccctgccccacaaattggaacatggaccccgtacaagctgtcgaatggctggaaaaaagcatgatccctgtgtttccgctgggcgaggtgaaaaacacacttgaaggagcaacaaaatga

SEQ ID NO: 63314 - protein, 252 aa, Unknown
  Obtained from environmental sample
  DOMAIN (49)...(211): Thiamine pyrophosphate enzyme, C-terminal TPP binding domain
  misc_feature (1)..(252): Xaa is any amino acid
MKKLYGHPESLKTVQTKYCGGCGHGIIHRILTSIIDEMGLREKTIITHPVGCAIWADLYFDFDSVQPPHGRTPAAATGVKRVHSDHLVICYQGDGDMAAIGTAEMVHAANRSEKFTTIFVNNAIYGMTGGQMAPTTLIGQKAATAPRGRDADKAGMGYPIRVCELLATLEGTRYIARGSVHNAANIRKTKQYIKKAFEAQMAGIGSTMVEILSPCPTNWNMDPVQAVEWLEKSMIPVFPLGEVKNTLEGATK

SEQ ID NO: 63315 - DNA, 1065 bp, Unknown
  Obtained from environmental sample
  misc_feature (1)..(1065): n is a, c, g, or t
atgggcgaaaaagttttaatgaagggaaatgacgccatcgcggaagccgcgataagggcgggctgcggcgcgtactttggttatccgatcacgcctcagaacgaacttattgcctacatggcgaaacacatgcttgatcgcggacgcatttttattcaggcggagagcgagatagcggctatcatcatggtatacggcgcggcttgcgcgggtgtgagggcgatgaccagttcctcaagccccggcataagtcttaaacaggaaggaatatcctacgccgcgggcgcggatgttccgcttgtagttgcgaatataaaccgcggaggaccggggcttggaaacattgcccctgcgcagagcgattattttcagtcaacgcgcggaggcggacacggcgattacagatgtattgttcttgcgccgaaaaatgtgcaggaatgcgccgacctaacttaccttgctttcgatcttgccgagaaataccgaatgcctgtgattattcacgcggacggaatgatcgggcagatgatggaagggtgcgtactgcctcaggagaaaacagtccaaaaatattcatggtcagcgggcggcatggcaaaagaaaaaagagacgcagttcacataacgtctatcgagcttgatcctgtaaaacttgaaactcaaacaaaaaaacgatttgtccgttacgagacagtaaaagcctccgaaattcgctacgaagaaaacaactgcgccgacgccgatatgattttagttgcctacggcacttgcgcccgcgtatgtctcggcgcgcagatgattgcgaaaaacgaaggaatcaaactcggcattttcagaccgatcactttgtggccgtttccttacgacgctctcggaaaagccgccgcaagcggaaaacctgttttaacagtggagatgtcggaagggcagttagttgaagatgtaaaattatcggcttactatgccggttcaaaatccgacattcatcttttaccccactcaggcggaattattcccgccgaggaagaagtgtttgccaaagtaaaggaaatattaaagaaatga

SEQ ID NO: 63316 - protein, 354 aa, Unknown
  Obtained from environmental sample
  DOMAIN (15)...(241): Pyruvate flavodoxin/ferredoxin oxidoreductase, thiamine diP-binding domain
  misc_feature (1)..(354): Xaa is any amino acid
MGEKVLMKGNDAIAEAAIRAGCGAYFGYPITPQNELIAYMAKHMLDRGRIFIQAESEIAAIIMVYGAACAGVRAMTSSSSPGISLKQEGISYAAGADVPLVVANINRGGPGLGNIAPAQSDYFQSTRGGGHGDYRCIVLAPKNVQECADLTYLAFDLAEKYRMPVIIHADGMIGQMMEGCVLPQEKTVQKYSWSAGGMAKEKRDAVHITSIELDPVKLETQTKKRFVRYETVKASEIRYEENNCADADMILVAYGTCARVCLGAQMIAKNEGIKLGIFRPITLWPFPYDALGKAAASGKPVLTVEMSEGQLVEDVKLSAYYAGSKSDIHLLPHSGGIIPAEEEVFAKVKEILKK

SEQ ID NO: 63317 - DNA, 321 bp, Unknown
  Obtained from environmental sample
  misc_feature (1)..(321): n is a, c, g, or t
atgtcccggcgcaaaatgatggatcaggtgccgcaggcgtcggtggtggtgacgaaccctacgcacttggccatagcgttgctctacgatccggaaaagaacgacgcgccgcttgtggtggccaagggcaaggatctgctggcgcttaggataaagaagattgcggaggagaacgacgtcccgctgtatgaagataaaccgttggcgcgggctatgtacgacatggttgaggtcgggagcccgataccgggggagttttttgaggccgtggcgcagattatcgcgtatgtttacaagcttaaggggaagaaagccggttga

SEQ ID NO: 63318 - protein, 106 aa, Unknown
  Obtained from environmental sample
  DOMAIN (1)...(98): FlhB HrpN YscU SpaS Family
  misc_feature (1)..(106): Xaa is any amino acid
MSRRKMMDQVPQASVVVTNPTHLAIALLYDPEKNDAPLVVAKGKDLLALRIKKIAEENDVPLYEDKPLARAMYDMVEVGSPIPGEFFEAVAQIIAYVYKLKGKKAG

SEQ ID NO: 63319 - DNA, 1197 bp, Unknown
  Obtained from environmental sample
  misc_feature (1)..(1197): n is a, c, g, or t
gtgttcggaacctcgctcgccgaggtaaaccgcctgcaggataacgttgtatccctccaggtattcgccgggggtaggggcatttcaaccggcgataccgtccgttttttggggcggcctatgcaggtgccgttttcagaaaaccttttgggtcgggttttttccggttccggcaaaccgcgggacaagggccctgctttgcatgacaatatgattcccataggcggcccgtcggttaacccttctgaacgtatcatccccagaaaaatgatccgcaccggtattccgatgatcgacctgttcaacaccctggtcgtttcgcaaaagctgcctattttctcagtatcgggcgagccgtacaacgagcttttagcccgcatcgctatgcaggctgaagttgacgttatcgttttgggcggcatggggctaaaatacgacgattaccttacatttaaggatacgcttgaaaacgcgggcgccctggcgcgaaccgtaatgtttatgcacaccgccagcgacccgacagtcgagtgtcttatgatacccgatatgtcgctggctgtcgccgaacagttcgccttgcagggcaaggacgtgctggtgcttcttaccgacatgaccaactttgcggacgcgatgaaggaaatatcgatcatacaggaacaagtcccaagtaaccgcggatatccgggcgatctttacagccagcttgcgagccgctatgaaaaagccgttgactttgaaactgcgggttctataacagttctcggcgttactacaatgccgggcgatgacgtaacgcatcctgtgcccgacaatacaggatacataacggaaggccagtactatcttaaaaacggccgtattgagccgttcggctcactttcccgtcttaaacagcaggttaacggcaaaacgcgcgaagaccaccgcgcgcttatggacggcatgatcaaactttattcggctttccgcgacactatggaaaagaaagcgatgggctttatcatgaccaactgggacgagaaacttttaaaatacggcgatcaatttgaaaaaaggatgatgtctctttccgtaaatattccgttggaaaaagcgctggatcttgggtgggagattttatcttcctgctttaaccctgaagaaacaggattaaggacagaacttataaataaattttggccgaaaaattag

SEQ ID NO: 63320 - protein, 398 aa, Unknown
  Obtained from environmental sample
  DOMAIN (93)...(296): ATP synthase alpha/beta family, nucleotide-binding domain
  misc_feature (1)..(398): Xaa is any amino acid
MFGTSLAEVNRLQDNVVSLQVFAGGRGISTGDTVRFLGRPMQVPFSENLLGRVFSGSGKPRDKGPALHDNMIPIGGPSVNPSERIIPRKMIRTGIPMIDLFNTLVVSQKLPIFSVSGEPYNELLARIAMQAEVDVIVLGGMGLKYDDYLTFKDTLENAGALARTVMFMHTASDPTVECLMIPDMSLAVAEQFALQGKDVLVLLTDMTNFADAMKEISIIQEQVPSNRGYPGDLYSQLASRYEKAVDFETAGSITVLGVTTMPGDDVTHPVPDNTGYITEGQYYLKNGRIEPFGSLSRLKQQVNGKTREDHRALMDGMIKLYSAFRDTMEKKAMGFIMTNWDEKLLKYGDQFEKRMMSLSVNIPLEKALDLGWEILSSCFNPEETGLRTELINKFWPKN

SEQ ID NO: 63321 - DNA, 606 bp, Unknown
  Obtained from environmental sample
  misc_feature (1)..(606): n is a, c, g, or t
atggcaaagatcaggctcacaaaaaacgagctgaaaaaacaaaaagactcgcttaaaatgtacaagcgttatcttcctacgctgatgctgaaaaaacagcagttacagggcgaaatacgtttgacagaactgcgtcttaaagaattgaagaccgccaaggataatcttgatgaatcttttaaaacatggatcggcgtttttggtgaaaaggggttttttacagagagcatattgaaaattacaagcctgcgtacggggcatggaaatgttgccggcgttgtaataccgatatttgagggcgcggattttgagatagagcaatatgaccttgcgcgtactccggcgtggcttgataaagcagtcgaagctatgaaacaggcgctcttgctcgaccttgaatcgcagattgtcgaagaacagcgcaataggctggaacgcgaactgcggacaaccactcaaagggtaaacctttttgaaaaggttaaaattccgcagacaatgggcaatattaaaaagattcaggtttacttaggcgatcagcagactgccgccgttgtacgcggcaaaatagcgaaaagcggaaccgaaaaggcggcggctatatga

SEQ ID NO: 63322 - protein, 201 aa, Unknown
  Obtained from environmental sample
  DOMAIN (2)...(196): ATP synthase subunit D
  misc_feature (1)..(201): Xaa is any amino acid
MAKIRLTKNELKKQKDSLKMYKRYLPTLMLKKQQLQGEIRLTELRLKELKTAKDNLDESFKTWIGVFGEKGFFTESILKITSLRTGHGNVAGVVIPIFEGADFEIEQYDLARTPAWLDKAVEAMKQALLLDLESQIVEEQRNRLERELRTTTQRVNLFEKVKIPQTMGNIKKIQVYLGDQQTAAVVRGKIAKSGTEKAAAI

SEQ ID NO: 63323 - DNA, 687 bp, Unknown
  Obtained from environmental sample
  misc_feature (1)..(687): n is a, c, g, or t
ttggcgggatattggcctttactcgcggaaattcccaacgacgacaaggccgagcgaattataagcaggctttctgatccgaaatatttcggggcgccgcatccctttccctgcgtggctataaacgaaaagtcttttgatgaaagcggtaatggctacaggggctctgttttcccgcaccttacatttatggtgataaaaggccttgaaaggtaccagcgctgggatctctcaagggacagcgccataaggcacctttattttatccttgactccatgagccccgacgggaaccaccataaagacaggctctgggaggcttaccttcccatgaaggaagggcctgcacaatggccggggagagatgattttccccggccgcaataccttacctacgccgccctttcgacaatttgccttaccatagaaaatataataggtcttttaatctccctgccgcgaaagactgttgactggattatcccgaatctggaaataatggggatagaaaacctttcgctcaaaaagaatatgatcacgattttgtcgaataaaagcgggcggggttgggaaatccatatggaaagcgaaaagctttattattttacgattaatatattaggaaaaaagaaaaaaaccctgccaattccatcgggcaagtgttcaatgctgattgacaagttataa

SEQ ID NO: 63324 - protein, 228 aa, Unknown
  Obtained from environmental sample
  misc_feature (1)..(228): Xaa is any amino acid
MAGYWPLLAEIPNDDKAERIISRLSDPKYFGAPHPFPCVAINEKSFDESGNGYRGSVFPHLTFMVIKGLERYQRWDLSRDSAIRHLYFILDSMSPDGNHHKDRLWEAYLPMKEGPAQWPGRDDFPRPQYLTYAALSTICLTIENIIGLLISLPRKTVDWIIPNLEIMGIENLSLKKNMITILSNKSGRGWEIHMESEKLYYFTINILGKKKKTLPIPSGKCSMLIDKL

SEQ ID NO: 63325 - DNA, 900 bp, Unknown
  Obtained from environmental sample
  misc_feature (1)..(900): n is a, c, g, or t
ttgacaagttataaagaaatggaaacaaagaatcgcctggtcgcggtgctggaaatcggttccacgggtatcaggctattggtagctgaaatttttcccgacggccgctggcaggaagtagacagggcaaacaggcctgtagcccttggccgtgacgtatttacaaccgggcaggtctcgcgggagtcctttctggaatgtatcacgatgctgaaaaacttccgggagttcctccgcagttggcttatcgacgactctgatattcacgcgatagccacaagcgccttgagggttgcgcgtaaccgcgaggtctttgtggacagggtaaagcaggaaaccggccttatgctcgccatagtagacggaattgaagaaaaccgcttgatgtacctggctgtgcgctttgcccttaaaaacgattggccgcttttttggcgggccaattcaatgatccttgaaattggcgggggctcaaccgagatcatgctcttaaggcgggggcagatggtagctgtccacagcctcaggctggggaccatacttatcgatcaggccgcaaggattgggactccacaagggcaggagcgctacataagcgagcacatcagaaacacatcgggctttctttcttccgaacttgacctcgcccatgtccgtacctttgttattgtcggatccgatgccgctattgccgccgccaatgtgggaagcacacttaacgaaaattgctggatcatcgcaagggacgcttttaatgaatttgtaaagaaggttcagaattatactgttgaggaatgtaccgaacagctccagttgccgttttgggaggcaaaaacttttattcccggcattacgataataagcttcttttggatcggaccggttccgcccaggtggtag

SEQ ID NO: 63326 - protein, 299 aa, Unknown
  Obtained from environmental sample
  DOMAIN (27)...(298): Ppx/GppA phosphatase family
  misc_feature (1)..(299): Xaa is any amino acid
MTSYKEMETKNRLVAVLEIGSTGIRLLVAEIFPDGRWQEVDRANRPVALGRDVFTTGQVSRESFLECITMLKNFREFLRSWLIDDSDIHAIATSALRVARNREVFVDRVKQETGLMLAIVDGIEENRLMYLAVRFALKNDWPLFWRANSMILEIGGGSTEIMLLRRGQMVAVHSLRLGTILIDQAARIGTPQGQERYISEHIRNTSGFLSSELDLAHVRTFVIVGSDAAIAAANVGSTLNENCWIIARDAFNEFVKKVQNYTVEECTEQLQLPFWEAKTFIPGITIISFFWIGPVPPRW

SEQ ID NO: 63327 - DNA, 756 bp, Unknown
  Obtained from environmental sample
  misc_feature (1)..(756): n is a, c, g, or t
atgtaccgaacagctccagttgccgttttgggaggcaaaaacttttattcccggcattacgataataagcttcttttggatcggaccggttccgcccaggtggtagtcccgaaaatttccatcagggaagggcttttaatcgatctgtctcagggcgtcgatccggcattgcaggaggatttcttttcgcagatcttcgcctctgccgttaatcttggcagaaaataccatatcgatgaatcccattgccgccatgtggcatcgctgtgcatgtccctgtttgacgctttgattcgggaacatggaatgaacaggcgggaaaggatgctgcttgaaatagcggcaatggtacacgatataggaatgtacatcagggcggcagcccataatttgcatggccagtacatcatagccaattccgagatttttggcctcaggcgggaagagctggatatgataggcaatgttattcgctatcaccgggggccgcctccgtctccgaccgatatcgattacatcgcgcttcagagggaggaacgtatccttgtgctgaagatggtttctttattgcgggttgcggatgcgctggacaggggacattcacagcaggtaaagataaaagcggtggaaaaaaagggcgagattctggtgcttaataccgacacgaccctggatctttccctggaacttatggggctggaagaaaagagcggcgtgtttcaggatgtatttggctataaagtagtgattaattaa

SEQ ID NO: 63328 - protein, 251 aa, Unknown
  Obtained from environmental sample
  DOMAIN (79)...(199): HD domain
  misc_feature (1)..(251): Xaa is any amino acid
MYRTAPVAVLGGKNFYSRHYDNKLLLDRTGSAQVVVPKISIREGLLIDLSQGVDPALQEDFFSQIFASAVNLGRKYHIDESHCRHVASLCMSLFDALIREHGMNRRERMLLEIAAMVHDIGMYIRAAAHNLHGQYIIANSEIFGLRREELDMIGNVIRYHRGPPPSPTDIDYIALQREERILVLKMVSLLRVADALDRGHSQQVKIKAVEKKGEILVLNTDTTLDLSLELMGLEEKSGVFQDVFGYKVVIN

SEQ ID NO: 63329 - DNA, 921 bp, Unknown
  Obtained from environmental sample
  misc_feature (1)..(921): n is a, c, g, or t
atgagcgataaagcaagtaatggcgaatccgaaaatattccttcccctgttttttttaaccgggaattatcctgggtagattttaatgaacgcgtgctggacgaagggcttaggaaggatctgccgccgcttgagcgtttcaggtatctttcgatagtctcatccaatttcgatgagttttttatggttcgcgtggcggcaataaagcgctccggggaagacgctgaaagccaggcccttcgcccgccggagctgcttgacaggatatgtcagaaagtccgctcaattgtaagccgccagtatgaagcgcttgtggaggaaatttttccggatcttgccaggggcggcttaactctcaggcgtccaaacgaatggacagattcgcagcggaattacctggaatctttttttgcaagggaagtttttccccttttgacgcccctgcgggttgaagaaaccgaagacctgccttcaatagacggctattcactctacgccggttttttcatgaaagcggaaaccgcattggatatagggccgcctgcggaagattgtatttccataatacgcatcccgcaggctccagaccaggtcatttttcttccgagggagaaggaagaccatgaagatgaggatatggggcaggtttattgggcgttgcttgaggatctggtagaaacctggggcagttacctttaccctggctacaaggtatttgaaagcctgatttttaaagtcaatcgcgacgctgatttttccgtggacgagcagagggacgaggactttatagaagcgatggaggaagtgctcgaaagccgcgggcgctcgatgcctgtgcggatggtttattcgccgggaagcgtaaaaatccgggactgcctggctcaaaagctttccctggcgggaaaaagatctctttga

SEQ ID NO: 63330 - protein, 306 aa, Unknown
  Obtained from environmental sample
  DOMAIN (14)...(306): Polyphosphate kinase
  misc_feature (1)..(306): Xaa is any amino acid
MSDKASNGESENIPSPVFFNRELSWVDFNERVLDEGLRKDLPPLERFRYLSIVSSNFDEFFMVRVAAIKRSGEDAESQALRPPELLDRICQKVRSIVSRQYEALVEEIFPDLARGGLTLRRPNEWTDSQRNYLESFFAREVFPLLTPLRVEETEDLPSIDGYSLYAGFFMKAETALDIGPPAEDCISIIRIPQAPDQVIFLPREKEDHEDEDMGQVYWALLEDLVETWGSYLYPGYKVFESLIFKVNRDADFSVDEQRDEDFIEAMEEVLESRGRSMPVRMVYSPGSVKIRDCLAQKLSLAGKRSL

SEQ ID NO: 63331 - DNA, 438 bp, Unknown
  Obtained from environmental sample
  misc_feature (1)..(438): n is a, c, g, or t
atgagagtctttaaatacctcgtcggggtttgggctgcgatagttgtttacacgcttttctcctttcttggcggtccttcaggcttgtcttcatacaattatctgttagccgagaaagaacggcaatgtgagaatataaaagatttgggtataataaacgaggaacttgaaagaacaaggtttaatttacagtacgatcaggataccatgattgttcaggcgcgccaaatgggttacggtcagcctgatgagcgttttatcagaattgtcgggcttggtgtccctaaatctacccctattacagccggaaatatatattcaacctcatatcccgactatatttccgataaacacattaaaatagccgccctttgcgccggtttattgatttttgcctttattttgatgatggaaattatcgaaaaaaagtcacgttaa

SEQ ID NO: 63332 - protein, 145 aa, Unknown
  Obtained from environmental sample
  DOMAIN (14)...(92): Septum formation initiator
  misc_feature (1)..(145): Xaa is any amino acid
MRVFKYLVGVWAAIVVYTLFSFLGGPSGLSSYNYLLAEKERQCENIKDLGIINEELERTRFNLQYDQDTMIVQARQMGYGQPDERFIRIVGLGVPKSTPITAGNIYSTSYPDYISDKHIKIAALCAGLLIFAFILMMEIIEKKSR

SEQ ID NO: 63333 - DNA, 462 bp, Unknown
  Obtained from environmental sample
  misc_feature (1)..(462): n is a, c, g, or t
atggctgaaggcgtaaaaataatcgctcagaaccgtaaagcgcggcacgattattctgtggacgaaacctatgaatgcggcatagagcttttggggacagaggtaaaatcgttccgcgacggaaaaatctccttccccgactcgtgggcggaagtgataaacggcgaagtatggctgcgctcgctgatagtcgctgaaaatccgttttcatcgatttttaaccacgagcctgacagaaaaaaacgcctgcttttgcacaaggacgaaataaaaagaatacagcgaaaagttgaagaaaagggatatactcttatcccattgtcattttattttaaaaaaagcagggtaaaagtggaaatcggactgtgtaagggtaaaaaagcctatgacaaacgggctggaattcgggaaaaagacataaaacgtgaaattgcccgtgaattcaggcatggattacaataa

SEQ ID NO: 63334 - protein, 153 aa, Unknown
  Obtained from environmental sample
  DOMAIN (6)...(73): SmpB protein
  misc_feature (1)..(153): Xaa is any amino acid
MAEGVKIIAQNRKARHDYSVDETYECGIELLGTEVKSFRDGKISFPDSWAEVINGEVWLRSLIVAENPFSSIFNHEPDRKKRLLLHKDEIKRIQRKVEEKGYTLIPLSFYFKKSRVKVEIGLCKGKKAYDKRAGIREKDIKREIAREFRHGLQ

SEQ ID NO: 63335 - DNA, 1161 bp, Unknown
  Obtained from environmental sample
  misc_feature (1)..(1161): n is a, c, g, or t
ttgccggaaacgcccgcaggcgagcttaaaaacgcgaaagcgcttgcctacaaacgcccattgtttgaattctcgggcgcttgcggcggatgcggcgagaccccctacgttaaacttatgtcgcagttattcggcgaccgcgcaatcatagccaacgccacgggctgttcctccatttacggcggaaacctcccgactacgccgtactgccagcgcgcggacggacgcggaccggcatggtctaacagcttgttcgaggacgccgccgaatttgcgatgggcttccgccttacaagcgacaagctcgctgtccatgcccgcgaaattgccgagaaggcaaagagcgaaggcattgcggcggcaacaatcgacaagattctttccaacaaccaagccgacgacgcggcgattgacgaacttcgcaaaaacattgacgcgcttaaagccgagcttaaaaacaactccaaacccaccgcgaaacttcttgtttcgttagctgactattttgtaaaacgttccgtttgggcgttcggtggcgacggttgggcttacgacatcggcttcggcggactggatcatgttatcgcttccggcaagaacgtaaaccttttgtgcatggataccgaggtttattccaacaccggcggacagatgtccaaatcgactcctgtcggcgctatagcgaaatttgccaatgcgggaaaagacattacaaagaaagacttaggcgcgatagcgatgagctactgttatgtgtatgtcgccaaagtttcgttaggcgcggatatgaatcaggtaatcaaagctatccgtgaagcggaatcttacgacggcccctcgctcattatcgcttactcccattgtttacagcagggtatcgacatgagccacggaatggatcagtcaaaagcggcggttacttccggtatctggccgatttatcgttacgatccgcggcttaaagccgagggcaaaaaccccttccagctggattgtaaagatcccacaacgagccttgaagactttatgtacaaagaagtgcgctttaagagccttaaggccgccgatccaaagcgggccgacgctcttttggccaaggccaaagctcagaccgaaagggtctggaaggaatacaagtatctggctgaaagacctttttag

SEQ ID NO: 63336 - protein, 386 aa, Unknown
  Obtained from environmental sample
  DOMAIN (157)...(284): Thiamine pyrophosphate enzyme, C-terminal TPP binding domain
  misc_feature (1)..(386): Xaa is any amino acid
MPETPAGELKNAKALAYKRPLFEFSGACGGCGETPYVKLMSQLFGDRAIIANATGCSSIYGGNLPTTPYCQRADGRGPAWSNSLFEDAAEFAMGFRLTSDKLAVHAREIAEKAKSEGIAAATIDKILSNNQADDAAIDELRKNIDALKAELKNNSKPTAKLLVSLADYFVKRSVWAFGGDGWAYDIGFGGLDHVIASGKNVNLLCMDTEVYSNTGGQMSKSTPVGAIAKFANAGKDITKKDLGAIAMSYCYVYVAKVSLGADMNQVIKAIREAESYDGPSLIIAYSHCLQQGIDMSHGMDQSKAAVTSGIWPIYRYDPRLKAEGKNPFQLDCKDPTTSLEDFMYKEVRFKSLKAADPKRADALLAKAKAQTERVWKEYKYLAERPF

SEQ ID NO: 63337 - DNA, 1524 bp, Unknown
  Obtained from environmental sample
  misc_feature (1)..(1524): n is a, c, g, or t
atgcctgatgtcattgataaggtaatgtctcttatttccagggacggcgaaggcgattcggaaaaagacgtactgctaaagcagatagccaaagaaatttctcaaaacaaatacgccaaattttaccgtgtaaggcagtcggaggcggatatttctttggggcagctcttttacaatctttataagctgatttaccctttgcaagtttttctgaaggaccctgccaaagaagctaaaataaggcagatcacccttgaggcttttctggataaaaagacgatggatcttatcaagaagctcagccacgaagcaatgaatgaaattataagatctggaggcgatgttgtaaaaattctgcaagatgatcttgccgctctaactaaaggatttgacagtcccaaaattgccgcggcggacagatgctataaccttattgcttccatgaagcagtttgttttttttgattttagttccgctatcagaaaattcgacccggagtttaaagaaggcgattttcttacccaattgaagtttgtcccggtggatatttcagttttggcttcagatttatctgtttttttgtctgttctgcctttggcagggaaagatgacgactggaaaaccatttttgaaattttaaagtattgcaaaggcgggaccgatgttattcccctggcgcagtggacaaatgttttagtgaatttagccgatcttaaacattccaggatttttgagcttctcgggaggcttgcgacaggcaacccggttctggagatcaaacctaacgttccgcatgaagccttatcagcaatttggctggaacataagaccagcgaaataagggaaatgatcgacagcattaacgaggttcagaggcaagcccagataaactcccttgagcaggcgatttttggtccccttgcggttatacggcttagtttttatactccggaaaggggaaaggcccttcaagaaaggggggttgatggctatagctacgccatgacgctgaaccatctaatggcgtacattcaggaattcctcagcaaagagattcaggagctgtgcgacatactcttggtccgcggccaatggacgaacaacgccgcttcgcggactatgtcagacgcttttcatacagtcattgatgttaccgggaaaataaccgaattggacgaaagcctctctgaagaaggcagcaacggcccccgcctcaagggcgcgctgctcaggattgacagggacaagacccaaagtcggtatatacacagcatcatcagcatggtaaacgaagaagccctggtcataatcaacaaggctgtgcctgcccttattgtagtaggcaagcattttaagatgctgatagaagactgcgaaaagaaaccttttgagttaattatgaactggaaagagctgaattcagtaacaaagatacctatgggccaaagaatgagtgtggcttataagaaattaactttgtttgtgcagcttatgacaatggaaaaaaccccaatagaagaatga

SEQ ID NO: 63338 - protein, 507 aa, Unknown
  Obtained from environmental sample
  misc_feature (1)..(507): Xaa is any amino acid
MPDVIDKVMSLISRDGEGDSEKDVLLKQIAKEISQNKYAKFYRVRQSEADISLGQLFYNLYKLIYPLQVFLKDPAKEAKIRQITLEAFLDKKTMDLIKKLSHEAMNEIIRSGGDVVKILQDDLAALTKGFDSPKIAAADRCYNLIASMKQFVFFDFSSAIRKFDPEFKEGDFLTQLKFVPVDISVLASDLSVFLSVLPLAGKDDDWKTIFEILKYCKGGTDVIPLAQWTNVLVNLADLKHSRIFELLGRLATGNPVLEIKPNVPHEALSAIWLEHKTSEIREMIDSINEVQRQAQINSLEQAIFGPLAVIRLSFYTPERGKALQERGVDGYSYAMTLNHLMAYIQEFLSKEIQELCDILLVRGQWTNNAASRTMSDAFHTVIDVTGKITELDESLSEEGSNGPRLKGALLRIDRDKTQSRYIHSIISMVNEEALVIINKAVPALIVVGKHFKMLIEDCEKKPFELIMNWKELNSVTKIPMGQRMSVAYKKLTLFVQLMTMEKTPIEE

SEQ ID NO: 63339 - DNA, 360 bp, Unknown
  Obtained from environmental sample
  misc_feature (1)..(360): n is a, c, g, or t
gtggttgcagagtttgatcttccatttgcattcccctcggttgcatttttgttttgtgtgttagccgcatctgcatcatccaaagcgacggcgatttcatcgtccacgtcatcgcttaatccttccgcatcatcaagtaattcttccacttcacctaaagcctcttgcactgttgggtctacctcttccggtggtggctcattgggcggacttggattagttggatcagttggactagtaggctcagtgggctcagtgggctcagtgggctcagttggctcagtggacccagttggctcagtgggctcagtggacccagttggctcagttggagcagttggagcagttggctcactgtaa

SEQ ID NO: 63340 - protein, 119 aa, Unknown
  Obtained from environmental sample
  SIGNAL (1)...(28)
  misc_feature (1)..(119): Xaa is any amino acid
MVAEFDLPFAFPSVAFLFCVLAASASSKATAISSSTSSLNPSASSSNSSTSPKASCTVGSTSSGGGSLGGLGLVGSVGLVGSVGSVGSVGSVGSVDPVGSVGSVDPVGSVGAVGAVGSL

SEQ ID NO: 63341 - DNA, 1395 bp, Unknown
  Obtained from environmental sample
  misc_feature (1)..(1395): n is a, c, g, or t
atgaacggcggaactatatcggacaactctgcagacggagatggctgcggcgtgtgtgtctacagtggaacttttaccatgaataacaacgcggcaatagaaagaaatttttcatcaagcaattcttatggcggcggcgtgtatgtgtacagcggcgcttttataatgaatgatgacgccgcaataaaaggtaatacctcaagtgttggcggcggcgtgtatgtatatggcggctattctccggcaacctttaccatgaacggcgggactatagcggtcaacgaaacaacaggatacggattgggcggcggcgtgtttgtaggcggtaactttgaaatgaaaggcggcgatataatgaacaataccgcagctaaacagggcggcggcgtgtgtgtagatagcagcggaaattttaaaatgagcgggggcaagatttacggcgttgatgatacgaatgtgccgtccctatcaaatattgcgaacggcacaaatcccaaaggcgtagcattgtacaatagcggcggaacagctaagtatgacggcgcttatgcgtcctatggaaccattactaccaccgatgatacttngcgccgaaaacctattaccagtcctgcaataggtgaaatggtttcgatacctgccggaacatttataatgggtagtccaacgtccgaaacgaacagagaaagcaatgaaacacaacattctgtaacgcttagtggttttaaaatgagcaaatatcaagtaacgcaagaacagtatcaggcggtaatgggaagtaatcccagcgtttttagttctaacccgcaaaatcttgaaactcagagtaagcgtccggtggagaatgtaacgtggtatgacgcgatagagttttgcaacaaattgagcataaaggaagagttgcagtcagtgtatacgataagcgggaggacgcctgcaaccgggtatcctataaccaatgcgacggtaactgcggattttaccaaaaatggctaccgtttaccgaccgaggcgcagtgggaatatgcctgccgcgccgggacgacaatggcatttaacaatgggaataatgattataccaatgccgcttcggtaggcgcggtggcgtggtctgacagtaacagcggagagaagacacatcaggtaggattaaaatctgcaaacgcgtggggactgtatgatatgcacgggaatgtgtatgagtggtgttgggattggtatggcagcttgagtggtacgcagactaatcccacaggcgcatcctcggggactcaacgcgtgagacgcggcgggagttgggacgcttcggctcagaacacacgttccgcacaccggagcagcgactacccgggaagcccgtaccgcagcctcggtattcggctggtacgcccctga

SEQ ID NO: 63342 - protein, 464 aa, Unknown
  Obtained from environmental sample
  DOMAIN (205)...(463): Domain of unknown function (DUF323)
  misc_feature (1)..(464): Xaa is any amino acid
MNGGTISDNSADGDGCGVCVYSGTFTMNNNAAIERNFSSSNSYGGGVYVYSGAFIMNDDAAIKGNTSSVGGGVYVYGGYSPATFTMNGGTIAVNETTGYGLGGGVFVGGNFEMKGGDIMNNTAAKQGGGVCVDSSGNFKMSGGKIYGVDDTNVPSLSNIANGTNPKGVALYNSGGTAKYDGAYASYGTITTTDDTXRRKPITSPAIGEMVSIPAGTFIMGSPTSETNRESNETQHSVTLSGFKMSKYQVTQEQYQAVMGSNPSVFSSNPQNLETQSKRPVENVTWYDAIEFCNKLSIKEELQSVYTISGRTPATGYPITNATVTADFTKNGYRLPTEAQWEYACRAGTTMAFNNGNNDYTNAASVGAVAWSDSNSGEKTHQVGLKSANAWGLYDMHGNVYEWCWDWYGSLSGTQTNPTGASSGTQRVRRGGSWDASAQNTRSAHRSSDYPGSPYRSLGIRLVRP

SEQ ID NO: 63343 - DNA, 1914 bp, Unknown
  Obtained from environmental sample
  misc_feature (1)..(1914): n is a, c, g, or t
ttggtaaaaacattttatcctcaatataaagaccacaagatagcggtaatttctccctgtattgccaaacggcgtgagtatgacgaaaccggtctgggtgattacaacgttaccatgctcgcgttaaaaaatattctggacgaacaaaaaataaacctctcctcatttccaaaagtagaatataccggcgtcagcgcggaacgggcggccggatttcccattcccggagggcttttggataccgccgagcgttttgtcccgggcatcagacggcgcaccgataagattgaaggagttcataacatctatccttacttgcaggaaatatcggaaatgttgaacaccaaagctcaactgccgttattgattgactgcctgaattgcgaaaaaggctgtatcggcggacccggtacggggaacgccgaaaaatcgcttgccatgcttagagaaccagtacaaagacgtatggctgaactggaaaaaaaacaacattctcaaatcggaaataacaaatacaaaaaatatcaccatgttttaagaaagtattggaagaaaggcctgtataaccgcagctaccatgatctttccgggaacaataccatcaaacagccgagcgaaactgaaataactgaaatttttcacagtatgaaaaaattcaaaaaggaagatatatacaactgtacctgctgcggttacggaagctgcgaagatatggcaacggcaatttacaacaagcttaacaaacctgaaaattgcgcccattatattcttgccttgctctctgaaaaaaccaatggcgaagaacttacccgccgccagcttcaggagcacattgcccgcgcggcagagcttattgaaggaataaacaaattaatagataaactgaacaacactatcacttcacaaggggaaacaatcgctcaatcttcgaccgcgaccgaaaaaatgatcgactcgctcaagaacacttcggaaatttcccgaaaagaacaggaaaccataaaagagatgatagaagacaccgccaaaagccaggaagccatgcgggagacgattcaatctgttcaggacatttccaaatcggtggacggcatagcgcaggcgattaaaataatcagcgcaatagcggccaataccaatttattgtccatgaacgcggcgattgaggccgcgcatgccggagaagcgggcaggggcttcgcggtggttgccggtgaaatacgccgcctttctgacagcaccagagaaaattcggtgaacatttccaagacgctgaaaaacatcattaacggagtagccgttaccgaaaaacaatcggacaacaccggagcacggattaccgcaatgtcaaaagaaatcagcaatttcgctgaaactatgtccgatctaatcaatacctttggcgaactgtcgtcggaaagcagcgagattaccgccgcgctggacagtcttcacagtcaaagcgacatggtaaaaaccgactatgccgaaatactgacaatgacggaaaaactacaaacggcaatgtttgaattgaatatgctgtcgaagaaaaaaattatcgtggttgatgatgaggaaaccgtccttaccatgacaaaatccatgctgaatagtatttatgacattgccacggttaattccggtaaagaagctttgcaattgttcttccagggttatactcctcaattggtgttattggacttggtaatgccggaaatgggcggatgggatgcctttatcaggatacgggatttaaccagattacaccaagtcccgatagcgatatacacgacatcggatgacgcgaaagacagggccaaagcgcaggagttaggagcggttgattatatcaaaaagccctgtaaaaaagatgagttgataaacaggatagaaagaatcctgaaaaaataa

SEQ ID NO: 63344 - protein, 637 aa, Unknown
  Obtained from environmental sample
  DOMAIN (276)...(513): Methyl-accepting chemotaxis protein (MCP) signaling domain
  misc_feature (1)..(637): Xaa is any amino acid
MVKTFYPQYKDHKIAVISPCIAKRREYDETGLGDYNVTMLALKNILDEQKINLSSFPKVEYTGVSAERAAGFPIPGGLLDTAERFVPGIRRRTDKIEGVHNIYPYLQEISEMLNTKAQLPLLIDCLNCEKGCIGGPGTGNAEKSLAMLREPVQRRMAELEKKQHSQIGNNKYKKYHHVLRKYWKKGLYNRSYHDLSGNNTIKQPSETEITEIFHSMKKFKKEDIYNCTCCGYGSCEDMATAIYNKLNKPENCAHYILALLSEKTNGEELTRRQLQEHIARAAELIEGINKLIDKLNNTITSQGETIAQSSTATEKMIDSLKNTSEISRKEQETIKEMIEDTAKSQEAMRETIQSVQDISKSVDGIAQAIKIISAIAANTNLLSMNAAIEAAHAGEAGRGFAVVAGEIRRLSDSTRENSVNISKTLKNIINGVAVTEKQSDNTGARITAMSKEISNFAETMSDLINTFGELSSESSEITAALDSLHSQSDMVKTDYAEILTMTEKLQTAMFELNMLSKKKIIVVDDEETVLTMTKSMLNSIYDIATVNSGKEALQLFFQGYTPQLVLLDLVMPEMGGWDAFIRIRDLTRLHQVPIAIYTTSDDAKDRAKAQELGAVDYIKKPCKKDELINRIERILKK

SEQ ID NO: 63345 - DNA, 375 bp, Unknown
  Obtained from environmental sample
  misc_feature (1)..(375): n is a, c, g, or t
ttgagcccggggttttcacatcagacttacgcggccgcctacgcgccctttacgcccaataattccgaacaacgctcgccccttacgtgttaccgcggctgctggcacgtaattagccggggcttattcgcgggccggcgtcaccggcctggcattccctccaggccttcttcttcgcccgcaaaaggattttacaacctttcggccttcgtcatccacgcggcgtcgctccgtcaggctttcgcccattgcggaatattcttagctgctgcctcccgtaggagtctgggccgtatctcagtcccagtgtggccgttcgccctctcaggccggctacccatcttcgccttggcgggccgttacccccccaactag

SEQ ID NO: 63346 - protein, 124 aa, Unknown
  Obtained from environmental sample
  misc_feature (1)..(124): Xaa is any amino acid
MSPGFSHQTYAAAYAPFTPNNSEQRSPLTCYRGCWHVISRGLFAGRRHRPGIPSRPSSSPAKGFYNLSAFVIHAASLRQAFAHCGIFLAAASRRSLGRISVPVWPFALSGRLPIFALAGRYPPN

SEQ ID NO: 63347 - DNA, 315 bp, Unknown
  Obtained from environmental sample
  misc_feature (1)..(315): n is a, c, g, or t
atgcgccagagatggcgcagcgtagcaatacgcgcctctgcaggtgctgcatggctgtcgtcagctcgtgccgtgaggtgttgggttaagtcccgcaacgagcgcaacccctaccgccagttaccagcaggcaaagctggggactctggcggaactgccggcgacaagctggaggaaggcggggatgacgtcaagtcatcatggcccttatgtccagggctacacacgtgctacaatggccggcacaaagcgatgcgagcccgagagggcgcagcgaaccgccgaaagccggccgtagtccggattgaagtctga

SEQ ID NO: 63348 - protein, 104 aa, Unknown
  Obtained from environmental sample
  SIGNAL (1)...(26)
  misc_feature (1)..(104): Xaa is any amino acid
MRQRWRSVAIRASAGAAWLSSARAVRCWVKSRNERNPYRQLPAGKAGDSGGTAGDKLEEGGDDVKSSWPLCPGLHTCYNGRHKAMRAREGAANRRKPAVVRIEV

SEQ ID NO: 63349 - DNA, 621 bp, Unknown
  Obtained from environmental sample
  misc_feature (1)..(621): n is a, c, g, or t
gtgaggccccctagtccatccagtgctctacctgcgcgaggttttgacgaggctgtccctcaaggcatttcggggagagccagctatttccaagtttgtttagtctttcgctccgagccaccggtcatccctgccttttttaacagactagggttcggccctccacccggtttcacccgggcttcagcctgccggtggctagatcacttggcttcgggtctatggcatgcaactaaaaatttcgcccttttcagactcggtttccctccggctccgggactcccatcccttagcctcgctgcataccataactcgcaggctcattctacaaaaggcacgccgtcaccgcatcgctgcggctccgacctgttgtgggtccacggtttcaggttctttttcactcccctcgccggggttcttttcgcctttccctcacggtacttctgcgctatcggtcgctccctgtgtttagccttggatcgtggtcgacccggattcccgcggggtttctcgtgccccgcggtacttaggattccgctaccgtcagtccaccgtttcgggtacggggctttcaccccctctggccggctttcccaaaaccgttcccctacgatgacctga

SEQ ID NO: 63350 - protein, 206 aa, Unknown
  Obtained from environmental sample
  misc_feature (1)..(206): Xaa is any amino acid
MRPPSPSSALPARGFDEAVPQGISGRASYFQVCLVFRSEPPVIPAFFNRLGFGPPPGFTRASACRWLDHLASGLWHATKNFALFRLGFPPAPGLPSLSLAAYHNSQAHSTKGTPSPHRCGSDLLWVHGFRFFFTPLAGVLFAFPSRYFCAIGRSLCLALDRGRPGFPRGFSCPAVLRIPLPSVHRFGYGAFTPSGRLSQNRSPTMT

SEQ ID NO: 63351 - DNA, 399 bp, Unknown
  Obtained from environmental sample
  misc_feature (1)..(399): n is a, c, g, or t
atgaaccggtttcccatcgactacggctttcgccctcgccttaggggccgacttaccctgggaagattgcctttacccaggaaacctcgggcttccggcggagggggatcccacccctcttttcgtctacttatacctgcattctctcttccgcttcctccagcgcaccttacggtacgccttcgtcggttcgcggaatgctcccctaccaaccatgccttacggcatgattccgcggcttcggttgcatgcttagccccgttacattgtctgcgcgccgtgactcgaccagtgagctgttacgcactctttcaaggaatggctgcttctaagccaacctcctggctgtcctcgccagggcacatcatttcacactcagcatgctatccgggaccttag

SEQ ID NO: 63352 - protein, 132 aa, Unknown
  Obtained from environmental sample
  misc_feature (1)..(132): Xaa is any amino acid
MNRFPIDYGFRPRLRGRLTLGRLPLPRKPRASGGGGSHPSFRLLIPAFSLPLPPAHLTVRLRRFAECSPTNHALRHDSAASVACLAPLHCLRAVTRPVSCYALFQGMAASKPTSWLSSPGHIISHSACYPGP

SEQ ID NO: 63353 - DNA, 1620 bp, Unknown
  Obtained from environmental sample
  misc_feature (1)..(1620): n is a, c, g, or t
gtggccggtacgctcgtggatattacagaaaccaagaaaatgcttctggaaaaggagaggcaaacggaggaagcgcaagccgccaaccgcgctaaaagcaccttccttgccaacatgagccatgaactacgcacgcctctcaatgtggttatcgggcttaccggtttaataatggaagataaaaacctggaaaaacatataactgataatctggtaaaaataagcaacgcgggaagcacgctcctgagcattgtaaacgatattcttgatctttcaaaaattgagtcgggcaagcttgaattaactcctgatgagtattacacggcgagcatgctgaacgataccgttacccttattcttgcccgcataggggagaaagacataaagttccatttgaatatagacgacaacctgccgtacaaactttacggcgacgatctgcgggtgaagcagatttttaccaacctgcttaccaacgccgtcaaatacacaaacgaaggaagcgtagagctcaatgtaagctgtgagcatgaaggggactcggtgtgggttaacgccgccatcaaagataccggctcaggtatgtccgcagatgacatgaaagacctgtttcttgattatcacaggatcgattcanaatccaaccatcatgttgagggtacggggctgggcttggctattaccaaaagactggtagaaatgatggaagggcaaattaatgtagagagcgagaaaggcgtaggctcaaaattcagtttccgcataaagcagggctttgtcgacgatacggttcttggagcggatgtttcaagaaaactccgcaactttagttataccgatgacaaacgtcttgtttccaaaaaactggtaagagcgaatttaagttacgccagagtgcttgttgtagacgatatgcaaaccaatctggacgtagcgtcgggtattttgcgcaaatacaaaatgcaggttgattgtttgactaacggtcaatccgctattgacaggatacaatcgggaactcccgtttacgacgtgatattcatggatcacatgatgcccggaatggacggcatagaaactgttgacagaattcgcgcgataggaaccgaatacgcaaaaaagattccgattatcgctcttaccgccaacgccatacaaggaaccgaaaaaatgttctttgaacacgattttcaggcgtttgtaaccaaaccgattgatataattgagatggactccgttcttaaaaaatgggtatacgacagagaccgtgaagccgctaatgccgccgactctccttccgccgttgatgattcttatgaagaaaaagaaatagtaatagagatacccggagtgaacgcggataaagtgcttgcgttgtacgacaatgatattgatatttatctgcccttactgcgttcttacgttaccaacacgccgaacactttggaaaaactgcgctctgtatcggcggaaaatttgtccgactatgttattttcgtacatggcttgaaaggaacaagcgcgagtattggagcagaacaaataccggcgcaaggctttggagttggaaaatatgtccagagcgggcgacttgcagggcgtttgagcaggaatcgataa

SEQ ID NO: 63354 - protein, 539 aa, Unknown
  Obtained from environmental sample
  DOMAIN (31)...(97): His Kinase A (phosphoacceptor) domain
  misc_feature (1)..(539): Xaa is any amino acid
MAGTLVDITETKKMLLEKERQTEEAQAANRAKSTFLANMSHELRTPLNVVIGLTGLIMEDKNLEKHITDNLVKISNAGSTLLSIVNDILDLSKIESGKLELTPDEYYTASMLNDTVTLILARIGEKDIKFHLNIDDNLPYKLYGDDLRVKQIFTNLLTNAVKYTNEGSVELNVSCEHEGDSVWVNAAIKDTGSGMSADDMKDLFLDYHRIDSXSNHHVEGTGLGLAITKRLVEMMEGQINVESEKGVGSKFSFRIKQGFVDDTVLGADVSRKLRNFSYTDDKRLVSKKLVRANLSYARVLVVDDMQTNLDVASGILRKYKMQVDCLTNGQSAIDRIQSGTPVYDVIFMDHMMPGMDGIETVDRIRAIGTEYAKKIPIIALTANAIQGTEKMFFEHDFQAFVTKPIDIIEMDSVLKKWVYDRDREAANAADSPSAVDDSYEEKEIVIEIPGVNADKVLALYDNDIDIYLPLLRSYVTNTPNTLEKLRSVSAENLSDYVIFVHGLKGTSASIGAEQIPAQGFGVGKYVQSGRLAGRLSRNR

SEQ ID NO: 63355 - DNA, 651 bp, Unknown
  Obtained from environmental sample
  misc_feature (1)..(651): n is a, c, g, or t
atgaatagaatagcggaagtttccagaaagacaaaagagactgacattaccatcaaactcaacctggacggaaccggcatagcaaaaataaattacccaatcggttttatggggcacatgcttaatacctttgcccgccacgggctgtttgatctggaaattgccgcaaagggcgaccttgaggttgaccagcaccacctggtggaggatacgggtatcgttttgggccagtgcttcgcgaaagcgttaggtgaaaaaaggggtatacggcgcaacggggactgccttttccccatggacgagacccttgcccgcgccgcggttgatatgggcggccgcagtttcctgttttttgacggccagttgggagcggcgcctttaatcgccgtcgtcgatgattctgacaagcctttccatttccagaccgatactattgaagatttttggcagggctttgtcggcgcggccggatgtaatctgcatctggaaatcatccgcggcagaagcgaccaccacaaaatagaggccctgttcaaggcggccgcccgcgctttacgatgtgcctgcgaatttgacgagcgcgcgcgtgacttgatcccctcgacaaaaggctctttgccgggctttgacgcgccgggcgtgctggtatga

SEQ ID NO: 63356 - protein, 216 aa, Unknown
  Obtained from environmental sample
  DOMAIN (34)...(186): Imidazoleglycerol-phosphate dehydratase
  misc_feature (1)..(216): Xaa is any amino acid
MNRIAEVSRKTKETDITIKLNLDGTGIAKINYPIGFMGHMLNTFARHGLFDLEIAAKGDLEVDQHHLVEDTGIVLGQCFAKALGEKRGIRRNGDCLFPMDETLARAAVDMGGRSFLFFDGQLGAAPLIAVVDDSDKPFHFQTDTIEDFWQGFVGAAGCNLHLEIIRGRSDHHKIEALFKAAARALRCACEFDERARDLIPSTKGSLPGFDAPGVLV

SEQ ID NO: 63357 - DNA, 855 bp, Unknown
  Obtained from environmental sample
  misc_feature (1)..(855): n is a, c, g, or t
atggaaaaactaaggatactgattcccaagggaagaattttcgacaatgtaagccgcctcttttccgaggcaggttttcccattgccttgagcgaccgcacctaccgccccgcgctgggagctgattggcttgacgctaaaatcatgaaaccccaaaacgtaggggagcttttggaacttggaagccacgacgcgggttttaccggcattgactggattttggaaagcggtgccgatgttgtggagattctcgacctgggttttgacagagtaaagattgtggcggcggttccccagtcttttgacgaagcggccctccgttccaaaaaactcgtggcggccaccgaatatgtcaaccttgccgaacaatggttaaaaaacgccggttacaactaccgcattctccgcacctatggcgcgacggaagtttttccgccggatgacgccgacatgatcatcgacaacacgtcatcgggccaaaccctgcgggataacggcctgaaaatcatcggcacgatacttgaatcatcaacccgttttttcgcttcccgcgcagccctggccgatcctgaaaaacagaaccgcattgaggaacttgccatgctgtttcacgctgtccttgatggccgcgaccgggtaatgctggagatgaatattcccaaagatcgttttgacgctgtagtgagcggcctgccggcgatgcgcagccccaccgttgccccactgttaggcgacaccggttatgcggtaaaaatcgccgtaaacaagaacgaggttcccgtcattataccccggctgaaaaaacttggcgccctcgacattgtggaatacgatctgcggaaagtggtaccgtaa

SEQ ID NO: 63358 - protein, 284 aa, Unknown
  Obtained from environmental sample
  DOMAIN (208)...(282): HisG, C-terminal domain
  misc_feature (1)..(284): Xaa is any amino acid
MEKLRILIPKGRIFDNVSRLFSEAGFPIALSDRTYRPALGADWLDAKIMKPQNVGELLELGSHDAGFTGIDWILESGADVVEILDLGFDRVKIVAAVPQSFDEAALRSKKLVAATEYVNLAEQWLKNAGYNYRILRTYGATEVFPPDDADMIIDNTSSGQTLRDNGLKIIGTILESSTRFFASRAALADPEKQNRIEELAMLFHAVLDGRDRVMLEMNIPKDRFDAVVSGLPAMRSPTVAPLLGDTGYAVKIAVNKNEVPVIIPRLKKLGALDIVEYDLRKVVP

SEQ ID NO: 63359 - DNA, 381 bp, Unknown
  Obtained from environmental sample
  misc_feature (1)..(381): n is a, c, g, or t
atgcaaaaaattataattgataccaatgtaatagtttcttcacttattcaaaaaagttatccttatcatataatttttgatctattcattgaagataaaatatgcctatgtatttcgccgccgcttatggcagaatactatactgttttggaacgtccaaaatttgcgcgattccaagaatttacgacaaaggcaagggctgttcttgccaatatcgaaataaaagctatacattataatcccaaagcaacccttcatctggtttcggacaaagatgacaacaagatattggaacttgccgatgaatgcggcgcagattttgttataacccggaacaccaatgattttacttttcctttgtacagcaaaccaaaattgtaa

SEQ ID NO: 63360 - protein, 126 aa, Unknown
  Obtained from environmental sample
  misc_feature (1)..(126): Xaa is any amino acid
MQKIIIDTNVIVSSLIQKSYPYHIIFDLFIEDKICLCISPPLMAEYYTVLERPKFARFQEFTTKARAVLANIEIKAIHYNPKATLHLVSDKDDNKILELADECGADFVITRNTNDFTFPLYSKPKL

SEQ ID NO: 63361 - DNA, 405 bp, Unknown
  Obtained from environmental sample
  misc_feature (1)..(405): n is a, c, g, or t
ttgcgaagcggcttgcggaaatataaggacggctggaaaatggcggacaagaaaaaaatcgtcgcggtagacgacaacatggaaaatctgagcattctgaaaaacatcttgaaagacaagtacacggtatttcccgtcccctccgcagcggaaatgttcgggctattagagcatatcagcccgaatttaatccttttggacgtggaaatgcccgaaatgaacggctatgaagcggcgcaaaaattaaaaggcgatgataaattaaaagaaattccttttatcttccttacatccagagacgacgaagaaagcgtaaagaaaggctttgattcgggagccgttgattatataacaaaacccattgttgtccaagttttgcttgaacggattgagaagcatatatag

SEQ ID NO: 63362 - protein, 134 aa, Unknown
  Obtained from environmental sample
  DOMAIN (18)...(131): Response regulator receiver domain
  misc_feature (1)..(134): Xaa is any amino acid
MRSGLRKYKDGWKMADKKKIVAVDDNMENLSILKNILKDKYTVFPVPSAAEMFGLLEHISPNLILLDVEMPEMNGYEAAQKLKGDDKLKEIPFIFLTSRDDEESVKKGFDSGAVDYITKPIVVQVLLERIEKHI

SEQ ID NO: 63363 - DNA, 945 bp, Unknown
  Obtained from environmental sample
  misc_feature (1)..(945): n is a, c, g, or t
atgatggaagggcaaattaatgtagagagcgagaaaggcgtaggctcaaaattcagtttccgcataaagcaggggtttgttgacgacacggttcttggagcggatgtttcaggaaaactccgcaaattcagttataccgatgacaaacgtcttgtttccaaaaaactggtaagagcgaatttaagttacgccagagtgcttgttgtagacgatatgcagaccaatctggatgtagcgtcgggtattttgcgcaaatacaaaatgcaggttgactgtttaactaacggtcaatccgctattgacaggatacaatcgggaactcccgtttacgacgtgatattcatggatcacatgatgcccggaatggacggcatagaaactgttgacagaattcgcgcgataggaaccgaatacgctaaaaagattccgattatcgctcttaccgccaacgccatacagggaactgaaaaaatgttctttgaccacgattttcaggcgtttgtaaccaaaccgattgatataatggagatggactccgttcttaaaaaatgggtatacgacagagaccgtgaagccgctaatgccgccggctcttccgccgttgatgattcttctgaagaaagagaagttgtaatagatatacccggagtgaacgcaaaaaaagtgcttgcgctgtacgataatgatactgatatatatctgcccttactgcgctcttacgttaccaacacgccgaacactttggaaaaactgcgctccgtatcggcggaaaatttgcccgactatgttattttcgtacacggcttaaaaggaacaagcgcgagtatcggcgcggaacagatacgggcgcaggctttggagttggaaaatatgtccagagcgggcgacttgcagggcgttttggcagaaacgacaaactcattgcgnatacggaaattattgtag

SEQ ID NO: 63364 - protein, 314 aa, Unknown
  Obtained from environmental sample
  DOMAIN (235)...(310): Hpt domain
  misc_feature (1)..(314): Xaa is any amino acid
MMEGQINVESEKGVGSKFSFRIKQGFVDDTVLGADVSGKLRKFSYTDDKRLVSKKLVRANLSYARVLVVDDMQTNLDVASGILRKYKMQVDCLTNGQSAIDRIQSGTPVYDVIFMDHMMPGMDGIETVDRIRAIGTEYAKKIPIIALTANAIQGTEKMFFDHDFQAFVTKPIDIMEMDSVLKKWVYDRDREAANAAGSSAVDDSSEEREVVIDIPGVNAKKVLALYDNDTDIYLPLLRSYVTNTPNTLEKLRSVSAENLPDYVIFVHGLKGTSASIGAEQIRAQALELENMSRAGDLQGVLAETTNSLRIRKLL

SEQ ID NO: 63365 - DNA, 1596 bp, Unknown
  Obtained from environmental sample
  misc_feature (1)..(1596): n is a, c, g, or t
atgcgctccgatctcgcaaatcttaaaacgtatgattccgcagttaccaaagagtgtatgacctatatgaaccacaccgcttcacggatcaaggaggaggtttaccgccgccattatctgggaagggccgctctggaggaacgcaaaaaaaccctcactgccgaagccgtgcgtgtcgaagccgagttgaccgtcgctgaaagggaggaacgggaagcgcggggccgcgaggattgctgtaatcgtgttacacgtttcctgccggagttaaaatatcttttcccctccattgcgggcgcggaacttcttgcgaaccagcttgccgcatcggaacaggaacttgccgcaatagatacccaatctttcaaagaactggaaaacaaacgcgatgaattggtgaagtatcttgaactgttaaaagaagataacgacaaattgcagaaaacctggggcagcctgaataccaaattcactaattgccgtgatgaccttgatcggtttacccaatcccaggaagaaaaggaagaggcgattaaatattttagcgacgatcatcccctcatgatcggtgaatgtgaggaatacgctcaagaaaaactttcaaagaacagcatcgccgaccttaccaatagttatgaatcaacattaaaaagcttcaagacccgtaccgaaacctgcaaaaaagaatataacaaacttgtcgccgattatgagcatgagttccattaccttctcggcatggagccctcggaaaatgccgaagcggaaaccctgctgaagcggcttgaaacttcggagttgccccaatacaaggaaaaaatcgcaaaggcatatcaggacgcggaaaaagaattcaaggatcattttatttcccgtctcaacgaacatattgaagaagccagagaaagttttaatgaaattaacgatattctacgcactctccattttggccgggatcagtactggtttcatcttgaagaactcagcgagcgcaaggggcagatagaagttattcgtcaggcggcaaaaatacctcccaatgatggcggactcttttcccagcttgtcgatccggctgagaaaaaagccgcagaggaactttttaaccggattcttaattcacctttggattcaaaagaacttaaagcaatttgcgattaccgtacttactttcactatgacatcagaatcaaagaaattgacaatcttgatgaaaatggcaatccggtgattctttccctttcaaaggtactcaaggaaaaatccggcggcgagtcacagaccccctattatgtcgccattgccgcaagtttctaccgtttttataaagcgcgtcccgaaagtaccgtgcgtctggtcatttttgatgaagcctttaaccgcatggacgacgagcgaatcggcaagatactttcgttttacaacaacctcaatttacagatcatcacttcggttccgcctgaaaaaattgaagccatcgccccttatatggacaggatcaatgtaataagccgtttcggcagcgcggtaaaagtgagggactgccacattgacgccgttgacttgagcgatattgagatagggagtggggagtag

SEQ ID NO: 63366 - protein, 531 aa, Unknown
  Obtained from environmental sample
  misc_feature (1)..(531): Xaa is any amino acid
MRSDLANLKTYDSAVTKECMTYMNHTASRIKEEVYRRHYLGRAALEERKKTLTAEAVRVEAELTVAEREEREARGREDCCNRVTRFLPELKYLFPSIAGAELLANQLAASEQELAAIDTQSFKELENKRDELVKYLELLKEDNDKLQKTWGSLNTKFTNCRDDLDRFTQSQEEKEEAIKYFSDDHPLMIGECEEYAQEKLSKNSIADLTNSYESTLKSFKTRTETCKKEYNKLVADYEHEFHYLLGMEPSENAEAETLLKRLETSELPQYKEKIAKAYQDAEKEFKDHFISRLNEHIEEARESFNEINDILRTLHFGRDQYWFHLEELSERKGQIEVIRQAAKIPPNDGGLFSQLVDPAEKKAAEELFNRILNSPLDSKELKAICDYRTYFHYDIRIKEIDNLDENGNPVILSLSKVLKEKSGGESQTPYYVAIAASFYRFYKARPESTVRLVIFDEAFNRMDDERIGKILSFYNNLNLQIITSVPPEKIEAIAPYMDRINVISRFGSAVKVRDCHIDAVDLSDIEIGSGE

SEQ ID NO: 63367 - DNA, 1389 bp, Unknown
  Obtained from environmental sample
  misc_feature (1)..(1389): n is a, c, g, or t
atgactagcggcggtttttttaccggaaatgagcttgaaaaaaccaaagaatcccttgccgcgatggtttcggagcttttaaagatccttgatggcgttgccatcctgcgcgaaacatcccggcggacactggatttggtgatgagtttcggcgagaggctttcggcttttttattcgcgcaaatacttatgcagcgcggaattcccgccgtttttcttgatgccaggcctcttgtcaaaacggacggcaattttggaaacgcccgctttattccgggcgaaacttacccggtcatccaggcgttttttaacgcgcctggcggaggcgaaaagcccctatatgtagccaccggctttatcggcagtacaaaggacaattcggtcaccaccctgggcagaggcgggtctgaccttagcgccgcgattttcgcggcggcgctggaagcggaagagctggagatttggaccgatgtagacgggatattgacagccgatcccaggcaggtaaaaaacgcgttcagaattgacagcatctcgtatgttgaagccatagaactgtcccacttcggggcaaaggtcatctatcctcccacaatcaggccggcgctggagaaaggaatccctatcaggataaaaaatacctttaacccctcatgcccgggaacagctattataaacgatgcggatgaagggaatttcgcaatccgcggcataagttccatcagcggcatcgccctggtctgcgtggaaggctccggcatggtgggggcagccggtttttccgccaggcttttcaacgcgcttgccggccggaagatcaatatcattttgatctcgcagagctcaagcgaatattcaatctgctttgcagtgcttccttctgacgccgaagccgccagcgacgctgtcaaagaagagtatgcccaggaaatagcttcgggaactattgaagagcccgttgtcgaaaaaggcctttccattgtcgcggtggtaggcgcaaagatgaaaaaactatccggcatctcgggtaaattcttccacgccctgggcagaaacggcattaacgtgtcggccatagcccagggttcctcggaaataaacatttcagcggtgatagcgcagcgggacgagaccaaagcccttaacgccatccacgaagcttttttcctttccggcctgcgctctgtgaaccttttccttttgggaaccggtttaataggcggaactttgctggatcaaatcgcggagcataaaaaaatcctggcggaagagtacaagattaaaatcaaactggtgggcgtcggggatttcaaccggatgatcctgcggcctgaaggccttgacccaaaaacagccaaaggctactttaaaagacgcagcaaaaaatga

SEQ ID NO: 63368 - protein, 462 aa, Unknown
  Obtained from environmental sample
  DOMAIN (243)...(320): ACT domain
  misc_feature (1)..(462): Xaa is any amino acid
MTSGGFFTGNELEKTKESLAAMVSELLKILDGVAILRETSRRTLDLVMSFGERLSAFLFAQILMQRGIPAVFLDARPLVKTDGNFGNARFIPGETYPVIQAFFNAPGGGEKPLYVATGFIGSTKDNSVTTLGRGGSDLSAAIFAAALEAEELEIWTDVDGILTADPRQVKNAFRIDSISYVEAIELSHFGAKVIYPPTIRPALEKGIPIRIKNTFNPSCPGTAIINDADEGNFAIRGISSISGIALVCVEGSGMVGAAGFSARLFNALAGRKINIILISQSSSEYSICFAVLPSDAEAASDAVKEEYAQEIASGTIEEPVVEKGLSIVAVVGAKMKKLSGISGKFFHALGRNGINVSAIAQGSSEINISAVIAQRDETKALNAIHEAFFLSGLRSVNLFLLGTGLIGGTLLDQIAEHKKILAEEYKIKIKLVGVGDFNRMILRPEGLDPKTAKGYFKRRSKK

SEQ ID NO: 63369 - DNA, 426 bp, Unknown
  Obtained from environmental sample
  misc_feature (1)..(426): n is a, c, g, or t
gtgtggaaggtcaagccggggagtctaatcatgattctccacaaaatccaggaaactttcgggtttatttcacgggaatcggcggataaattatcccagcttaccggtatttcactggcgcgcatctacggggttattactttttaccattttttcaaaaccaccaagcccggcaaaaataaaatttccgtatgcctcggaaccgcctgttatctgaagggcggtcaggatcttattgaggaagcaaggaaaattctgaaccttgctccgggcggagtaacggaagacgggcttttttccattgacgaggttcgctgtgtaggttgctgcggcctttcgcctgtgctgaccgtggggaatgacacctatggaaaactcacagcggatatgctgcccgggattttcgataagtacaagaatgcgtaa

SEQ ID NO: 63370 - protein, 141 aa, Unknown
  Obtained from environmental sample
  DOMAIN (1)...(139): Respiratory-chain NADH dehydrogenase 24 Kd subunit
  misc_feature (1)..(141): Xaa is any amino acid
MWKVKPGSLIMILHKIQETFGFISRESADKLSQLTGISLARIYGVITFYHFFKTTKPGKNKISVCLGTACYLKGGQDLIEEARKILNLAPGGVTEDGLFSIDEVRCVGCCGLSPVLTVGNDTYGKLTADMLPGIFDKYKNA

SEQ ID NO: 63371 - DNA, 570 bp, Unknown
  Obtained from environmental sample
  misc_feature (1)..(570): n is a, c, g, or t
gtgaatcagtgggttctaaggaaccaggagggttccgaagaaccaggaggttcttcggaaccagtaggttccgcggaaccaaaaggttccgacagcaagggggaactccggttcactgtaattgacaacggcaaggggatgaccgccgaggaacttaaacgggctcaggatccctttgttaccgacggcataaaacacccccatcgcaaagtggggttggggcttccttttttaattcagaccgcagaagcgtcgggcggtggatggaaaatggaatccaaaaaagccggggaaggtcaggcgtcgggcactgtgataagcgcctggtttgatctgggaaatgtggatactcccccggtgggggacattccgggaatgtttcggacggtgctgctttttaacggcccggaagaaatggtaattaagcgccttcgtaaatcgccggaaggtgatcttgattacgaggttcgaaaaaccgagctttccgacgctcttggggatttggaagatacccagtccctgattttattggatcgttatttgcgttccctggaagaagcgggggaatga

SEQ ID NO: 63372 - protein, 189 aa, Unknown
  Obtained from environmental sample
  misc_feature (1)..(189): Xaa is any amino acid
MNQWVLRNQEGSEEPGGSSEPVGSAEPKGSDSKGELRFTVIDNGKGMTAEELKRAQDPFVTDGIKHPHRKVGLGLPFLIQTAEASGGGWKMESKKAGEGQASGTVISAWFDLGNVDTPPVGDIPGMFRTVLLFNGPEEMVIKRLRKSPEGDLDYEVRKTELSDALGDLEDTQSLILLDRYLRSLEEAGE

SEQ ID NO: 63373 - DNA, 399 bp, Unknown
  Obtained from environmental sample
  misc_feature (1)..(399): n is a, c, g, or t
atggccaaaatgtcattggaagaactgcggaagctccgtgatactacccaaacggatctgaggcgcagggaagcggagggcaaagaaattcaggttatagtcggtatgggtacttgtggtatcgccgccggggccaagacaaccctggactccttccttaaagcccttgatgagaataaattggtagattccgttctggtacgccagaccggctgcatggggctttgccattcggaacccacggttgaagtaatcgctcccggtatgcctacggttatttacggccaggttgatgcccaagcggcaaaggaaattgtttcaaagcatattatcggcaagcagctccttgacaatcgtattttggacaggcctgccgcagatattatcgcgtcaaagtag

SEQ ID NO: 63374 - protein, 132 aa, Unknown
  Obtained from environmental sample
  misc_feature (1)..(132): Xaa is any amino acid
MAKMSLEELRKLRDTTQTDLRRREAEGKEIQVIVGMGTCGIAAGAKTTLDSFLKALDENKLVDSVLVRQTGCMGLCHSEPTVEVIAPGMPTVIYGQVDAQAAKEIVSKHIIGKQLLDNRILDRPAADIIASK

SEQ ID NO: 63375 - DNA, 651 bp, Unknown
  Obtained from environmental sample
  misc_feature (1)..(651): n is a, c, g, or t
atgccctataaccactttattcttacctgcggcggaaccggatgtgagtccaacaaaggggatgaaatctaccgcagccttatcgccgaggcggaaaaacttggcgtcaaggaagaggttcagatagtcaagacaggatgtttcggcttttgtgagcgcgggcccatagtcaaggtgctgccggaagattctttttatgtggatgttaaacccgatgacgccaaggaaattatcgccgagcagattttaaagggacgggaagtcaagcggctcctttacaagggagacggcgaaaagaagaagaccacagctgtagaagatattgaattctatcagaagcagttgcgggtggttctccgaaactgcggggtaatcaaccctgaaagcatcgatgaatacatagcccgcgaaggctatgtggggcttgaaaaggtcctttttgactggtcccaggaacaactcatcgaagagattaaaatttcggggttgcgtggccgcgggcggcgcgggttttcccacttggttgaagtgggacctggccgcgtaaggctcagggcagccccaagtacgttatctgcaacgccgacgagggagaccctggcgcttacatggacaggtccaccatcgaaggtgaccctcactcggttatag

SEQ ID NO: 63376 - protein, 216 aa, Unknown
  Obtained from environmental sample
  misc_feature (1)..(216): Xaa is any amino acid
MPYNHFILTCGGTGCESNKGDEIYRSLIAEAEKLGVKEEVQIVKTGCFGFCERGPIVKVLPEDSFYVDVKPDDAKEIIAEQILKGREVKRLLYKGDGEKKKTTAVEDIEFYQKQLRVVLRNCGVINPESIDEYIAREGYVGLEKVLFDWSQEQLIEEIKISGLRGRGRRGFSHLVEVGPGRVRLRAAPSTLSATPTRETLALTWTGPPSKVTLTRL

SEQ ID NO: 63377 - DNA, 786 bp, Unknown
  Obtained from environmental sample
  misc_feature (1)..(786): n is a, c, g, or t
ttgtcaagtaaggtacgggaggaaattatgaagcatcaatggtacgaggatgcagtgatttaccacatttacgctctttcatttgcgggtgcgcgattcttgaacgattatgccgtattagagcataagctttctgaaattgaaaaatggataccgcatataaaaggcatgaggtttaattcgatattattaagccctgtaatgaaatcacataggcacggatatgatgtgacggattattttgaaattgataaccgtattggtacaaacagcgaatttaaatcacttgttgccgaatttcacaaaaacggaattcgcgttatattggacagcgtttttaatcattgcgggagggatttttttgcattccgagaattacggcaaaataatcgtaactatgctgactggttctcgggagtggatttcagcaggcaaagtccaatgggtgattcgtttacgtataatacttgggatgggcattttgaactgcctaaattcaatttacaaaatgcgtccgcaaggaactatttactcgacgctgcccggttttggatagacgtttttgacattgacggaatgaggctggatgcggctgatgtgctggatttcagttttatgtccgaattacgccgtgtaacagaagagaaaaaacctgatttttggctaatgggtgaggttgttcatggtgattattccaagtgggtaaacgcctctgcattgcacagtgttacgaattattttttatacaaatgttattttccagccataatgaaaataatctgttga

SEQ ID NO: 63378 - protein, 261 aa, Unknown
  Obtained from environmental sample
  DOMAIN (22)...(257): Alpha amylase, catalytic domain
  misc_feature (1)..(261): Xaa is any amino acid
MSSKVREEIMKHQWYEDAVIYHIYALSFAGARFLNDYAVLEHKLSEIEKWIPHIKGMRFNSILLSPVMKSHRHGYDVTDYFEIDNRIGTNSEFKSLVAEFHKNGIRVILDSVFNHCGRDFFAFRELRQNNRNYADWFSGVDFSRQSPMGDSFTYNTWDGHFELPKFNLQNASARNYLLDAARFWIDVFDIDGMRLDAADVLDFSFMSELRRVTEEKKPDFWLMGEVVHGDYSKWVNASALHSVTNYFLYKCYFPAIMKIIC

SEQ ID NO: 63379 - DNA, 354 bp, Unknown
  Obtained from environmental sample
  misc_feature (1)..(354): n is a, c, g, or t
gtgaattcatgtgatgagcgtctttttttggaggaatgtatgcagtatgaggggcaggcacaggcgcatagcggcagtccgcacagcggtagtgttcggttggactcgccgcccgtgcggcttaatgaagggttagtgcgaataccgtccggctgcgctatttcgggtatcataaacaaatcagggcggcgcatgagcggagaggcgataataaagtctatcagcgtcatgcacgaccgctcaaacggtctcggcggcgggtttgccgcgtacggcatctaccccgaatacaaggattattacgccctgcatttattttatgaatccgtttccgccagaaaagagtgcgaataa

SEQ ID NO: 63380 - protein, 117 aa, Unknown
  Obtained from environmental sample
  misc_feature (1)..(117): Xaa is any amino acid
MNSCDERLFLEECMQYEGQAQAHSGSPHSGSVRLDSPPVRLNEGLVRIPSGCAISGIINKSGRRMSGEAIIKSISVMHDRSNGLGGGFAAYGIYPEYKDYYALHLFYESVSARKECE

SEQ ID NO: 63381 - DNA, 411 bp, Unknown
  Obtained from environmental sample
  misc_feature (1)..(411): n is a, c, g, or t
ttgatctggcgttacttcgttacacccctgccgacaaaactcagcgaaagccagcttgacgagcgggagtttaccgccaaatgcgtgtttaaagtcaacacaaaaattgaaggcgcttatgttttctccagcgggaaaaacatgggcgtattcaaggcagtcgggtttcccgaagacgtagggcgtttttacaaacttgaagaatacgaaggctggtgctttacggcgcacgggcgttacccgacaaatacgcccggctggtggggcggcgctcatccgttttcctacttgattattccgttgtgcataacggcgaaatttcttcttatgacaccaaccgccgcgcaatcgaaatgtacggttacaaatgcaccctccagaccgacaccgaagtcatcacctatattatag

SEQ ID NO: 63382 - protein, 136 aa, Unknown
  Obtained from environmental sample
  misc_feature (1)..(136): Xaa is any amino acid
MIWRYFVTPLPTKLSESQLDEREFTAKCVFKVNTKIEGAYVFSSGKNMGVFKAVGFPEDVGRFYKLEEYEGWCFTAHGRYPTNTPGWWGGAHPFSYLIIPLCITAKFLLMTPTAAQSKCTVTNAPSRPTPKSSPIL

SEQ ID NO: 63383 - DNA, 561 bp, Unknown
  Obtained from environmental sample
  misc_feature (1)..(561): n is a, c, g, or t
gtgctttacggcgcacgggcgttacccgacaaatacgcccggctggtggggcggcgctcatccgttttcctacttgattattccgttgtgcataacggcgaaatttcttcttatgacaccaaccgccgcgcaatcgaaatgtacggttacaaatgcaccctccagaccgacaccgaagtcatcacctatattatagattacctgcacaggaaacagaaactttcttttagcgaaattgcgtcggtcatcgccgcttcgttttggcagaccattgaaaaacaaccgccgaatgaaagggaaacacatgaatttttgcgcgtaatgttcagcgcgcagctcataacaggtccgttttcaatacttgtcggttttgacggcggacttatggcgttaaacgacaggcttaaactgcggagcatggtagttggagaaaaagatgatcttgtttatatggcgagcgaggaagcggctatccgcatcattgaaccgaaccttgaccatatttgggcgccaaaaggcggtcagcctgttattgtttacttaaatggaggacgggcataa

SEQ ID NO: 63384 - protein, 186 aa, Unknown
  Obtained from environmental sample
  misc_feature (1)..(186): Xaa is any amino acid
MLYGARALPDKYARLVGRRSSVFLLDYSVVHNGEISSYDTNRRAIEMYGYKCTLQTDTEVITYIIDYLHRKQKLSFSEIASVIAASFWQTIEKQPPNERETHEFLRVMFSAQLITGPFSILVGFDGGLMALNDRLKLRSMVVGEKDDLVYMASEEAAIRIIEPNLDHIWAPKGGQPVIVYLNGGRA

SEQ ID NO: 63385 - DNA, 426 bp, Unknown
  Obtained from environmental sample
  misc_feature (1)..(426): n is a, c, g, or t
atgattgaaataagagaatgtacggaaaatgatattaaattattgacaaaaatgaataaacaattaattgaagatgaaaaagcaaataatttattggatattactcaattagaaaatagaatggataattttttgaataatggatataaggcttttttctttattattgaagaaaaaataattggctatgctttatgtgacatgacaaaagaaccaatatatttaaggcaattttttattaatagggaagaaagaagaaaacattatggaaaaaaagcattttataaattattggaaaaattggaaacaaaagaagtagaaattgatgtattaaaatggaatgaagatggaataaaatattgggaaaaaataggttttaaagaacaatggaaaagaatgaaatataaaataatagatgaacaataa

SEQ ID NO: 63386 - protein, 141 aa, Unknown
  Obtained from environmental sample
  DOMAIN (52)...(127): Acetyltransferase (GNAT) family
  misc_feature (1)..(141): Xaa is any amino acid
MIEIRECTENDIKLLTKMNKQLIEDEKANNLLDITQLENRMDNFLNNGYKAFFFIIEEKIIGYALCDMTKEPIYLRQFFINREERRKHYGKKAFYKLLEKLETKEVEIDVLKWNEDGIKYWEKIGFKEQWKRMKYKIIDEQ

SEQ ID NO: 63387 - DNA, 1476 bp, Unknown
  Obtained from environmental sample
  misc_feature (1)..(1476): n is a, c, g, or t
gtgagaaccaaacgaccctccagatacaccgcccgcgacgcgcaatttacgacaaaggttgacgcatggcaaccgttgtcgcgtggttttttggctgctttcggaaagagcgggctggactccctcaccgcccgcgaacgcggctttgagcccgatttacgcaaaatcgcctttttaacgtttgagaacagcttcgccccgcttggcggactggccgcggtggtgcggatactgcctgtttgcctcaatcgggccggcgaggatgtgatcgtcctaacgccgctctacgccaatatcccaaaggtcaaagaggctctggaaaacggaaccctcgaacccgccatcctcaagcaagagttccaagcctcctcttaccgcggcgcggtcagctgttaccgccacgtcggcgcgccggtgccgacctacttcatagccgtggagggacgcttcacggcggcgctcaacccgtactcctaccaagacagcaacgagatactggacgactcgctggctttctgcgccgccgccccgttcgtcctcaacaaactcggcgtagatcgcaacgtgctcttccacgctcacgattgggagacagcgcccatagctctgacctcaaaaatcgccgtgctcgaaggattgctcggaaacgcgcgaaccgtcctcacgctgcacaactccttcgacagcggcatagacgtggacagaaggcgaaagttcttcggcgaaaagataccgggcgatacggtgcttaaatgcgtgataccgctcctagacggcccgctcacaacggtgagcgccccattcgcgaacgaactgcgcgacgacccgctgcaacgcaccgtattcacgaaccacctgcaaggggagtttttcgcaaacccgcccataggagtggaaaacgggatgttcggcagaccgcacctgcgttacacatacaccgcgctatcccacgccagacaaggagtgtacgacaaactgcttgttgaaaagaggcggttcagagcggagatgctgcggacggtcgggcgtatggcgggcagggaaggggttatcggaggattaacggaagccgttgttgacaagtctgcggaaagatgtattaattccgataatgatgcggatgttaatacaagcgttaatactaatgcggatacggacgcaaacgtaaaaaacagaccgatactcttcatgtccggccgcctcgacctgatgcagaaaggcttcgacgtgatctttaacgccgttcagtgttttcccgtcggcaaagtcgcccttatattctgcccgagcagcgccgaaggcgcgcgccactctaaggagcttgctttttttagggatatagcggcggagcggcccggcgatattgtgatatggccgtttaggataacggaggaagattacgtctccgccgttttggggagttcgtttttgctgatgccctcgtttacgagctcggccgattctgaccatgtttga

SEQ ID NO: 63388 - protein, 491 aa, Unknown
  Obtained from environmental sample
  DOMAIN (55)...(279): Starch synthase catalytic domain
  misc_feature (1)..(491): Xaa is any amino acid
MRTKRPSRYTARDAQFTTKVDAWQPLSRGFLAAFGKSGLDSLTARERGFEPDLRKIAFLTFENSFAPLGGLAAVVRILPVCLNRAGEDVIVLTPLYANIPKVKEALENGTLEPAILKQEFQASSYRGAVSCYRHVGAPVPTYFIAVEGRFTAALNPYSYQDSNEILDDSLAFCAAAPFVLNKLGVDRNVLFHAHDWETAPIALTSKIAVLEGLLGNARTVLTLHNSFDSGIDVDRRRKFFGEKIPGDTVLKCVIPLLDGPLTTVSAPFANELRDDPLQRTVFTNHLQGEFFANPPIGVENGMFGRPHLRYTYTALSHARQGVYDKLLVEKRRFRAEMLRTVGRMAGREGVIGGLTEAVVDKSAERCINSDNDADVNTSVNTNADTDANVKNRPILFMSGRLDLMQKGFDVIFNAVQCFPVGKVALIFCPSSAEGARHSKELAFFRDIAAERPGDIVIWPFRITEEDYVSAVLGSSFLLMPSFTSSADSDHV

SEQ ID NO: 63389 - DNA, 1545 bp, Unknown
  Obtained from environmental sample
  misc_feature (1)..(1545): n is a, c, g, or t
gtgttccgcgacgccgacgaattttcctactcttccgccgacgaagaaaagatcgccctctcccccggacagcgcggctgcgtggagcgtgtggcggcctccctctccgcgcccgataaaccgtttctgctctacggcgtcacggggagcggcaagacgcacgtgtatgccgaactggccaagcgcgtcttgtccgccggacgcggggtgataatcctcgtgccggagatcagcctcacgccgcagactatctcgcgcttccgcgccgccatcggcgacgccgtcgcggtgatccacagccgcatgtccgacggcgagcggcgcgacagcctgcaagagatcgtcacaggccgccgccgcgccgtggtcggcgtccgcagcgcccttctgtgccccatggacgacgtgggcctgatagtcgtggacgaggagcacgacgggtcgtacaagcagagcgacaccgacccgcggtacaacgcccgcgacgccgcggtgatgcgcggacgcttgcaaggcgccgccgtcgtgctgggcagcgccacgccgagcctcgaaagctactacaacgcgctcaccggcaagtacaacctgctcacgctcggcgaccgcttcgggacggcgcggctgcccgccgtcaagatcgtggacatgaccgtcgaacacaaagaaaaaaactggacggcgctgtcgcgatacctcgccgcccggctggacgaggaactctccctgcgccgccaagcgatcctgctgctgaacagacgcgggttctccacctcgctcctttgcaaagagtgcggctactcgcacacatgccccaactgctccgtcaacttgcgctaccacaaggccgacaccgtgctaaagtgccacctctgcggccacgaagaggcggcgcttgcaagctgccccaagtgcggcgggctcaaaatcaagtacaagggcaccggcatccagaaggcggaggagatgataaaggaacgctttccggcggcaaggatactgcggatggaccaagacacgacgcggcgcaaaggctcgcacgccgcgatactcgacaccttcgcgaacggcggcgcggacatattattgggaacgcagatggtggccaaaggcctgaacttccccaacgttacattggtaggcgtactgcacgccgacacggggctgcacttccccgacttcagggcctccgaacgcaccttccagttattgacccaagtggccggccgggcgggtagggcggaactgaccggcgaggtggtaatccaaacctactgcccgggcgccccggcggtgcgcttcgccgccgaacacgactacctgtcgttctacgaacacgagataaagcataggaaggagctctcttacccgccgttcggaaagatggcgcgggtaatcgccgaaggcccggatgaggctgccgccgcgggttttctaaagaaagcggcgaggatggccgttggtgttggtacccgaaagaaaagattctcggacccacggtcgcggtattggcgcgtgttgaacatgtgtacaggtattctatga

SEQ ID NO: 63390 - protein, 514 aa, Unknown
  Obtained from environmental sample
  DOMAIN (322)...(415): Helicase conserved C-terminal domain
  misc_feature (1)..(514): Xaa is any amino acid
MFRDADEFSYSSADEEKIALSPGQRGCVERVAASLSAPDKPFLLYGVTGSGKTHVYAELAKRVLSAGRGVIILVPEISLTPQTISRFRAAIGDAVAVIHSRMSDGERRDSLQEIVTGRRRAVVGVRSALLCPMDDVGLIVVDEEHDGSYKQSDTDPRYNARDAAVMRGRLQGAAVVLGSATPSLESYYNALTGKYNLLTLGDRFGTARLPAVKIVDMTVEHKEKNWTALSRYLAARLDEELSLRRQAILLLNRRGFSTSLLCKECGYSHTCPNCSVNLRYHKADTVLKCHLCGHEEAALASCPKCGGLKIKYKGTGIQKAEEMIKERFPAARILRMDQDTTRRKGSHAAILDTFANGGADILLGTQMVAKGLNFPNVTLVGVLHADTGLHFPDFRASERTFQLLTQVAGRAGRAELTGEVVIQTYCPGAPAVRFAAEHDYLSFYEHEIKHRKELSYPPFGKMARVIAEGPDEAAAAGFLKKAARMAVGVGTRKKRFSDPRSRYWRVLNMCTGIL

SEQ ID NO: 63391 - DNA, 849 bp, Unknown
  Obtained from environmental sample
  misc_feature (1)..(849): n is a, c, g, or t
gtgccccatggacgacgtgggcctgatagtcgtggacgaggagcacgacgggtcgtacaagcagagcgacaccgacccgcggtacaacgcccgcgacgccgcggtgatgcgcggacgcttgcaaggcgccgccgtcgtgctgggcagcgccacgccgagcctcgaaagctactacaacgcgctcaccggcaagtacaacctgctcacgctcggcgaccgcttcgggacggcgcggctgcccgccgtcaagatcgtggacatgaccgtcgaacacaaagaaaaaaactggacggcgctgtcgcgatacctcgccgcccggctggacgaggaactctccctgcgccgccaagcgatcctgctgctgaacagacgcgggttctccacctcgctcctttgcaaagagtgcggctactcgcacacatgccccaactgctccgtcaacttgcgctaccacaaggccgacaccgtgctaaagtgccacctctgcggccacgaagaggcggcgcttgcaagctgccccaagtgcggcgggctcaaaatcaagtacaagggcaccggcatccagaaggcggaggagatgataaaggaacgctttccggcggcaaggatactgcggatggaccaagacacgacgcggcgcaaaggctcgcacgccgcgatactcgacaccttcgcgaacggcggcgcggacatattattgggaacgcagatggtggccaaaggcctgaacttccccaacgttacattggtaggcgtactgcacgccgacacggggctgcacttccccgacttcagggcctccgaacgcaccttccagttattgacccaagtggccggccgggcgggtag

SEQ ID NO: 63392 - protein, 282 aa, Unknown
  Obtained from environmental sample
  misc_feature (1)..(282): Xaa is any amino acid
MPHGRRGPDSRGRGARRVVQAERHRPAVQRPRRRGDARTLARRRRRAGQRHAEPRKLLQRAHRQVQPAHARRPLRDGAAARRQDRGHDRRTQRKKLDGAVAIPRRPAGRGTLPAPPSDPAAEQTRVLHLAPLQRVRLLAHMPQLLRQLALPQGRHRAKVPPLRPRRGGACKLPQVRRAQNQVQGHRHPEGGGDDKGTLSGGKDTADGPRHDAAQRLARRDTRHLRERRRGHIIGNADGGQRPELPQRYIGRRTARRHGAALPRLQGLRTHLPVIDPSGRPGG

SEQ ID NO: 63393 - DNA, 477 bp, Unknown
  Obtained from environmental sample
  misc_feature (1)..(477): n is a, c, g, or t
ttgatgagaaataagcagagccaggctcttattgagcaggaggaagcggagcttgaggaaaggcgcagggatattgaaaaagaagttgcttcaaaggaggatcagttaaaggagctctcgcaaaaggaaaacgatcttgccctggaactgaacgatcccgatgtactttttaaattcgaaaggataatcaggaataaaatgggcaaaggtattgtggccattaaaggcggcgtctgcatgggctgccatatgattcttcccgcccaatttgccaatacagtccgccagggcgaggagatagttttctgcccgtattgctccaggattctctattatgaagaatccgagcagagcgaagaagatctctttaacgatgaagattcaggcagtctttcggatctggacgatatggaagacgaagattacgatgaagacgaggaagaagatgaaaaggtaagcgcggattacgatgaataa

SEQ ID NO: 63394 - protein, 158 aa, Unknown
  Obtained from environmental sample
  DOMAIN (2)...(114): Uncharacterized ACR, COG1579
  misc_feature (1)..(158): Xaa is any amino acid
MMRNKQSQALIEQEEAELEERRRDIEKEVASKEDQLKELSQKENDLALELNDPDVLFKFERIIRNKMGKGIVAIKGGVCMGCHMILPAQFANTVRQGEEIVFCPYCSRILYYEESEQSEEDLFNDEDSGSLSDLDDMEDEDYDEDEEEDEKVSADYDE

SEQ ID NO: 63395 - DNA, 573 bp, Unknown
  Obtained from environmental sample
  misc_feature (1)..(573): n is a, c, g, or t
gtgcgtggaagcgtggaaaacctatttgtgcgcgctggatacaccggggtaaggcggcgcagaaacctgcgtggcgggggcataatacaaaacaaggtaaaaccaaagaaagcgaacgaagtgtggacggtggatttcaaagggtggtggtatacaaaaaacaaggaaagggtaaacccgctgacagtgcgggacgaatacagcaaatacatattggcgatagatgtggtcgaaaaaggcgatacagcaagcgttaaacacgtgtttcagcgcatatttaagaagtttggaatgccgcagtatatacgcagcgataacggcccgccgtttgccaatgtgcttaatttctggggcttaacgaaattatcggtatggtggatgacattgggaatacagcttgaccgcgactaccctgggcatcccgaacaaaacggcgggcacgaaaggatgcaccgcgacatgaaaacagaactacagggccaaatagacggctcgcttaatgaacaccaaaaagtgtttgacaagtggcggaaagaatttaacgaagtgcgcccacatgaagcattgggatga

SEQ ID NO: 63396 - protein, 190 aa, Unknown
  Obtained from environmental sample
  DOMAIN (34)...(190): Integrase core domain
  misc_feature (1)..(190): Xaa is any amino acid
MRGSVENLFVRAGYTGVRRRRNLRGGGIIQNKVKPKKANEVWTVDFKGWWYTKNKERVNPLTVRDEYSKYILAIDVVEKGDTASVKHVFQRIFKKFGMPQYIRSDNGPPFANVLNFWGLTKLSVWWMTLGIQLDRDYPGHPEQNGGHERMHRDMKTELQGQIDGSLNEHQKVFDKWRKEFNEVRPHEALG

SEQ ID NO: 63397 - DNA, 1104 bp, Unknown
  Obtained from environmental sample
  misc_feature (1)..(1104): n is a, c, g, or t
atgatcagatcggccgagggggaatccgggaagtatcccaaagatatggaatttttccggcttgccgaaaatcttaatcttaaacacgcaaaactctgcgcctttggccctacacgaaaaaaaggagtcaagacaggcgaagataccggagttttaagccttcttgacgcgcagactcaggcggtagtgatcttcggcaaaagctgggactttcatgtttcggaagtgctgaaggtaagccatgaagaaaatcttgcaatgattgcggagacaattgcgttctttaaagaaaaggggaagcaggttttttacgatgccgagcatttttttgacggctggaaggcaaaccccgaatacgctcttactactttaaaaacggcaatgaccgccggagcgcagcgcatgatactgtgcgatacaaacggcggcgcgtttcccgacactatagagaaagcggttaaggaagccatgaaaattatcgacggctcttcctgcgttctgggcattcacgcgcacaacgacgcggacatggcaagcgcgaatactattaccgccgtccttgccggatgccgtcatgttcagggaacccttgtcggtttcggcgagagatgcggcaatacaagccttgcggcggttatgccaagccttgaacttaaacttggtttccgctgcctgcctgagggaaaaatagtgcttctttccgagataacgcagattgtcgcggagacagcaaatgtcgcagtgccgggaaatatgccatacgttggaagccacgcttttacacataaggcgggaatgcacgcggatggtattttaaaggtgagcaagtcttttgaacatatcgatccttctctagtggggaacgacaggcatattgtaatgagcgaagtcggcggacgctctgccattgcggagagggcgaagaagatcgattcttccattacaaaggatcaccctattacagcagcccttgcgcaaaaattaaaagctcttgaagcggagggatggcagtttgagggagcggacggcagttttgatcttttggttcgccgagagcttgggcggtcaaaccgctgtttaacattgaggcttaccgcgtggtaa

SEQ ID NO: 63398 - protein, 367 aa, Unknown
  Obtained from environmental sample
  DOMAIN (5)...(246): HMGL-like
  misc_feature (1)..(367): Xaa is any amino acid
MIRSAEGESGKYPKDMEFFRLAENLNLKHAKLCAFGPTRKKGVKTGEDTGVLSLLDAQTQAVVIFGKSWDFHVSEVLKVSHEENLAMIAETIAFFKEKGKQVFYDAEHFFDGWKANPEYALTTLKTAMTAGAQRMILCDTNGGAFPDTIEKAVKEAMKIIDGSSCVLGIHAHNDADMASANTITAVLAGCRHVQGTLVGFGERCGNTSLAAVMPSLELKLGFRCLPEGKIVLLSEITQIVAETANVAVPGNMPYVGSHAFTHKAGMHADGILKVSKSFEHIDPSLVGNDRHIVMSEVGGRSAIAERAKKIDSSITKDHPITAALAQKLKALEAEGWQFEGADGSFDLLVRRELGRSNRCLTLRLTAW

SEQ ID NO: 63399 - DNA, 393 bp, Unknown
  Obtained from environmental sample
  misc_feature (1)..(393): n is a, c, g, or t
gtggtaagcgaacacccgacaggcgaaacaatcgcctgttcccatgcgtgggtaaaagttcatgttgacggacaggaagaaatcgccgccgccgaaggagccggacctgtcaacgcgatggacggcgcgcttcgcagggcgttgaaacatttttatccggaactgcaagaggttcgtcttaccgactacaaagtcagggtaatagacggcaacgcagcgaccgcggcgaaggttcgcgtattaatcacttcttccgacggcaaacaaagctggacgacggtaggagtttcggaagacatcatcgacgcaagccgatctgcgcttgtggattcaatagaatacaaattaattgaagatatagaacgacgctttaaagcgtatatgcgccattga

SEQ ID NO: 63400 - protein, 130 aa, Unknown
  Obtained from environmental sample
  DOMAIN (2)...(116): LeuA allosteric (dimerisation) domain
  misc_feature (1)..(130): Xaa is any amino acid
MVSEHPTGETIACSHAWVKVHVDGQEEIAAAEGAGPVNAMDGALRRALKHFYPELQEVRLTDYKVRVIDGNAATAAKVRVLITSSDGKQSWTTVGVSEDIIDASRSALVDSIEYKLIEDIERRFKAYMRH

SEQ ID NO: 63401 - DNA, 1002 bp, Unknown
  Obtained from environmental sample
  misc_feature (1)..(1002): n is a, c, g, or t
atgaaattttcagttgcggtaatacccggagacggaatcggacccgaagttatagcgccgactctcgaagttcttgacgcagtaggagacaagtacggtcatatttttaactatgtcgagcttgaagccggcggtcttgccattgatcacacgggagagccgctcccaaaagaaacgcttgaagcggcgaagcagtgcgacgctcttctcttgngcgcggtcggcggtcccaagtgggatacgcttcccggacatctgcgtccggaaagggcgctgttgggtcttcgcgccgggcttggcgtttttgccaaccttcgtcntgcggcattgctccctcaattaaaatccgcatgccctgttaaggacgaggtgctaattgcaagcagcggcgaaggaaaagccgcttttgatttattgattgtaagggaattaacgggcgggctttactttggcaagcgcgggaggttggacgagccttcaagcggccacagtcccggttcggcttttgatacagagacatattcgtggatggaaattgaacgcgtgcttcgcgcgggttacgaagcggcggcggtgcggcggaaaaaactctgcgtggtggacaaagccaatgtgcttgagtcgtcgcgtttctggcgcgaagtcgcggcggtggtctcaaaagattatccggatatcgaaacaagttacctctacgttgacaatgccgctatgcagttgatccgcgctccggggcaattcgatgttatcgtaacttcaaatctctttggagacatactttccgatgaggcgtccgtgcttacgggttcaatcggaatgcttgcctcggcaagtctcggcgaaaaagtgcaaacaggaacaagaccgggaatgtacgagcctattcacggctccgcgccggacatcgcggggaaggacattgccaatcctctcgcgactattctttcggcggcgatgatgctccgctactcattcggtctgaaaaggaagcggccgctgtga

SEQ ID NO: 63402 - protein, 333 aa, Unknown
  Obtained from environmental sample
  DOMAIN (4)...(333): Isocitrate/isopropylmalate dehydrogenase
  misc_feature (1)..(333): Xaa is any amino acid
MKFSVAVIPGDGIGPEVIAPTLEVLDAVGDKYGHIFNYVELEAGGLAIDHTGEPLPKETLEAAKQCDALLLXAVGGPKWDTLPGHLRPERALLGLRAGLGVFANLRXAALLPQLKSACPVKDEVLIASSGEGKAAFDLLIVRELTGGLYFGKRGRLDEPSSGHSPGSAFDTETYSWMEIERVLRAGYEAAAVRRKKLCVVDKANVLESSRFWREVAAVVSKDYPDIETSYLYVDNAAMQLIRAPGQFDVIVTSNLFGDILSDEASVLTGSIGMLASASLGEKVQTGTRPGMYEPIHGSAPDIAGKDIANPLATILSAAMMLRYSFGLKRKRPL

SEQ ID NO: 63403 - DNA, 1215 bp, Unknown
  Obtained from environmental sample
  misc_feature (1)..(1215): n is a, c, g, or t
atgatgttgaagaaaatcaacctgctttgtttgctgttgtgtttatcgtttttagcgttaggcgcttgtaaaagttctccttcaaccggcgcttccgccgctgacgcgcaggcgtcggcgaattccgcgcttggaagacttgatgatcaagtggggggacgtccatcagacgctccaaacgcgcctgttttgccgcagcagccgtcgggcgggcaaaatgtttcttcatcaaaacaacaacctgcggtaaatcacagcagaagcaagcccgcatgggttgattctgttgaatctgtatataacagttccagttatgtcgccgcggtgggtaatgcttccagccgtgatatggcggaaaaaaacgcgcttgccaatcttaccgcgattttcggtcaatccataaaggcggatcagacaattacaaacacatatcaggaagcggttaaaaaaggcgttactttaagttggacggataatattgccatgcaaaatacaataaataccaccgcctccatggacacgcttattggcgcggaagtaaaagaagtttggtttgattcaaagagcacccactacgccgtagctgtcatggataaagcaaaaaccgcccaaatatacaacgaactgataagagcaaatcagactatgatagccaatcttgtcaatatgaaagatacggaaaaaaattcaatggaaggagtttcccggtatcaatttgccgcggctgccgcggatattaatgttacatacgggaatgttctgcgggtgataggctctcctgttccggcgggacttacaaaaggcgataattacaggcttgaggcgcaaaatataaccaaagctattccgatcggtataattgtaaagaacgataaagcgggaagaattcaaggcgcgttcgcaaaagcgttttccgatatcggctttagaagcggcggaaataattcgcgctatattcttaatgttgatattactgtctctcccgtcgatttacccaacaataacaataaattcgcccgcatagagcttagtgcaaatcttacggatacaagcgaaaaatcggtgctattgccttacaattttaacagccgcgaggggcatatcaccgccgcggaagctgaaaatcgcgcatatatggcggcggaacgtaaaataaacgaggaatataagaatatattatcagattatttaaatcaattattgccaaaaaagtaa

SEQ ID NO: 63404 - protein, 404 aa, Unknown
  Obtained from environmental sample
  SIGNAL (1)...(25)
  misc_feature (1)..(404): Xaa is any amino acid
MMLKKINLLCLLLCLSFLALGACKSSPSTGASAADAQASANSALGRLDDQVGGRPSDAPNAPVLPQQPSGGQNVSSSKQQPAVNHSRSKPAWVDSVESVYNSSSYVAAVGNASSRDMAEKNALANLTAIFGQSIKADQTITNTYQEAVKKGVTLSWTDNIAMQNTINTTASMDTLIGAEVKEVWFDSKSTHYAVAVMDKAKTAQIYNELIRANQTMIANLVNMKDTEKNSMEGVSRYQFAAAAADINVTYGNVLRVIGSPVPAGLTKGDNYRLEAQNITKAIPIGIIVKNDKAGRIQGAFAKAFSDIGFRSGGNNSRYILNVDITVSPVDLPNNNNKFARIELSANLTDTSEKSVLLPYNFNSREGHITAAEAENRAYMAAERKINEEYKNILSDYLNQLLPKK

SEQ ID NO: 63405 - DNA, 855 bp, Unknown
  Obtained from environmental sample
  misc_feature (1)..(855): n is a, c, g, or t
atgtccgatcagtatatatataattacgatgagataataaaagttcttccggcttgggcggaagaacttgcgaataaataccgttccaagaccgcgaatgtatatattttacacggaaacataagagatttccttcctcacgaaaaaaaagaaggcgagtttgcttttaaaagagtgcaggattatatctctgaaattttattcggcaaccaaaaaataatcgcattctacgacagttccagaggacttacattttgcgagccgcacatggaaaaaaattaccttgccgccgctccgcagtttgccgtaagctccgattttgattcaggcgattttgtttcaaatgatccggagcggtgttttccgtacttggaaaaatattttctttcgcaggtacaagaggataaaaagaataaaggcagaaaagttttaatcgtagactttgccgaacatattgttcccgccggggatttgattcgtttgtccgacagagaccgttactgtatggttactttcaaccgatgggcgacagaccctaaatttatcagaggcgatatatcgattattctgctgactgaaaatctgtccgatatttcatctcgtcttacaagttctcccgctatcgtaaaaatcagcgttccgtttccaagcgcgaaaataagggaaagttttttacgctcggaagaagaaaaaggtcgtcttttacttgaacgcagtttaacgcccgaaaaacttgcctcaattacatcgggtcttaatctgatgaacttgtaccgtcttgccgcggagagttatgaaagtgaaaaaccaatctcgcttgatttcatgcggcagaaaaagaaagaaataatctag

SEQ ID NO: 63406 - protein, 284 aa, Unknown
  Obtained from environmental sample
  misc_feature (1)..(284): Xaa is any amino acid
MSDQYIYNYDEIIKVLPAWAEELANKYRSKTANVYILHGNIRDFLPHEKKEGEFAFKRVQDYISEILFGNQKIIAFYDSSRGLTFCEPHMEKNYLAAAPQFAVSSDFDSGDFVSNDPERCFPYLEKYFLSQVQEDKKNKGRKVLIVDFAEHIVPAGDLIRLSDRDRYCMVTFNRWATDPKFIRGDISIILLTENLSDISSRLTSSPAIVKISVPFPSAKIRESFLRSEEEKGRLLLERSLTPEKLASITSGLNLMNLYRLAAESYESEKPISLDFMRQKKKEII

SEQ ID NO: 63407 - DNA, 1767 bp, Unknown
  Obtained from environmental sample
  misc_feature (1)..(1767): n is a, c, g, or t
atgtccgatcaatatatatataattacgatgatattataaaggttctgccggcatgggccgaagaacttgcgaataaataccgttccaaaaccgcaaatgtatatattttacacggaaacataagggattttcttcctcacgaaaaaaaagaaggcgagtttgcttttaaaagagtgcaggattatatctctgaaattttattcggcaaccaaaaaataatagcgttctacgacagttccagagggcttacattttgcgagccgcacatggaaaaaagttacattgccgccgccccgcagtttgccgtaagctcggattatgattccggcgattttgtttcaaatgatcctgagcggtgttttccgtacttggaaaaatattttctttcacagatacaagaggataaaaaaaataaaggcagaaaagttttaatcgtagactttgccgagcatattgttcccgccggggatttaatccgcctgtccgacagagaccgttactgtatggttactttcaaccgatgggcgacagacccaaaatttatcagaggcgatatatcaattattctgctgactgaaaatttatccgatatttcatcgcgtcttacaagttctcccgcaatcgtaaaaataagcgttccgtttccaagcgcgaaaatcagggaaagttttctccgttctgaagaagaaaaaggaaaactcctgcttgaacgcggattaacgcccgaaaaacttgcctcaattacatcgggtcttaatctgatgaacttgtaccgtcttgccgcggaaagttatgaaagtgaaaaaccaatctcgcttgatttcatgcggcagaaaaagaaagaaataatcgagaacggagccggcggtcttttggaattcatggaaacttcatacgatctttcccatgtgtcgggtcatgattttgttaaaaagcgatttaagaacgccgcgaaggcgattaaaaaaggacgccccgatgtattgccgatgggatatttaatcgccggtcccgtaggtacgggtaaaagttttatggttaacgccttcgcgggcgagattggaattcccatggtgaagttccgcaacttccgcacaaagtggcagggcgagacagaatcgaatcttgaaagagtattaaatattcttacggcgatgtctcccgtaggagtgatgatagacgaagccgacgctttccttggagatcgctctcaggaaggggattcaggcacaagcaaccgcgtgttcgcgcagatagcctcattcatgggcaatacggaataccgcggcaaaattatctggttcttaattacatgccgccctgacttaataccgattgaccttaaacgtcagggacgcgccgaagaacatcttgctcttttttatcccgagtcaaaaaaagacagggaagacctttttgacacattggtacgcaaacttgatttagacattcgcaatttttcggtttccgatctttttaagaaatacgattacgaatattcaggcgcggatttggaagcggttcttgtgcgcgcgaaacttatcgcggcaatggcggatcgtatctatgtaaaaaaggaagacatggaagaggcgatgaacgactttgttcccgccgcctatccgcacgaagttgaactgcaaaatctggttgcggttttggaatgtacctcaaaggaaatgcttccttcgcgttttcaaaaattaccgcgcagcaagataatcagcgatattcaagaacttaaaatgctaatnggcagcgggtag

SEQ ID NO: 63408 - protein, 588 aa, Unknown
  Obtained from environmental sample
  DOMAIN (332)...(519): ATPase family associated with various cellular activities (AAA)
  misc_feature (1)..(588): Xaa is any amino acid
MSDQYIYNYDDIIKVLPAWAEELANKYRSKTANVYILHGNIRDFLPHEKKEGEFAFKRVQDYISEILFGNQKIIAFYDSSRGLTFCEPHMEKSYIAAAPQFAVSSDYDSGDFVSNDPERCFPYLEKYFLSQIQEDKKNKGRKVLIVDFAEHIVPAGDLIRLSDRDRYCMVTFNRWATDPKFIRGDISIILLTENLSDISSRLTSSPAIVKISVPFPSAKIRESFLRSEEEKGKLLLERGLTPEKLASITSGLNLMNLYRLAAESYESEKPISLDFMRQKKKEIIENGAGGLLEFMETSYDLSHVSGHDFVKKRFKNAAKAIKKGRPDVLPMGYLIAGPVGTGKSFMVNAFAGEIGIPMVKFRNFRTKWQGETESNLERVLNILTAMSPVGVMIDEADAFLGDRSQEGDSGTSNRVFAQIASFMGNTEYRGKIIWFLITCRPDLIPIDLKRQGRAEEHLALFYPESKKDREDLFDTLVRKLDLDIRNFSVSDLFKKYDYEYSGADLEAVLVRAKLIAAMADRIYVKKEDMEEAMNDFVPAAYPHEVELQNLVAVLECTSKEMLPSRFQKLPRSKIISDIQELKMLXGSG

SEQ ID NO: 63409 - DNA, 714 bp, Unknown
  Obtained from environmental sample
  misc_feature (1)..(714): n is a, c, g, or t
atgcgaaacacctacccctaccctatccataccgtaatcaaaattgtaacgggaactatacccgcttatgtgtaccacggtcatcagttatctcacatttacagcaattttaactggataatagaattacttgtccgttttttcttgaaacctttcggcattaaaaatataacggactcccgaagcccctttaagcgttttaaaatagaaagaaaagcttacgctttttccataaaaaatcattgcctgtcaataatcgggcatactcaccgcgcgctgtttgaatcattgggacgtttcgactatatcaaattcgagatcgaaaggctttgcagggattatcccgcctctgtcggggaagaccgtctgcgtatagaaaacgaagttaacgctctgcgtaaagagttaggcagattaaagcataaagaacgccgcgacgtactgcgccaaagcctctacggagacgaattacccgttccctgtctgtttaattcggggtgcgctgttggaaagaagggattaacagcgatagaaatgacaaacaaagacatcgcccttgtgtactggttcaccgaaggaaagagcaggaaattcgtcacacgcgggaattacgatattgtaaaaattccaggaagaccgtataaccgcgccgtgttgaattacaacaaacttgattatgttttcgcgcggattaaattgctgggtaaccagtga

SEQ ID NO: 63410 - protein, 237 aa, Unknown
  Obtained from environmental sample
  misc_feature (1)..(237): Xaa is any amino acid
MRNTYPYPIHTVIKIVTGTIPAYVYHGHQLSHIYSNFNWIIELLVRFFLKPFGIKNITDSRSPFKRFKIERKAYAFSIKNHCLSIIGHTHRALFESLGRFDYIKFEIERLCRDYPASVGEDRLRIENEVNALRKELGRLKHKERRDVLRQSLYGDELPVPCLFNSGCAVGKKGLTAIEMTNKDIALVYWFTEGKSRKFVTRGNYDIVKIPGRPYNRAVLNYNKLDYVFARIKLLGNQ

SEQ ID NO: 63411 - DNA, 966 bp, Unknown
  Obtained from environmental sample
  misc_feature (1)..(966): n is a, c, g, or t
atggcgaggcgatggcatgacctcggcgggacgacgataaagggcgccgttatagacggtcatgggatttgcggcgaggttacgcgtgtgcccacggaggcgcacggcggcggcgagcgcattatggcgaacatactttcgctcattgggaagcttgcggacggcggaggcggcgcgggggcgtttatcggcgtgggcatagggacgccgggttttgtggactccgacgggaagattttgaacggcggcgcgaatctgccggggtggacggggatgcaggtatacgcgccgattgcggagcggttcgggttgcgggcgtcggcggccaacgacgtgacggcggtggcgcttgccgagcttatgttcggagcggggcgcggcgtgcagaacatgatttgcttcgcgcttggcacgggcgtcggcggcggcatagtgaccaacgggcggctctacaagggcagccacgggatggcgggggagatagggcacatcatcgtggagacggacggggaaccgtgcccgtgcggccagcgcggttgcgtggagcgctacgcatcggcgacggggatagtgaaaatggcgcttgatatggtcaataaggccggcgaaggagatcttacggcgtttgcaaaactggctcgcgagaatccgggggaggttacaagcaaattggtttacgagtacgtggcaaagaatgacgcgttggcgctaaaggtgcacgaaagggcgtgcgacatgctcggccgcgccgtgggggtaatgatcaacaccttctcgcccgaccgggtggtgctgggcggcggcgtgatgatggcgggcggcgtggtgcttgaggcggtcaagaaatatacggcgctccactgctggccggagatattcgatctttgcgaaatcgtgccggctcagatgggggaagacgcgggggtgctgggcgccggggcgctggctttggaagagttcggttga

SEQ ID NO: 63412 - protein, 321 aa, Unknown
  Obtained from environmental sample
  DOMAIN (7)...(319): Glucokinase
  misc_feature (1)..(321): Xaa is any amino acid
MARRWHDLGGTTIKGAVIDGHGICGEVTRVPTEAHGGGERIMANILSLIGKLADGGGGAGAFIGVGIGTPGFVDSDGKILNGGANLPGWTGMQVYAPIAERFGLRASAANDVTAVALAELMFGAGRGVQNMICFALGTGVGGGIVTNGRLYKGSHGMAGEIGHIIVETDGEPCPCGQRGCVERYASATGIVKMALDMVNKAGEGDLTAFAKLARENPGEVTSKLVYEYVAKNDALALKVHERACDMLGRAVGVMINTFSPDRVVLGGGVMMAGGVVLEAVKKYTALHCWPEIFDLCEIVPAQMGEDAGVLGAGALALEEFG

SEQ ID NO: 63413 - DNA, 321 bp, Unknown
  Obtained from environmental sample
  misc_feature (1)..(321): n is a, c, g, or t
atggcgggcgattatagtgaaatttttaatgaaatatcggaacttctccagaaagggaaagctagagatatcgcggcatccgtgcagaaagctttggatgcgggagccgagccggctgatattctacaaaatgcgctgatggcgggtatgaatatcattggcggtaaattcaagaggaacgaggtttttgtgcctgaagttttaatcgccgcacgcgccatgaacaaagccacggaagccctaaaaccggcccttgcgaaagncgggtgttcagcctgtgggacaggcgattatttgtaccgtcaagggcgaccagcatga

SEQ ID NO: 63414 - protein, 106 aa, Unknown
  Obtained from environmental sample
  DOMAIN (4)...(91): B12 binding domain
  misc_feature (1)..(106): Xaa is any amino acid
MAGDYSEIFNEISELLQKGKARDIAASVQKALDAGAEPADILQNALMAGMNIIGGKFKRNEVFVPEVLIAARAMNKATEALKPALAKXGCSACGTGDYLYRQGRPA

SEQ ID NO: 63415 - DNA, 1023 bp, Unknown
  Obtained from environmental sample
  misc_feature (1)..(1023): n is a, c, g, or t
atgataatagcgttaaagccgggcgtaagtaaggaagatttacagaaattaattgccgatctggaaaagttaggtgtaaaggtcgatacttcgcaaggggcgtcgcaagcggttctggggcttgttggcgatactaccgtcattaatgatgaggcgttaaaagccaatcatctggtggaaaaggtcatccgcgttcaggagccgtacaagcgggcgaatcgtgcgttccatcccctggatacgattttggattttgaatatgacggtaaaaaaactaaaatcggcgcagggaattttagcgttattgcggggccttgttctgtggaaagcagggaacaattaatctcaattgcaaaatcggttaaaaaatcgggcgcggcttttttgcgcgggggagcttttaagcccaggacaagtccctatagttttcagggaatgggctgtttagggattgatcttctggtggaggcaagaaaagaaacagggcttccgattgttaccgagttaatggaaataagccaacttgaattgtttgatgatgttgacatgattcaagttggagcgcgtaatatgcagaactttaatctgttaaaagaattgggacgctgccgaaagcctattctgcttaaacgcggaatgtcgtccacaatgacggaactgcttatggcggctgaatatgtcatggcgggcggcaatgataaaattgtgttatgcgaaagaggaattcgcggatttgataattttacgcgtaacattcttgatatagcgattattcccgcgcttaagaaaaaaacccatctgcccgtgattgttgatccaagccatgcgacggggctttcgtggatggtccccgccatgtcaaaagcggcaattgcagcgggagcggacggtattattgtcgaagttcacaacgatcccgaatgcgccctttgcgacggggaacaatcccttaccccggaatcattttcaactttgatggatacccttcgcaaatacgccgccatcgaaaacaaggtgatttaa

SEQ ID NO: 63416 - protein, 340 aa, Unknown
  Obtained from environmental sample
  DOMAIN (80)...(335): DAHP synthetase I family
  misc_feature (1)..(340): Xaa is any amino acid
MIIALKPGVSKEDLQKLIADLEKLGVKVDTSQGASQAVLGLVGDTTVINDEALKANHLVEKVIRVQEPYKRANRAFHPLDTILDFEYDGKKTKIGAGNFSVIAGPCSVESREQLISIAKSVKKSGAAFLRGGAFKPRTSPYSFQGMGCLGIDLLVEARKETGLPIVTELMEISQLELFDDVDMIQVGARNMQNFNLLKELGRCRKPILLKRGMSSTMTELLMAAEYVMAGGNDKIVLCERGIRGFDNFTRNILDIAIIPALKKKTHLPVIVDPSHATGLSWMVPAMSKAAIAAGADGIIVEVHNDPECALCDGEQSLTPESFSTLMDTLRKYAAIENKVI

SEQ ID NO: 63417 - DNA, 306 bp, Unknown
  Obtained from environmental sample
  misc_feature (1)..(306): n is a, c, g, or t
atggcggggaccatccacgaaagccccgtcgcatggcttggatcaacaatcacgggcagatgggtttttttcttaagcgcgggaataatcgctatatcaagaatgttacgcgtaaaattatcaaatccgcgaattcctctttcgcataacacaattttatcattgccgcccgccatgacatattcagccgccataagcagttccgtcattgtggacgacattccgcgtttaagcagaataggctttcggcagcgtcccaattcttttaacagattaaagttctgcatattacgcgctccaacttga

SEQ ID NO: 63418 - protein, 101 aa, Unknown
  Obtained from environmental sample
  misc_feature (1)..(101): Xaa is any amino acid
MAGTIHESPVAWLGSTITGRWVFFLSAGIIAISRMLRVKLSNPRIPLSHNTILSLPPAMTYSAAISSSVIVDDIPRLSRIGFRQRPNSFNRLKFCILRAPT

SEQ ID NO: 63419 - DNA, 873 bp, Unknown
  Obtained from environmental sample
  misc_feature (1)..(873): n is a, c, g, or t
ttgccggtaattaaagactgtacttttggcattgtggggcttgggctaatgggcggcgcaattgccaaagccctgcgtaataattgcggtgtttcgcaggaaaaattgtatgcctgcaatagaagtaaagaagctttagagacagcacaacaggcagggcttattggtcgcggatatgacgcgccccacgccggagaaatgctttcttcctgtgatgttgtttttatttgtttaaacccttcagcaataattaattttcttggtcagtgggcagactcatttaaaagcggaagtattgtcacggatattggaggaacaaaaaaaagcattgtcgccgccgcggaaaaatttcgtgaagatgttgattttatccccggtcacccgatggcaggcgcggaaaaaagcggatttgccaattcagagctttgcgatttccacggaaagaattacatacttactccaatttcgcgtaacaagagtgaaaaccttgattttttaaaagacattatttaccgcatgggttttgcgcgtatcactcaagtaactcccgaagaacacgatagaaaaatcgcttttacaagccagctttgccatgtgattgccgccgccttgattgactgcgaaacggatacgaagattacccgttttggcggcggcagttttgaagacttaacccgtatcgccatgcttaacgcccctatgtggactgagatttttatcgaaaacaacgacgctcttttggaacgcataaatcaatttgaaaagagccttgatttattaaagactctgattaaagacgaacaggcggatgaattgatgaaaagactcgctgttgtaagagagcgcagaatagagatgggtaagaaagaatga

SEQ ID NO: 63420 - protein, 290 aa, Unknown
  Obtained from environmental sample
  SIGNAL (1)...(22)
  DOMAIN (6)...(148): NAD binding domain of 6-phosphogluconate dehydrogenase
  misc_feature (1)..(290): Xaa is any amino acid
MPVIKDCTFGIVGLGLMGGAIAKALRNNCGVSQEKLYACNRSKEALETAQQAGLIGRGYDAPHAGEMLSSCDVVFICLNPSAIINFLGQWADSFKSGSIVTDIGGTKKSIVAAAEKFREDVDFIPGHPMAGAEKSGFANSELCDFHGKNYILTPISRNKSENLDFLKDIIYRMGFARITQVTPEEHDRKIAFTSQLCHVIAAALIDCETDTKITRFGGGSFEDLTRIAMLNAPMWTEIFIENNDALLERINQFEKSLDLLKTLIKDEQADELMKRLAVVRERRIEMGKKE

SEQ ID NO: 63421 - DNA, 534 bp, Unknown
  Obtained from environmental sample
  misc_feature (1)..(534): n is a, c, g, or t
gtgactgaaaaatttataactgacgcgcttctttccgccggtaaaactacaggcgtttccgttcatgaaaaggcaattctgcccgtaaccgcgcttaccttctcccctgccctgcttgacagttgtaagacaaatgtatgcggcaattacaataaatcatgggtttgccctcccgtctgcgagagcgttgaagagcaaaagaaaaaaatacttttctttaaaaactttttagtatttacaacaatgcacaccctcgaagattcttttgactatgacggaatgacaaagggaagagaacttcatttattgctgacatcagaattaaaaaaaaggttagacgttcccgtatatggcgcgggaaattgcccagtgtgtaagacttgtacatttccggaaccatgcccatttcccgaaaaaaaaattggctctatagaagccgcaggaattgacgtaacaaatttgagtaagacggcgggtatcgcttataataacggacaaaatacggttacgtttttttctattgcgctattttaa

SEQ ID NO: 63422 - protein, 177 aa, Unknown
  Obtained from environmental sample
  misc_feature (1)..(177): Xaa is any amino acid
MTEKFITDALLSAGKTTGVSVHEKAILPVTALTFSPALLDSCKTNVCGNYNKSWVCPPVCESVEEQKKKILFFKNFLVFTTMHTLEDSFDYDGMTKGRELHLLLTSELKKRLDVPVYGAGNCPVCKTCTFPEPCPFPEKKIGSIEAAGIDVTNLSKTAGIAYNNGQNTVTFFSIALF

SEQ ID NO: 63423 - DNA, 351 bp, Unknown
  Obtained from environmental sample
  misc_feature (1)..(351): n is a, c, g, or t
atgaagatcagaggggcgcaagtggacagcgacgaaataaacgattttcagcagaccgacacattcagggactggcttggcagactcaaggacaaaaaggctaagcagcggataaacgagcgcatcaagctggccatccggggcgaccttggcgactgcgagacaatcgaaggtggagtcatcgaaatgaagctgcactttggccccggctatcggctatactgttatcagcacagcccgaaccaataccggctactagtcgggggaacaaaaaaagagcagcagcgcgacatcgggcgggcgcggagaatgaagagtgaactggagggggagggcggatggttacactga

SEQ ID NO: 63424 - protein, 116 aa, Unknown
  Obtained from environmental sample
  DOMAIN (57)...(108): Phage derived protein Gp49-like (DUF891)
  misc_feature (1)..(116): Xaa is any amino acid
MKIRGAQVDSDEINDFQQTDTFRDWLGRLKDKKAKQRINERIKLAIRGDLGDCETIEGGVIEMKLHFGPGYRLYCYQHSPNQYRLLVGGTKKEQQRDIGRARRMKSELEGEGGWLH

SEQ ID NO: 63425 - DNA, 1116 bp, Unknown
  Obtained from environmental sample
  misc_feature (1)..(1116): n is a, c, g, or t
atggaaaggcgcgacatgcacccgctcttcagcctctggaacagtatacggcagtatttgatcccctacgtggaagaaaacctggcccccctgtccgggaaggaggccgagttcgtcagggcggcggagctcgccggcgtggacggcttcatcagggagtacatgtggtgcggcaacggcaggaagccgcacctccgcaagcccctggcgctggccttcatcgccaaggccgtctggaacctgccgaccacgagggccctgatcgacttcctcaaggcgaacgggaccgtgcgggcgctgtgcggctgggagcgggcggccgacatgccgtcggaggcgaccttctcccgcgccttcgaccagttcgccgggggcaggctgcctgagcggctgcacggggcgatggtcggggccgcgatgggggggaggctggtgggccacgccagcatggactcgacggaggtggaggccagggagagggcggcggcgaagccgaagaaagaaaataagccaaagccaatggagaggcagaggcccggccccaggaagggccacaagcgcggcaagaggcagcccaagcggctggagctgcaggccggcaggacgctggaggagaacctcgccgacctgccgcgccagtgcgactacggcttcaagcggaacagcaaggggttccaccacatgtggaaggggtacaagctgcacatggccgttgcggactgcggggcgcccatctgcgccgtcctcacgagcgcgtccacgcatgattcgcaagtggccataccgctcatgcagatgggcggggggagggcggccgtcctatacgacctcgcggactcggcctacgacgccgcttccataagggagtacagccgctcccttggccatgttccaataatagagccgagcggccggcgcaggggcgcgccccggctgccccccgccgagaaggcccgccacagggagcgcggcgcggtggagagggcgttctccagcctgaaggacagctgcggcgggcgctttgtgagggtgaggggcgcggcgaaggtgatggcgcaccttatgttcggggtggtcgcgcttacggcggcctgcctggcgcgcctggtcgagtga

SEQ ID NO: 63426 - protein, 371 aa, Unknown
  Obtained from environmental sample
  DOMAIN (200)...(363): Transposase DDE domain
  misc_feature (1)..(371): Xaa is any amino acid
MERRDMHPLFSLWNSIRQYLIPYVEENLAPLSGKEAEFVRAAELAGVDGFIREYMWCGNGRKPHLRKPLALAFIAKAVWNLPTTRALIDFLKANGTVRALCGWERAADMPSEATFSRAFDQFAGGRLPERLHGAMVGAAMGGRLVGHASMDSTEVEARERAAAKPKKENKPKPMERQRPGPRKGHKRGKRQPKRLELQAGRTLEENLADLPRQCDYGFKRNSKGFHHMWKGYKLHMAVADCGAPICAVLTSASTHDSQVAIPLMQMGGGRAAVLYDLADSAYDAASIREYSRSLGHVPIIEPSGRRRGAPRLPPAEKARHRERGAVERAFSSLKDSCGGRFVRVRGAAKVMAHLMFGVVALTAACLARLVE

SEQ ID NO: 63427 - DNA, 345 bp, Unknown
  Obtained from environmental sample
  misc_feature (1)..(345): n is a, c, g, or t
ttggcttttgccggaagaggacgcggcatggcagaatttataaaaggcgacgtgattgttgtgccatttccgttctcagatttgacttcattgaagcgccgccctgcgctagttttggccaagtctggcgcaaacgatttcattctagcgcagattacgagcaagggcgttggcgatgaacacgccattgagattgacgccacagactttgagtcaggaggccttaacgtcactagcaacgcccgccctaacaagttatttactgctgaggcaaagataatcgcttacaaagctggaactctgaaacgcgaaaaaactgatgaggtggtcgcttcaaatatatag

SEQ ID NO: 63428 - protein, 114 aa, Unknown
  Obtained from environmental sample
  misc_feature (1)..(114): Xaa is any amino acid
MAFAGRGRGMAEFIKGDVIVVPFPFSDLTSLKRRPALVLAKSGANDFILAQITSKGVGDEHAIEIDATDFESGGLNVTSNARPNKLFTAEAKIIAYKAGTLKREKTDEVVASNI

SEQ ID NO: 63429 - DNA, 516 bp, Unknown
  Obtained from environmental sample
  misc_feature (1)..(516): n is a, c, g, or t
atgacctacatgggcgatgcttgcagacagcttgacaagaaactctccaccaaagaaggcgggtttatgcgcgaggccaccggctcttacgcgcccgccatcttcatgatgtccgacggccagcccaacgacgactttgacggagggttgggggcgttaaagcaaaacaactggttcaaggccgcggtaaaggtcgccatagccatcggcgacgacgcggacaaggacgtgctcgcccagttcgtaggctcaccggagggggtgattaccgcccacgacgccgccacattgaagaaatggatcaagttcgtcagcgtaaccgccagcaaggtagccagtaagagttccaacaccaaatccaacgcggacggaacccccgcgccggacaacgctaaacagcaagaactgaatcaggccatagccggacaggctgtcgcctcgggtgctgtcaaaacggcggacggcacaataaacgcgccgcccacatccacggcttctcccgacgacgtatggtaa

SEQ ID NO: 63430 - protein, 171 aa, Unknown
  Obtained from environmental sample
  misc_feature (1)..(171): Xaa is any amino acid
MTYMGDACRQLDKKLSTKEGGFMREATGSYAPAIFMMSDGQPNDDFDGGLGALKQNNWFKAAVKVAIAIGDDADKDVLAQFVGSPEGVITAHDAATLKKWIKFVSVTASKVASKSSNTKSNADGTPAPDNAKQQELNQAIAGQAVASGAVKTADGTINAPPTSTASPDDVW

SEQ ID NO: 63431 - DNA, 387 bp, Unknown
  Obtained from environmental sample
  misc_feature (1)..(387): n is a, c, g, or t
atggctttgccgccgttttcctgggttttcttttcctgcgccgctttcaaatcctcgtctttcttttcctgcgcttttttggcggcagcttcttcagcggctttcttttcctgcgccgctttcaaatcctcggctttcttttcctctttttttgcggcagcttcttcggcggctttcttttcttcctccattttcgcccttgcttcttccgccatttttatggcttcttcacgttctttcctctccctctcacggcgttcttcggcttctatttttgcttttcggagcgcttcgcggaaaggctcggcttttaccgcgtccatgtcgatgatgcccgctaccgagatatcgtccccggaaccgcgtttgcttagatcgggaaggtaa

SEQ ID NO: 63432 - protein, 128 aa, Unknown
  Obtained from environmental sample
  SIGNAL (1)...(23)
  misc_feature (1)..(128): Xaa is any amino acid
MALPPFSWVFFSCAAFKSSSFFSCAFLAAASSAAFFSCAAFKSSAFFSSFFAAASSAAFFSSSIFALASSAIFMASSRSFLSLSRRSSASIFAFRSASRKGSAFTASMSMMPATEISSPEPRLLRSGR

SEQ ID NO: 63433 - DNA, 579 bp, Unknown
  Obtained from environmental sample
  misc_feature (1)..(579): n is a, c, g, or t
ttgcaagatagaaaaatactcctacttctcctctgcaccaccctctttgcccagcaaaaaggcaccttcacagacacgcgagacggaaaagtctataaaaccacaaaaatcggcgagcaggtttggatggcggaaaatttgaattatgaggcgagtggttcaaaatgtaatgaaaacaaaccagccaactgcgataaatacggtaagttgtatgattggaaaacggctatgaaggcttgccagggtggttggcatttgcctagcaaggcagagtgggaaacgctagtagattttgttggtggtgataaagtagcaggcaaatatttaaagtcaaagagtggctggctcgaaaacggcaacggcgaggacaagtacggtttttccgcactgccggacggctacggcagttctagtgacagtttcagcaatgtcagctacaacggctactggtggaggtacactgagcccaatagcaactacgcctacaacaggtatatgtactacggcaacgagtacgtggcatacttcgactacagcaagttttacttgcacagtgtccgctgcctgaaagaccaatga

SEQ ID NO: 63434 - protein, 192 aa, Unknown
  Obtained from environmental sample
  SIGNAL (1)...(17)
  misc_feature (1)..(192): Xaa is any amino acid
MQDRKILLLLLCTTLFAQQKGTFTDTRDGKVYKTTKIGEQVWMAENLNYEASGSKCNENKPANCDKYGKLYDWKTAMKACQGGWHLPSKAEWETLVDFVGGDKVAGKYLKSKSGWLENGNGEDKYGFSALPDGYGSSSDSFSNVSYNGYWWRYTEPNSNYAYNRYMYYGNEYVAYFDYSKFYLHSVRCLKDQ

SEQ ID NO: 63435 - DNA, 666 bp, Unknown
  Obtained from environmental sample
  misc_feature (1)..(666): n is a, c, g, or t
atggctaaaggcgtgagctttatcgcaagcggcggggatcaagtcgataagagcgccggagaggaagtagaatacactaacttctttgctccaacaggactgcgtaacattccttttgctcccgtgtccggcaatcatgataatcatcttcactttaattatcactacaatttgcctaacgctcagacctttgcagacgaaacagttgccactgaagccggaagaaattatttctacctatacaacaatattctgtttgttgttttaaacaccgccccttatccgggcagtaccagcgcagcccagccgaatgtcgaacggtttaataagactctcactgccgctaaagccgcttacgccggaaagtacgactggcttattgttcagcaccacaaatccaccgccagcgttgccgaccatttagccgacagggatatacagtactatgttgaagccggttttgaaaaagttatgtctgatcataatgttgattttgtccttgccggacatgaccatgtatacgcccgcagttatccgctggaaggtaaagacggcggcaaagtctccgtgccggataaatccgccaatctggaggaaaagcgcctaatacttataccaatcccggcaagcctatctatcttacatttaccacaggcagcggactga

SEQ ID NO: 63436 - protein, 221 aa, Unknown
  Obtained from environmental sample
  misc_feature (1)..(221): Xaa is any amino acid
MAKGVSFIASGGDQVDKSAGEEVEYTNFFAPTGLRNIPFAPVSGNHDNHLHFNYHYNLPNAQTFADETVATEAGRNYFYLYNNILFVVLNTAPYPGSTSAAQPNVERFNKTLTAAKAAYAGKYDWLIVQHHKSTASVADHLADRDIQYYVEAGFEKVMSDHNVDFVLAGHDHVYARSYPLEGKDGGKVSVPDKSANLEEKRLILIPIPASLSILHLPQAAD
